United States Patent Application Publication US 2024/0327476 A1 - sequence listing, part 95

SEQ ID NO: 182973 - DNA, 3708 bp, synthetic construct
  misc_feature 1..3708: note = Description of Artificial Sequence: Synthetic coding sequence
  source 1..3708: mol_type = other DNA
atggaccacaccgccagccagaacgcccaggacctgatcggcatcccacaccttggagtgagcggctcttccaccaagtggcactccgagctgagtccgaccgagggaccacactctgctgggtcaagcacaccaggcttcctgtctcctatggcagagctgtcccacccctctccgccacctcctgcccttggttccctcctacagctccccgatggcagcccatcatggtccatgcttgaagtcgcgtccggccccgcaagtacccagcagatcaaagccggtgtccccggcagagtccacaatggcgtctccctccctaccttcaagaacacagagactgccacgcacgaggcggaacccccattgttccagactgccgaatcaggggccattgagatgacttctcgcaaacttgcttcagctactgccaacgacagcgctaatcctctgcaccttagcgctgcgccggaaaattctcgcggcccagccctttccgcagaacacacctcttccttggtgccatcgctgcacatcacgactctggggcaggaacaggcaatcctgtctggcgccgtgcccgcctcgccttctactggcaccgcggatttcccgagtatcttgacgtttctacaaccaactgagaatcacgcatccccatctcctgtaccagagatgccaacccttcccgcggagggatcagacggttcaccgcccgcaacccgcgatcttttactttcctctaaggtaccaaatctcctgagcacctcgtggacattcccacggtggaaaaaagatagtgttactgcaattctcgggaaaaacgaggaagcaaacgtgaccattccattacaggcatttcccaggaaggaggttctgtcgctacataccgtcaacggatttgtctccgacttttccacaggctccgtatcatctcccataattacagccccaagaaccaatccccttccatcaggtcctccactgccttcgatcttgagtattcaggcgacccagacagtcttccctagcctcgggttttcatccaccaagcctgaggcctacgctgcggcagttgaccattctggactgcccgccagtgctagtaaacaggtccgagcatctccgtcttctatggatgtctatgactccctcactatcggggacatgaaaaaacccgcaactacagacgtcttctggagcagtctgtctgctgaaacaggaagccttagcaccgagtccattatctcgggcctccaacagcaaaccaattacgatcttaatggacatacaatcagcacgacatcatgggaaacccatctggctcctacggctccacctaacggtctgacaagcgcagcagatgcaatcaaaagtcaggacttcaaagacacagctggccattccgtgaccgccgaaggattcagtattcaggacctggtgctcggtacttctatcgaacagccagtgcaacagtcagacatgacaatggtgggtagtcacattgacctttggccaactagtaataataaccattctcgtgatttccagacagcggaggtcgcatattactctcccaccacccgacactctgttagccacccccaattgcagctccctaaccagccagcccaccctcttctgctgacttctcctggtcctacaagcaccggatcgctccaggaaatgctaagtgacggcacagatacaggaagcgaaatttcctccgacattaacagctcccctgaaagaaatgccagcactccattccagaatatactgggctaccattcagccgccgagtcatctatatccaccagtgtttttccaagaacatcatcgagggtattgcgagcctcccagcaccctaagaaatggaccggagccgctaccaatgccgccgataccgtctcctcaaaggttcaaccaaccgccgccgccgctgtgaccctgtttttgagaaagtcgtctcctcccgccctcagcgctgctctcgttgccaagggcacctcgagtagcccactggccgtggcctcaggccctgccaagagcagctccatgaccactctagcaaaaaacgtaacaaataaggccgcatccggccctaaacggacacctggggccgtacatacagctttcccatttactccaacctatatgtacgctagaaccggacacacaaccagcactcacacagctatgcagggcaacatggatactgcaagcggactcttgagcaccacatacctgcccagaaaaccccaggctatgcacacaggcctcccaaacccaaccaacctggagatgccaagggcctccacgccccgccccctgactgtcacagcagccctcacttctataactgccagtgttaaggcgacccgtctgccacctctgcgtgcggaaaataccgatgctgtgctgcctgcagcatcggctgccgtggtgacaactggcaaaatggcatctaaccttgagtgccagatgtccagtaagctgcttgttaagactgtgctcttcctgacacagagaagagtgcagatctcagaatccctgaagttcagtatagccaaggggctaacgcaggctctccgtaaggccttccaccagaatgatgtgagcgcacatgtcgatatcttagagtatagccataacgtgacggtgggttactacgcaaccaagggcaaactggtgtatctgcctgcggtggttatcgaaatgttgggcgtttatggagtgtcgaacgtcactgccgatttaaagcagcataccccccacctgcagtcagtcgctgttttggctagcccttggaacccccagcctgccggctattttcaacttaagactgtacttcaatttgtctcccaagcagacaacattcagtcctgcaaatttgctcaaacaatggaacagagattgcaaaaagcattccaggacgcagagcgaaaggtgctgaatacgaagagcaatcttaccattcagattgtgagtacctcaaacgcttctcaagcagtcaccttggtctacgtagtaggtaaccaatcaaccttcctaaatggcacggttgcgtcttcgctcctgtcccagctctccgctgaactagtgggcttttatctcacgtaccctcctttgactatcgccgagcccctggagtatcctaacctggatattagcgagaccactcgggactattgggttatcactgtgttgcagggtgtggacaacagcctcgttgggctgcacaaccagtcatttgcaagggtaatggagcagagactcgcccagctatttatgatgagccagcagcaggggcgtcggtttaagagagctaccacccttggctcatataccgtccagatggttaagatgcagcgcgtaccgggcccaaaggatccagccgagctgacctactataccctctacaacgggaagccactgttaggcaccgccgccgccaagatactttcaaccatcgactcccaacggatggctttaaccttgcaccacgtagttctgttgcaggccgatccagtcgttaagaacccccctaacaacctttggattatcgctgccgtcctggctccaatcgccgtggtgacagtcatcatcattataattaccgcagtattatgccggaagaataagaacgatttcaaacctgatacaatgataaatttgccccagcgggcaaagcaagtggctcagtag

SEQ ID NO: 182974 - DNA, 5550 bp, synthetic construct
  misc_feature 1..5550: note = Description of Artificial Sequence: Synthetic coding sequence
  source 1..5550: mol_type = other DNA
atggaccacaccgccagccagaacgcccaggacctgatcggcatcccccatctgggcgtcagtggatctagtacgaagtggcattcggaactgagtcccacggagggaccacactctgccggttcatccacgccgggatttctctcacctatggctgaactctctcacccaagcccccctccgcctgctcttggcagcctgttgcaacttcccgatgggagcccatcttggtctatgctggaagtggctagcggacctgcctcgacacaacagatcaaagctggggtgcccgggcgagtccacaatggcgtgtccttgccaacctttaagaacacagagaccgctacccacgaagcagagcctcctctgttccagaccgcggagtccggggcaatagagatgacatctagaaaactggccagcgcaactgccaacgattctgccaatccgttacacttgtccgccgcaccagagaatagccgaggtccggctctttcagccgagcatacatcatcccttgttcccagcctgcacattacaacacttggccaggagcaggcaattctgagcggagctgtgcccgcatcccccagcacaggaaccgcggatttcccaagcattctgaccttcctgcaaccgaccgagaaccatgctagtcccagccccgtgcccgagatgccgaccctaccggcagagggttctgatggctcacctccagctacgcgagacctcctgctaagctccaaggtccccaatctgttatccacatcctggaccttcccccggtggaagaaggactcagttaccgctattctcgggaaaaacgaagaagctaatgtcacaatcccgctgcaggcattcccaaggaaggaggtcctcagcctgcacacggtgaacgggtttgtaagtgacttttccacagggagcgtttctagccctatcataaccgctccgcgcactaatccgctcccttctggacctccactcccctccatcttaagtattcaggccacgcagacagtgtttccaagcttaggattttcttctaccaaaccggaagcctacgcagcagccgtggaccactccgggctgccagctagtgcgtccaagcaggtgcgggcctcaccaagctccatggacgtctacgattctctgaccatcggcgatatgaagaagccggccactacagacgtgttttggtcatctctgagcgctgagacaggctctctctctacagagagtattatcagcggattgcagcaacagacgaactatgatctgaatggccatacaatcagcactacctcgtgggaaactcatttagcaccaactgcgccgcctaacggccttacatctgcagcagatgctattaaatcccaggattttaaggacacggctggacacagcgtcaccgccgagggtttttcaatccaagacctggttttaggtaccagcattgagcagccggtccaacagagtgatatgactatggttggaagccacatcgacctctggccgacatccaataacaaccatagcagagatttccagacggccgaagtggcctactactcccctactaccaggcactccgttagccacccccagctgcagttgcctaatcagcctgcacaccccctgctacttacaagcccaggaccaacttcgactggcagcctgcaggagatgctatcggatggcaccgatacggggtccgagatttcaagcgatatcaacagctcaccagaaaggaacgcatcaactccgtttcagaacatcctcggataccattctgcagccgaatcttccataagcacatctgtcttcccgagaacctcctctcgcgtcttgagggccagccagcaccctaagaagtggactgccgacaccgttagctctaaggtgcagcctacagccgctgccgcagtgaccctattcctgcgtaaaagttccccgcccgctttaagtgcagccctcgtggctaaaggaacatcgagcagtccgcttgcagttgcctccggcccagctaaaagttcatctatgaccacccttgcgaagaacgttacaaacaaggccgctagtggaccaaagagaacaccaggagccgtccacacagcatttcccttcacaccaacatatatgtatgctcggaccggccacactacctctacccatactgccatgcagggtaacatggatacagcctctggattactatcaaccacttacctcccacgcaagcctcaggccatgcatacgggcttgccaaatcccaccaatctggagatgcctagagcaagtacgcctagacctctgactgtgaccgccgctctgaccagtattaccgcatccgtcaaagcgacacgcctgccaccattgcgagcggagaataccgacgcagtcttacctgctgcgtccgctgctgtggtgacaacaggcaaaatggcttcgaacctggagtgtcagatgtcatccaagctgctggtgaaaacagtgctgttcctcacacagcgtcgggtacagatttcagagtccttaaagttctccatcgccaagggcttgacccaggcattgaggaaagcctttcaccagaatgacgtcagcgctcacgtggacattctggagtattctcacaacgtgaccgtgggttattacgccaccaagggaaagcttgtatacctccctgctgtggttatcgaaatgttgggcgtttatggggtctccaatgtcacagccgacctgaaacagcatactcctcatcttcagtctgtggccgtgcttgcctccccctggaaccctcaacctgccggttactttcaactaaaaacggtactgcagtttgtcagtcaggcagataatatccagtcctgcaagttcgcccaaacgatggaacagcggttacagaaagcctttcaggatgccgagcgtaaagtcctcaatacaaaatccaatctgacgatccaaatcgttagtacgagcaacgcctcccaggcggttacactggtgtatgtagttggaaaccagagcactttcttgaacggaactgtcgcttcttcactgctcagtcagctgtcggcagaactagtcggattctatttgacgtacccccctctgacaatagccgagcccctggaatacccaaatcttgacatttccgaaaccacacgcgattattgggtcatcactgttctgcaaggggttgataattctttggtaggactgcacaaccagtcttttgctcgggtgatggagcagaggctggcccagctgttcatgatgtcccagcagcagggccgtcgtttcaaacgcgccaccacattagggtcttacacagtgcagatggtaaagatgcaaagagtgccaggacccaaagacccagcggagctcacatactacacgctatataatggcaaaccactcttagggaccgctgccgccaaaattctttccactattgatagtcagcgtatggcgcttactcttcaccatgtcgtgctgttacaagccgacccggtggtaaaaaatccacctaataacctatggattattgcagcagtactggcgccaatcgcagtggttaccgtaatcattataatcattacagctgtcctttgccggaaaaacaaaaacgattttaagccagacacgatgataaacctacctcagagagcaaaaccagtgcaagggttcgactacgctaaacagcatctcggacaacagggtgcagatgaggaggttatccccgtgacccaagagactgtggtcctgccccttccaataagagatgcgccccaggagcgcgatgtagcacaggatggctctaccattaagacagccaagtcaaccgagacgcgaaaatctcggagcccgtccgaaaatgggagcgttatttctaatgagtccggcaaaccgagttcaggcaggcgctcccctcaaaacgtgatggcccaacagaaggtcactaaggaagaggcaagaaaaaggaacgtacctgcctcggatgaagaagagggtgccgtgcttttcgataatagttccaaggtggccgcggagccatttgatacctcttcaggaagcgtccagctgatcgcgattaagccaaccgcacttcctatggttcctcctacatccgataggtcacaggagtccagtgcggttctgaacggagaggtaaacaaggcactgaaacagaagtctgacatagagcactatcgaaataagcttcgtttaaaagccaaaagaaagggctactatgatttccccgccgtggagacatcgaagggcctcaccgagcgcaagaaaatgtatgagaaggcacccaaggaaatggaacacgtacttgatcccgactcggaactgtgcgcccctttcactgaaagcaagaaccgtcagcagatgaagaattctgtgtataggtccaggcagtccctaaatagcccatccccaggcgagacagaaatggatctcctagttactcgtgagaggcctagaagggggatccgcaattccggatatgataccgaacccgagattatcgaggaaaccaacatagatcgcgttcccgagccaagaggctactctaggagtaggcaagtgaagggacacagcgaaacatccacgttgagctctcagccttccattgatgaggttcggcagcagatgcatatgctgctcgaggaagccttctctttagcaagcgccggtcacgccgggcagtccaggcaccaagaggcctacggttccgcacagcatctgccgtatagtgaagtggtcaccagcgcgcctgggaccatgactaggcctagggctggggtgcaatgggttcctacttataggccggaaatgtaccagtattccctccctagacctgcataccgcttctcccaattacctgagatggtcatggggtctcccccaccacccgtgcctcctaggactggacccgttgctgttgcttctctccgccgctcaacaagcgatattggctctaagacacgtatggccgaaagcacaggtcccgagccagcccaactgcacgattctgcctcttttacacaaatgtcacgtggacctgtgtccgtgactcagctcgatcagtcagccctcaactatagcgggaacaccgtgcctgctgtcttcgctatccccgccgcaaatcggccaggcttcaccgggtactttattcccacacctccttcttcgtacagaaaccaggcgtggatgagttacgcgggcgaaaatgagctgccttctcaatgggccgatagtgtgccgctgcccggatacattgaagcctacccaagaagcaggtaccctcagtctagtcctagtcgattaccccgccagtattcccaaccggcaaatctccacccaagcctggagcaagccccggctcctagtacagccgcctcgcagcagtccctcgcggaaaatgaccctagtgatgctccactgactaatatctccactgccgccctggtcaaggctatcagggaggaagttgccaagcttgcgaaaaaacagaccgacatgtttgagtttcaggtctag

SEQ ID NO: 182975 - DNA, 5568 bp, synthetic construct
  misc_feature 1..5568: note = Description of Artificial Sequence: Synthetic coding sequence
  source 1..5568: mol_type = other DNA
atggaccacaccgccagccagaacgcccaggacctgatcggcatcccgcacctgggcgtgtcagggtcgtcaaccaagtggcatagcgagctatctcccacagagggccctcattccgccggttctagcacgcccggttttctgagtcccatggcggaactttcccacccgtcaccccctcctcccgcgctgggatctcttcttcaactgccagacggcagccccagctggtcaatgctcgaggtcgcctccggcccggctagcactcaacagattaaagctggtgtccccggcagggtgcacaacggggtctcgctgccgacattcaagaacactgaaacggcaacccacgaggccgagcctcccctgttccagaccgctgaaagtggagctattgagatgacatctaggaagcttgcatccgccacagccaacgacagcgctaacccactgcatctgtcagctgcaccagaaaattcgcgtggaccagccctgagcgcagagcacacctcgtctctagtcccctctctccacataaccaccctggggcaggagcaggccatccttagcggtgctgtgcccgcatcaccatccactggcacagcagacttccctagcatcctgacatttctccagcctaccgagaaccacgcatccccttcccctgtacctgagatgccaacattgcctgccgaaggatcggatggtagtccaccagctacgcgcgacctgcttttgtcatctaaagttcccaatctgttatctactagttggactttcccaagatggaaaaaggacagcgtcaccgccatcctgggcaagaacgaagaagccaacgtgacaatcccacttcaagccttccctcgaaaggaggtgctcagcctgcacacagtgaatgggttcgtgtcagatttctcaaccggaagtgtctctagtcctattattactgctccaaggacaaaccctctgcctagcggtcctcccctccctagcatcctcagtatccaggctacccagactgtgttcccgagtctgggattctcatctactaagccagaagcttacgccgccgcagtcgaccatagcggactgcctgcttcagcctcaaagcaggtgagggcgtcccctagttccatggatgtatatgactccttaactattggagatatgaaaaaacccgcgaccactgacgtcttctggtcatctctgagcgctgaaacgggttccctgtcaacagagtccattatcagtggcttgcagcagcagacaaactacgacctgaatggccacaccatttctactactagctgggagacccacctggctcctactgcccctcctaatggcctcaccagcgcggccgacgctattaaatctcaggatttcaaagacactgcaggacactctgttacagcagaaggtttttcaatccaggatctggtcctgggaaccagcatcgaacagccggtgcagcagtctgacatgacaatggtcgggtctcatatcgacctctggccaacttccaacaataatcacagcagagatttccagacagccgaagttgcctactactccccaaccactagacattcggtttcccatcctcaactacagctgcctaaccagcctgcgcaccctctgctcctcacaagtcccggacctactagtactggatctctccaagagatgctctccgacgggaccgacaccggctctgaaatttcatccgacattaattccagtccagagcggaacgcctccacaccctttcagaatatcctggggtatcactcagctgcagagagctccatatctacctccgtattccccagaactagctctcgggttctccgcgcatcccagcatccgaagaaatggaccggggccgctaccaacgctgctgacacagtcagctctaaggtgcagcccaccgccgcagccgctgtaaccttgttcctgcgcaaatcgtccccgccagccctaagcgccgcgctggtcgcaaagggaactagttctagccctctcgcagtggcctctggccctgccaagtctagttcgatgaccacactggccaagaacgtgaccaataaagcggcgtcagggccaaaacgaacccccggcgcagtgcacacagccttcccattcacccccacttacatgtacgcaaggactggtcatacaacatccactcacacggccatgcagggcaatatggataccgcttcaggattactgtcgaccacgtacctgccccgaaagccccaggctatgcacaccggactgcccaaccccaccaatttggagatgccacgagcgtcaaccccccggccattgaccgtgactgccgccctgacctctattaccgcgtctgtgaaggctacaaggctgccaccactgagggccgagaataccgacgctgtcctccccgcagcttctgctgccgttgtgacgacaggaaaaatggcgagtaacctggaatgccaaatgagttctaaactgttggtgaagaccgtcctgtttctcacccagcggcgcgtgcagataagcgaaagcttgaagttttctattgcaaagggtctgacccaggctctccggaaggcattccatcaaaatgacgtgagtgctcatgtggacattcttgagtacagccacaatgttactgtgggctattatgcgaccaaggggaaactggtctatttaccagccgtcgtaattgaaatgctcggcgtgtatggtgtctccaacgtcactgcagatttgaagcagcacaccccgcaccttcaatctgtggctgtgctcgcttctccctggaatcctcagccggcagggtattttcagttgaagactgtcctacaattcgtttcccaggccgacaacatccagagctgcaagttcgcccagaccatggagcaacgcttgcaaaaggctttccaggacgctgagaggaaggtgctgaacaccaagtccaacctgacaattcagatcgtgtccactagcaatgcatctcaagctgtgaccctcgtctatgtagttggtaaccagtccacatttctcaatggcacagtggcttcctccctgctttcccaattgtctgccgaactggtgggcttttatctgacttacccccctctgaccattgcagagcccttggaatacccaaacttagatatatctgaaactactagagactattgggtcataaccgtcctccagggcgttgataactcactcgtgggcctgcataaccaatcttttgctcgcgtgatggagcagcgcctcgcacagctattcatgatgtcacagcaacagggccgccggtttaagcgagccacaacgctcggctcatacaccgtccagatggtgaagatgcaaagggtgcccggcccaaaggaccccgccgaactcacctactacactctttataacgggaaacccttgctcggcaccgccgccgctaagattctttctactattgacagtcagagaatggcgctgacactgcatcatgtggtactgctccaggctgacccggtagtcaagaacccccccaataacctgtggatcattgccgctgtgctcgctcctattgcagtggtaaccgtgatcattataataataaccgccgtcctctgccgcaagaataagaacgatttcaagccggacacaatgattaacctgccacaacgggctaagcctgtccaaggcttcgattacgcaaagcagcatctgggccagcagggtgccgacgaagaagtaattccagtgactcaggaaacagtggtattgccgttgcccataagagacgcccctcaggagcgcgatgtcgcgcaggatggatcaaccattaagaccgcaaagagcacagagacgcgcaagtcacgctctccgagcgaaaatgggagtgtaatctccaacgagtctggcaaaccctcgagcgggcgcaggtctccacagaacgttatggcacagcaaaaagtcacaaaggaggaggcacggaaacgaaacgtgcctgcctccgatgaggaggagggcgccgtgctgtttgataactcctctaaagtagccgcggaaccattcgatacgtctagcggaagcgtgcagttgatagcgataaaacctactgctctacctatggtgccacctacctcggataggagtcaggagtcaagcgctgtactgaacggggaggtgaataaggctctaaaacaaaaatcggatatcgaacattatagaaataaactgcggctgaaggctaagcgtaagggctattatgatttcccggcagtggaaacgtctaaaggcctgacggagcggaaaaagatgtacgaaaaagcccccaaggagatggagcacgtgctcgaccccgacagtgagctgtgcgcaccattcaccgaatctaagaataggcaacaaatgaagaactccgtataccggtctcgccaatccttgaactcaccatcccccggcgagactgagatggacttgctggtcacacgcgagaggccaagaagagggatcagaaacagtggttacgatactgagccagagatcatcgaagagacaaacatagaccgagtcccagaacctagggggtactccaggtccagacaggtgaaaggacacagtgagacatctacgctgagttcgcagcccagtattgacgaggttcggcaacaaatgcatatgctgctcgaagaggcatttagcctagcctctgcaggccatgctggccagagtaggcatcaggaggcctatggtagcgcccagcatttgccatatagcgaagtggtgacttctgctcccgggacgatgacaagacccagagctggcgttcagtgggtcccaacatacaggccagagatgtatcagtacagtttgccccgtccagcctatcgctttagccagctgcctgaaatggttatgggttctccaccccccccggtgcctcctcgaaccggtcccgtggccgtggccagcctgcggagatctacttccgatattggcagtaaaacacgcatggccgagtctactgggcccgagccggctcagctgcacgacagcgcctcttttacccagatgtccagaggcccagtctctgtgactcaactcgatcagagtgccctcaattacagcggcaataccgtgccagcagtttttgccattcctgcagccaatagaccaggatttacaggatatttcatcccaactccgcccagctcctataggaaccaggcttggatgtcttacgccggcgaaaatgaactgcccagccagtgggcagactccgtacctttgcctggttacattgaggcatatccgagatcacgttatccccagtccagtccatctcggctcccgagacagtattctcagcctgccaatctgcatccatccctggagcaggctcccgcaccatcaaccgcggcctcccagcagagcctggccgagaatgatccctcagatgcacccctcactaatatctccactgccgctctggtgaaggctatccgcgaagaggttgctaaattagctaagaaacaaacagatatgttcgagttccaggtgtag

SEQ ID NO: 182976 - DNA, 5067 bp, synthetic construct
  misc_feature 1..5067: note = Description of Artificial Sequence: Synthetic coding sequence
  source 1..5067: mol_type = other DNA
atccccgagggcctgagcgccgagcacaccagcagcctggtgcccagtttacacataacgacgctcggccaggaacaggccatcctttcaggagctgttccagcctccccttccacaggcacagctgatttcccctccattctgacattcctccagcccacagaaaatcacgccagtccaagcccagtaccggagatgccgacactgcctgcggaaggaagtgatggaagtcctcctgccaccagagaccttctcttgtccagtaaagtgcccaacctgttgagtacaagctggacatttcctagatggaaaaaagacagtgttacagctattctgggcaaaaacgaggaagctaacgtgaccataccacttcaggcctttcccaggaaggaggtgctgagtctgcataccgttaatggattcgtgtcagatttcagcactgggtctgtgagctcacctatcatcaccgctccgcgcacaaacccgcttccgtccggtccgccgttaccatccattttgagcatacaagccactcagactgtgtttccaagcctggggtttagcagcaccaaacctgaggcctacgcagcggcggtggatcacagcggcctgcctgcctcagcctcaaaacaagttcgcgcatctcctagttctatggacgtgtacgactcactaaccatcggggatatgaagaaaccagccactacagatgtcttctggtcttctttgagcgccgagacagggtcactcagcactgagtcgatcatatccgggcttcagcagcaaaccaattacgacctgaatgggcatacaattagcactactagctgggagacgcatttggcgccaacagccccccccaacggtctcacttccgccgccgacgccataaagagtcaggattttaaggatacagccggacacagtgtgactgcagaaggcttcagcattcaggatctagtgcttggtacatcaattgaacagcctgtacagcagtcagatatgacgatggtgggaagtcacatagacttgtggcccacctccaataataatcatagccgagattttcaaaccgctgaagtcgcctactattctccaacaacaagacattcagtctctcatccacagctgcaattacccaaccagcctgcacaccccctattgcttacgtctcctggcccaactagcacaggttcccttcaagagatgctatctgatggcaccgacaccggatcggaaatttcttcagatatcaattcatccccggagaggaacgctagcacaccttttcaaaatattttgggctaccacagtgctgcagaatcctccatctctacttcggtttttcccagaacatcgagccgggtgctgcgcgcatcccagcatccgaaaaagtggactgctgatactgtgtcgagcaaggtacaacctacagcggccgcagctgtgacactgtttcttcggaagtcatctccacctgctttgagcgcagctttggtggccaaaggcacctcatcttctcccctggccgtagcctccggccctgccaaatccagttcaatgacaactttggctaaaaatgtcaccaacaaagctgccagtggaccgaaaaggacacccggggcagttcacacagcctttccattcactcctacttacatgtatgctaggaccgggcatactactagcacacatactgcagcacggaaacatggtcattgtctatggccagtcgtgtataacttgccaccccgcaagcctcaggctatgcacaccgggcttccaaatcccactaacctggaaatgccacgggcctctacaccaaggccgctcactgtcaccgcagcactgacatctatcaccgccagcgtcaaggctactaggctgcccccactgcgggctgagaacacagatgccgtgctgcctgcagcttctgctgctgtggtgacaacagggaagatggccagcaatctggaatgtcagatgtcatcgaagttactggtgaagactgtgctgtttctcacccaaaggcgggtgcagatatccgagtctctgaaattttccatcgcaaagggcctgacccaggccctcagaaaggcctttcaccagaatgatgttagcgctcacgtcgacatcctcgagtactcacacaacgttaccgtcggatattacgccacaaagggtaagctggtgtatcttcctgctgtggtgattgagatgctgggcgtgtatggagttagcaatgtaaccgccgatttaaaacagcacaccccacatttacagtccgtcgccgtgctggcaagtccgtggaatccccaaccggcgggctacttccagctgaaaaccgttctgcagttcgtttcccaggctgataatattcaaagctgtaagttcgcccagacaatggagcaaagacttcagaaagctttccaggatgcagaaagaaaggtgcttaacactaaaagcaacctgacaattcagatagtatcaacgtctaacgcctctcaagccgtgactctggtctacgttgtggggaatcagagcactttcctgaacggcacagttgcctcctctctactgagtcaactgtcagccgagcttgttggtttttacttaacttatccaccccttaccattgcagagcctctggaatatcctaatttggatattagtgagacaactagagattattgggtgattacagtgctacaaggcgtggataattctctggtcggtctacacaatcagtcattcgctagagtcatggagcagcgcctggcccaactgttcatgatgtcacagcagcagggcagacgattcaagcgcgccacaacactgggatcatacacagtgcagatggttaagatgcagagagtgcccggtccaaaggatcctgctgaacttacttattacacattatataatgggaaacccctgctgggcaccgccgcggccaagatactgagtacgatagattctcagcgcatggccctcacactccatcatgtggtgctgctgcaggcagatccagtcgttaagaaccctccaaacaacctgtggattattgcggcagtgctggcccccatcgctgtggtgactgtaataataattatcattaccgccgtcctatgtcgaaaaaacaagaacgactttaaacccgacaccatgatcaacctaccacagcgggccaagcccgttcagggcttcgactacgcaaaacaacatttgggccagcagggggcagatgaagaggttattcctgtcacccaagaaactgtggtgctgccccttcctatcagagatgctccccaagagcgcgatgtagcccaggacgggtcgacaatcaagactgcgaaaagcacagagactcgaaaaagccgaagtccatctgagaacggtagtgttatctcaaacgaaagcggcaagccaagctccggtcgccgttcaccccagaatgtgatggcacagcaaaaagtaaccaaggaagaggccagaaagcgtaatgtgcctgctagtgacgaggaagagggtgcagtcctctttgataacagtagcaaggtcgccgcagagcctttcgacacatctagtggttcagtgcagcttattgcgatcaaacccaccgcacttccaatggttccaccaacctcggacaggagtcaggagagttctgcagtcttgaacggagaagttaacaaggcgctcaagcaaaagtctgatattgaacattatcggaacaagctacgactcaaagcgaaacggaaagggtattacgacttccccgcggtagagacatcaaagggtctcactgagcgaaaaaagatgtatgaaaaagcccccaaggaaatggaacatgtcttggaccccgactctgaactctgtgcgcctttcactgagtcgaagaatcgccaacaaatgaaaaacagcgtataccgatctaggcagtccctgaactccccatcccccggggagacagaaatggatctgttggtgactagagaaagaccccgcaggggtatacgtaattctggatacgatacagaacccgagatcattgaagagaccaacatcgaccgcgtgcctgaaccccgcggatattccagatcccgccaggttaagggtcattcagagacttccacactgagtagtcaacccagtatagatgaggttaggcagcagatgcacatgctgcttgaggaggcattttccctcgcctctgctggtcacgccggccaaagcagacaccaggaggcctatggcagtgcccagcacctcccatactccgaggttgtgacgtccgctcccggcacgatgacgcgccctcgggcaggcgtgcagtgggtgcccacatacaggcctgaaatgtatcagtactccctccccaggcccgcctatcgcttctctcagctgccagagatggtcatggggagccccccacctcctgtacctcctaggactggtccagttgctgtagcatctctacggcgctcaacttctgacattgggtcaaagacacgcatggccgagtccaccggaccagaaccggcacaactgcacgactccgccagttttactcagatgagtagggggccagtgagcgtcacacagctggaccagagtgcactcaattactcagggaacaccgtgccagccgtgttcgccatcccagcagctaaccgacccggtttcactggctatttcattcccacacctccaagcagttacaggaatcaggcttggatgtcttacgccggggagaatgaactgccaagccagtgggccgattccgtacctctgcctggatacatcgaggcatatccccggtcccgttatcctcaatcctccccttcgaggctccctcgacagtattcacagcccgccaacctccacccgagcttggagcaggccccagctccttctacagctgcctctcagcagtcattggctgaaaacgatccctcagatgcacctcttacaaatatcagcactgcagccctggtgaaggccattagggaggaggtcgctaaactggctaagaagcagactgacatgttcgaatttcaagtatag

SEQ ID NO: 182977 - DNA, 783 bp, synthetic construct
  misc_feature 1..783: note = Description of Artificial Sequence: Synthetic coding sequence
  source 1..783: mol_type = other DNA
atgatggacccctgcagcgtgggcgtgcagctgcggaccaccaacgagtgccacaagacctactatactcgccataccggatttaaaactctacaggagctgtcatccaatgacatgttgttgctgcagctgcgcacaggcatgacgcttagcgggaataacacaatttgttttcaccacgtgaaaatttacatcgatcgcttcgaagaccttcagaaaagctgctgcgacccttttaacatacacaagaagctcgccaaaaagaacctgcacgtcatagatctcgacgatgctacttttctaagtgctaaatttggacggcagttagtgccaggctggaaactgtgccccaaatgcacacagattatcaatggatctgtagacgtggacaccgaagacagacaaaagagaaaacccgagtctgatggacgaactgctaaggcactgcgatctctgcagtttacaaatcctggcaggcagacagagttcgcccctgagaccgggaagcgagagaaacggcgcctgactaaaaacgccaccgccggcagtgataggcaggtaatcccagcaaaatccaaagtctacgactcacagggacttctgatcttctctggaatggatctctgcgactgcctggatgaggattgtctgggctgcttctatgcctgcccggcctgcggctccacgaaatgcggggctgaatgccgatgtgacagaaagtggctttacgaacaaatcgagatcgaaggtggagagattattcataacaagcatgcggggtag

SEQ ID NO: 182978 - DNA, 507 bp, synthetic construct
  misc_feature 1..507: note = Description of Artificial Sequence: Synthetic coding sequence
  source 1..507: mol_type = other DNA
atgatggacccctgcagcgtgggcgtgcagctgcggaccaccaacgagtgccacaaaacttattatacccggcatactgggttcaagaccctccaagagctatcatctaacgacatgctgttgctgcaactccggactggcatgactctctcaggtaacaatacaatctgcttccatcacgtaaagatctacatcgataggtttgaagatttgcagaagtcctgctgtgacccctttaacattcacaaaaagttggcaaaaaaaaacctgcacgtcatcgatctggatgacgccacattcctcagcgcaaagtttgggcggcagctggttcccggatggaaattgtgccccaagtgcacccagatcatcaacgggtcagttgacgtggacactgaagatcgacaaaagcggaagccagaatcagatggcagaacagccaaagccttgagaagtcttcagtttactaaccctggccggcaaacagagtttgctccggagaccggctag

SEQ ID NO: 182979 - DNA, 180 bp, synthetic construct
  misc_feature 1..180: note = Description of Artificial Sequence: Synthetic coding sequence
  source 1..180: mol_type = other DNA
atgcggcagctgaagggcaagcccaagaaggagaccagcaaggacaagaaggagcgcaaacaagccatgcaagaggctcggcagcaaatcacaacagtcgttctccccactctggcggtagttgtactgctcatcgtggtgttcgtgtacgtggctaccaggcctacaatcactgagtag

SEQ ID NO: 182980 - DNA, 180 bp, synthetic construct
  misc_feature 1..180: note = Description of Artificial Sequence: Synthetic coding sequence
  source 1..180: mol_type = other DNA
atgcggcagctgaagggcaagcccaagaaggagaccagcaaggacaaaaaggagcggaagcaggctatgcaggaggcaaggcaacagatcactactgtggtccttcccaccctggccgtggttgtgctacttatcgtggtcttcgtctatgtggcgacccgcccaacaatcaccgaatag

SEQ ID NO: 182981 - DNA, 144 bp, synthetic construct
  misc_feature 1..144: note = Description of Artificial Sequence: Synthetic coding sequence
  source 1..144: mol_type = other DNA
atgcggcagctgaagggcaagcccaagaaggagaccagcaaggacaagaaggagcggaaacaggcgatgcaggaggcgcgacagcaaatcacaacagtggtgcttcctacattggccgtagtagtcctgctgattgtcgtctag

SEQ ID NO: 182982 - DNA, 180 bp, synthetic construct
  misc_feature 1..180: note = Description of Artificial Sequence: Synthetic coding sequence
  source 1..180: mol_type = other DNA
atgcggcagctgaagggcaagcccaagaaggagaccagcaaggacaagaaggaaaggaagcaggccatgcaggaggcccgtcaacagataaccacagtggtgcttcccaccctagccgtggtggttctcttaattgtggtctttgtgtatgtggctacccggccaacgattacagagtag

SEQ ID NO: 182983 - DNA, 159 bp, synthetic construct
  misc_feature 1..159: note = Description of Artificial Sequence: Synthetic coding sequence
  source 1..159: mol_type = other DNA
atgcggcagctgaagggcaagcccaagaaggagaccagcaaggacaagaaagagagaaaacaggcaatgcaggaggcccgccaacagattaccactgtggtgctgcccactttggcagtggtcgttctgcttatcgtggtcttcgtctacgtagcttag

SEQ ID NO: 182984 - DNA, 3336 bp, synthetic construct
  misc_feature 1..3336: note = Description of Artificial Sequence: Synthetic coding sequence
  source 1..3336: mol_type = other DNA
atgcactggctgcccgccggccacgacatcaacggcgccctggagcccagcaacattgacacctcaatcttagaggagtatatctccaaagaggacgcatcagacctgtgcttcccagacatatcagctcctgcgtcatcggcttcctatagtcacggtcaacctgctatgcccggctctagtggggtgcatcacctctccccccccggcgggggtccaagtcccggtagacacgggcctttgcccccaccgggctacggcaccccactgaattgtaataataataatggaatgggagcagcccctaagccatttcccggagggaccggacctcccattaaggccgaaccaaaagcaccctatgccccagggactctccctgatagtcctccggactctgggtcagaagcttacagtccccagcaggtgaacgagccccaccttctgaggacgatcactcccgagactctctgtcatgttggtgtcccaagccggcttgagcacccaccacctccccccgcccacctgcctggacctcctcctccccccccaccgcctcctcactaccccgtgctccaacgggacctgtacatgaaagctgagcctccgattccacattacgccgccatgggtcagggactggtacccacagaccttcatcacactcaacagagccaaatgctccaccagttactgcagcaacacggagctgagctcccaactcaccccagtaagaagcgaaaacacagtgagagcccaccgagcaccttaaatgcccagatgctgaacggaatgatcaaacaagagccgggaactgtaaccgctttacccttgcatccgacacgggccccgagtcccccttggccaccccagggcccgttgagtcccggaccaggctctctccccttatcaatcgccagggtgcagacccccccctggcatccacccggtgccccgtcgcccggcttgctgcaggacagcgattccctgagtgggtcttatctggaccctaactaccaatccatcaagtggcaacctcaccagcagaataagtgggccacactctatgatgccaattacaaggagctgccaatgctgacttatagggtcgatgcagacaaagggtttaactttagcgtcggtgacgatgccttcgtttgccagaagaaaaatcactttcaggttacagtctacattggcatgctgggcgaacccaagtacgtgaaaaccccagaggggctgaagcctctcgactgtttttatttgaagctgcatggagtgaaacttgaagccttaaaccagtcaattaatatcgagcaatcgcaaagtgacaggtcaaagcggcccttcaatcctgtcacggtgaacctgccacctgaacaggtcacaaaagtgaccgttggccggcttcacttctcagaaactacagcgaacaatatgaggaagaaggggaagccaaacccagatcagcggtatttcatgttggtggtggctctgcaggcacatgcccagaaccagaactacacactcgctgcacagatctcagaaagaattattgttagggccagcaatcctgggcagtttgagagcgattccgatgttctatggcagagagctcaggtgccggacaccgtatttcatcacggtcgtgtcggcattaataccgacaggcccgatgaagctctggtcgtccacggaaatgtcaaagtaatgggctcactgatgcaccccagcgatttacgggccaaagagcatgttcaagaggtggatacaacagagcagttgaagaggatcagtcgaatgaggctcgttcattacaggtataagccggagttcgccgcctctgctggtatcgaagcgaccgcacctgaaaccggcgtgatcgcacaggaggtaaaagaaatcctgccggaggccgtgaaggacactggagatatggtttttgcaaatggaaaaacaatagagaatttcctggtagtcaacaaggagaggatctttatggaaaatgttggagctgtgaaggagctctgcaaactcaccgacaaccttgagacaaggattgatgagctggagcggtggtctcacaaactggcaaaactgcgtcgccttgacagtctaaagtcaacaggctcatctggtgccttttcccatgccggatctcaatttagcagggccggatcggtacctcacaagaagaggccccctaaagttgcctcgaagagctcttctgtggtgccagatcaggcatgcattagccagcgtttcctccaggggactattatcgcactcgtggtcgtcatggctttttcagtggtcagcatgagtactctctatgtactcagtcttcgcacagaggaagatctggtggatacagatggcaggagctcccagagttttggcactacgcagctgagacagagccccttaaccaccgggctgcctggcatacagccatctctgctccttgtgacaaccagcctgacatcctccgcacccggaagcgccgtgagaacattggatatgtgttcatctcacccgtgcccggtgatttgttgtagctctccaacaaccaatcccaccaccggtccctcactcggtcccagctttaatccaggccacgtcctgagtcccagcccaagtcccagtactaatagatccggcccgtcccagatggcactgcttccagtcaccaatatacgtgcaaaatcatggggcctgagcgtaaacggcatcggccacagcaagcatcataagtcactggaacccctggcctctccggccgtgccctttccaggggggcagggcaaggccaagaattcaccttctctgggcttccatggaagggcccggaggggcgccttgcagtccagtgtggggcccgctgaaccaacctgggctcaaggccagtcagaacctgtgccatcacttacttcgatccaggtgctggagaatagtatgtcgataaccagccaatattgtgcaccaggagacgcttgccgacctgggaacttcacataccacatacctgtgagctctggcacacctctccatctatctcttacacttcaaatgaactcctctagtccagttagtgtggttttatgcagtctcaggtctaaggaagagccatgtgaagagggaagcctacctcaaagtctgcacactcatcaagatacccagggcacctcacacagatggccaatcaccatactgtcctttagagagttcacataccatttcagagtggctttgttgggccaggctaattgttccagcgaggcccttgcgcagccagctaccgactatcacttccacttttaccggctctgtgattag

SEQ ID NO: 182985 - DNA, 3456 bp, synthetic construct
  misc_feature 1..3456: note = Description of Artificial Sequence: Synthetic coding sequence
  source 1..3456: mol_type = other DNA
atggaggtggtggacgagaccgaggccctgcagcggttcttcgaggggcacgacatcaacggcgcgctggagccttcgaacattgataccagcatactcgaagaatacatctccaaggaggacgccagcgatttgtgctttccagatatttctgcaccggccagcagcgccagttattcccatgggcaaccagcaatgccagggtcctccggagttcaccatctgagccccccaggtggaggcccatctccgggtcgccatggcccattgcccccacccggctatggaactccattgaattgcaacaataacaacggcatgggagccgcacccaagcctttcccagggggcaccggtcctccaatcaaggctgaaccaaaagcaccttacgcaccaggtaccttgcccgattcccccccagacagtggttccgaggcctactctcctcagcaggttaacgagccccatttgctcaggactataacacctgagacactttgccatgtaggcgtccccagcaggctggaacacccaccccctcctcccgcgcatcttcctgggcccccacctccccccccccctcccccacactacccagtgctgcagcgcgatctctacatgaaggctgaaccgcccattccacattatgctgctatgggccaagggctggtacccaccgatctacaccacacacagcagtcccagatgctccatcaactgcttcagcagcacggcgccgaattgcctacccatccttcaaaaaagcggaaacacagcgaatcacccccatctacgttaaatgcccaaatgctaaatgggatgattaagcaggagcctggaactgtcacagctttgccattgcaccccacccgtgcacctagccccccgtggcctccacaaggcccgctgagtcccggcccaggctctctgcctctatccatagccagggttcagacaccaccgtggcatccgcccggagccccctcgcctggtctattgcaggattcagatagcctctctggttcctacctggatccaaactatcagtcgataaaatggcaaccccaccaacagaataagtgggctacactgtacgacgccaattataaagaactgcccatgctcacatacagggtcgatgccgacaaaggctttaacttctcagttggcgacgacgcttttgtgtgtcagaagaagaaccatttccaggtgacagtctacattggcatgctgggcgagccgaagtatgtcaagactcctgagggattgaagcccctagactgcttttacctgaagctccacggggtcaaattggaggccttaaaccaatccatcaacattgaacaaagtcaatccgaccgaagtaagcggcccttcaatccggtgactgtgaacctgccacctgagcaggtcaccaaagtgactgttggacgccttcatttctccgagacaacagccaacaatatgcggaagaagggcaagcctaatcccgaccagagatatttcatgctcgtggtggctttgcaggcacatgctcagaaccagaactatacgctggcagctcagatcagcgaacgaataatcgtgagagcgagtaatcctggacagttcgagagcgatagcgatgtcctatggcagcgtgcccaggtgcccgacacagtctttcaccatggccgggttggtattaacaccgatcgtcccgacgaagccctcgtggtccacgggaatgtaaaagtaatgggctccttaatgcacccttccgacttgagggcaaaagaacacgtccaagaggttgacaccaccgagcaattgaaaagaattagccgcatgaggctggtacactataggtataaacctgaatttgctgcatccgccggcattgaggccactgcccccgagactggagtgatcgctcaggaagtgaaagagattcttcccgaggcggtgaaggataccggggatatggtgttcgccaatgggaaaaccattgaaaacttcctcgtggtgaacaaagagcgtatttttatggaaaacgtgggcgcagtcaaagagctctgcaagctgaccgataacctggagacacgcattgatgagctggaaaggtggtcccacaaacttgccaaactacgccgtctggatagcctgaagtctaccgggagtagcggagcattctcccacgcagggtcccaattcagcagagctgggtctgtgccccataagaagagaccacctaaagtcgcctcaaagtccagcagcgtggtcccggaccaagcatgtattagccaaaggttccttcaaggcaccatcattgcgctggtggttgtgatggcctttagtgtcgtgtcaatgtctactctgtacgtgttgtctctgagaacagaggaagatctcgtggatactgatggatctttcgcagtgagcacatcctgcttgctggcattgcttagaccacagcccccaggcggctccgaggctctatgtccttggagcagccaatcattcggtactacacagctccgccagagtcccctgacgactgggctcccagggatccaaccaagcctattactcgtcacgactagcttgacttcgtctgcccctggtagcgctgttagaaccctcgatatgtgttctagccatccgtgccctgtcatctgttgttcctcgccaaccaccaacccgacaaccggccccagcctgggaccgtcatttaacccagggcacgttcttagcccttcgccaagtccctccacaaaccgaagtgggccatcccagatggcccttctgcccgttacaaacattcgtgctaaatcctgggggctgagtgtgaatggaattggccattcgaaacatcataaatctctggaacctctggcttcgccagctgtacccttccccggggggcagggcaaggcgaagaattctcccagtctgggttttcatggccgggccaggcgcggagcactgcagtcttcggtgggacccgctgagccgacatgggcacaggggcagtcagcctccctgcttgcggaacccgtcccatccctgactagtattcaggtcctagaaaacagcatgagtatcacttcgcagtactgtgcgccgggtgacgcctgccggcccggtaactttacctatcatatccccgtaagctctggaacccccctccacctttccctgacgttgcagatgaactcttcaagccccgtgagtgtcgtcctgtgctccttgcgcagtaaagaggagccgtgtgaggaggggagcctaccacaatccctgcacacacaccaggacacccaggggacgtctcatcggtggccaattactattctaagcttccgcgagttcacttaccacttcagagtagccctactgggccaagccaactgttccagtgaggccttggctcagccagctacagattaccattttcatttttacagactatgcgactag

SEQ ID NO: 182986 - DNA, 1449 bp, synthetic construct
  misc_feature 1..1449: note = Description of Artificial Sequence: Synthetic coding sequence
  source 1..1449: mol_type = other DNA
atgctgacctaccgggtggacgccgacaagggcttcaacttcagcgtgggggatgatgctttcgtatgccaaaaaaaaaatcattttcaggttaccgtgtatatcggcatgctgggcgaacctaagtacgtgaagacacctgaaggcttaaagccactcgactgcttttatttaaaactgcacggcctcgaagccctgaaccagagcatcaacattgagcagtcacagtccgacagatcgaagcgcccattcaaccctgtgacagtgaatctcccccccgaacaagttacaaaggttacggtagggagactgcacttctcagagaccactgctaacaacatgagaaaaaagggcaaaccaaatcctgaccagaggtactttatgctggtggtcgcactgcaggcacatgcccagaatcaaaattatactctggcggcccagatctctgagaggattatcgtgagagcgtccaacccagggcagtttgagtctgactctgacgtactctggcagcgagctcaggtccccgatactgtgttccaccatggccgagtgggtattaacaccgaccgcccggatgaggcattagtagtgcatgggaatgtgaaagtgatgggaagcctgatgcacccgtcagacctacgggcaaaggaacatgtccaggaggtggatacaactgaacaattgaagcggatttctaggatgcgactcgttcactatcgttataagcctgaattcgccgcttcagctggaatcgaggctactgcaccagaaactggcgtcattgcacaggaggtgaaggaaattcttcccgaggccgtgaaggatacaggagacatggtattcgccaatggtaagactatagagaatttcctggtggtaaataaggtctgcggcctgaaatatgtggtgtattgtgaggatgacgtgtgtcacctccccgtgctgagtcttggcgcaaaagaggcttgggcagtgaaagaactgtgtaagctcactgataatctcgagactcgcattgatgaacttgaaaggtggtctcacaagttggctaagttgaggaggttagatagcctgaagagtactgggagtagcggagccttctcgcatgccggctcacagttttccagagccggctccgtgccccacaagaaaaggccccccaaagtagctagcaaggtcggctcgtcaagcgtggttccagatcaagcttgcatcagccagcgattcctccaaggcactattatcgcgttggtggtggtgatggccttccgccaccacctaggggcccagccccaggaacaaggacctcagccctgcccccgggagagagcgctggatggaggtagcagttccaacggccacccatttttatggctgcaaaggggggttcatgttcacaccgtgcgggccgaacctgcacaccggggcggaccagggcgacactag

SEQ ID NO: 182987 - DNA, 789 bp, synthetic construct
  misc_feature 1..789: note = Description of Artificial Sequence: Synthetic coding sequence
  source 1..789: mol_type = other DNA
atggccgcccccagcggcaccgtgagcgacagcgagagcagcaactcgtcctctgatgcggaggagctggaacggtgtcgcgaagccgctatgccggcttggggtctcgaacagaggcctcacgtggcaggtaagcctagggcaggagccgccaactcccagctgtctacttcccagccaagcctcagacacaaggtgaatgaacatgaacaggacggaaacgagcttcagaccacccccgaatttcgggcgcatgtggccaagaaactaggagctctgctcgattcgtttattaccatttctgaggcagctaaagaacctgctaaggctaaagttcagaaggtggccttggaagacgacgggtttaggctttttttcactagtgtgcctggcgggagggaaaaagaggaaagtccacagcctcgccggaagcgtcagcccagctcctcatccgaggacagtgatgaggagtggcgacggtgtagggaggccgcggtctcagcttcagacatccttcaggagagcgccatccacagccccggcaccgtggagaaggaggctaagaagaaacgaaagcttaagaagaaagctaaaaaggtcgcgagtgttgatagtgccgtcgccgccaccaccccaacctcgatggccacggttcagaaacagaaaagtggggagttaaacggagaccaggtgagccttgggacgaaaaagaaaaaaaaagccaagaaagcttcagagacaagcccattcccgccagccaagtccgcgacagccattccagccaactag

SEQ ID NO: 182988 - DNA, 666 bp, synthetic construct
  misc_feature 1..666: note = Description of Artificial Sequence: Synthetic coding sequence
  source 1..666: mol_type = other DNA
atgttctgccagaaccccggcgccgccaacagccagctgagcacctctcagccatcgctgcgccataaagttaacgaacacgagcaggacggaaacgaactgcagactactccggaatttagggcccatgtggcaaagaaactcggtgcactgctggacagcttcataactataagcgaggcagcaaaggagcccgccaaagccaaagtgcagaaagtcgcccttgaagacgacggattccggctgttttttacctcagtgccaggcggccgagaaaaagaggaaagcccccagccccggaggaagagacaaccatcatcttcctccagtgaggactctgacgaggagtggagaaggtgtcgggaggccgctgtgagcgcaagtgacattcttcaggaatcagccatccactcacccgggactgtggagaaagaagctaagaaaaaacgaaaactgaaaaagaaagctaagaaggtcgcgtctgtggattccgctgttgccgcaacgactccgacgtctatggccactgtgcagaagcagaaatccggggagcttaatggcgaccaggtatcactcggcacaaaaaagaaaaagaaggccaagaaggcctctgagacaagtcccttccctcctgccaaaagtgccactgctattccagcgaattag

SEQ ID NO: 182989 - DNA, 699 bp, synthetic construct
  misc_feature 1..699: note = Description of Artificial Sequence: Synthetic coding sequence
  source 1..699: mol_type = other DNA
atgcccgcctggggcctggagcagcggccccacgtggccggcaagccccgggctggggctgccaactcccagctgagtacttctcagccatctctgcggcataaagtgaacgaacacgaacaggacggaaacgaactgcagacgacgcctgaatttagggcacatgtggcgaaaaagcttggagcgctcttggattcttttatcaccatctcagaggccgcgaaggagcctgccaaggctaaagtacagaaagtggccttggaagatgatggattcaggttgttcttcaccagtgttccgggtggccgggagaaagaagagagtccacaaccaaggcggaagaggcaaccctcctcctcatctgaagacagcgacgaggagtggcgcagatgtagagaagctgctgtctcagcatccgatatcctccaagaatccgccattcactcaccggggactgtagagaaggaagccaagaagaaacgcaagctcaaaaagaaagctaaaaaggtggcctccgtggatagcgccgtggcggccacaactccgacatctatggcgactgtgcagaaacagaagagcggagagttgaacggcgatcaggtatccctggggacgaagaagaagaagaaggccaagaaagcatcagagacctcgccctttcctccggccaaatctgccacagccatccccgccaactag

SEQ ID NO: 182990 - DNA, 1497 bp, synthetic construct
  misc_feature 1..1497: note = Description of Artificial Sequence: Synthetic coding sequence
  source 1..1497: mol_type = other DNA
atggacgtgaccgaccactacgaggacgtgcggaagatctacgacgactttttaaagaatagtaatatgttagatttaatcgatgtgtaccagaagtgtagagctctcacctctaactgtgagaattataatacagtctcaccgtcacagctactggatttcctgagtggcaagcagtatgccgttggggacgagacagaccttagtattcctacatctcctacctctaagtacaaccgggacaatgaaaaggtccaactgctggcgcgcaagatcattttttcatacctcaacttactggtgaattccaaaaacgacctcgccgtcgcatatatcctgaatatacctgaccgtggactaggtagagaagctttcaccgacctcaagcacgctgctagagaaaagcagatgagcatcttcctggtggctacttcattcataaggacaattgagctcggcggcaaaggctacgctccaccacctagtgatccccttcgcactcacgtgaaaggtttgagtaacttcatcaacttcattgacaaactggatgaaattctgggtgagatacctaaccccagtatcgccgggggccagattcttagcgtgattaaaatgcagttgattaagggtcaaaactcacgggatcctttctgcaaggctattgaggaggtggcacaggatctggacctgcgcattaaaaatatcatcaactctcaagagggcgttgtggccttatcaactacagacatttcgcctgcgcgtcccaagagtcatgccataaatcatgggactgcctactgtgggcgggataccgttaaggcacttctcgtgctgctcgatgaggaagctgctaacgctcccacgaaaaataaggctgagcttttgtacgacgaggagaataccattcaccaccacggcacaagcatcctgacactatttaggtcacccacccaagttaacaactctatcaagcctctcagagaaagaatatgtgtgtctatgcaagagaaaaaaattaagatgaaacaaactctcatccgctctcagttcgcctgcacctacaaagatgactatatgataagtaaagacaactggaataatgttaacctggcatctaaacccttgtgcgtgctttacatggagaacgacttatccgagggggtcaacccttccgtaggacgatccaccatcggcacctcattcggaaacgtgcatctcgatcgatccaagaatgaaaaggtttctcggaaaagtacctcacagactggcaataagtcaagcaaaaggaaacaggtagacctggatggcgaaaacatcctgtgcgataataggaacgaacccccccagcataagaatgcaaaaattcctaagaaatcaaatgactcacagaaccgtctctacggaaagctcgcgaaggtggccaagtcaaacaagtgcacggcaaaagacaagctcatttccggacaggccaaacttactcagttcttccggctgtag

SEQ ID NO: 182991 - DNA, 1740 bp, synthetic construct
  misc_feature 1..1740: note = Description of Artificial Sequence: Synthetic coding sequence
  source 1..1740: mol_type = other DNA
atggccgtgttcaaccagaagagcgtgagcgacatgatcaaggagttccgtaagaactggcgtgccctttgcaactcggagcggaccaccctctgcggagctgattctatgctgcttgccctgcaactgtcaatggctgagaataataagcagcacagtggcgagtttaccgtttcgctgtcagatgtcctgctgacgtggaagtatctgcttcacgagaagcttaatcttcctgttgaaaacatggatgtgacagaccactacgaggacgttcggaagatttatgacgacttcctgaagaatagcaatatgttggatttaattgacgtgtatcaaaaatgtcgagccttgacttcgaattgtgaaaattacaataccgtgtctccatcccagctcctggattttctgtcaggtaagcaatacgccgttggcgatgaaactgacttaagtatacctacctctccaaccagtaagtacaatagggacaatgaaaaggtgcagctcctggcacgaaaaatcatatttagttaccttaatcttctggtgaactcgaaaaacgatctcgccgtcgcctatatcttgaatatccccgataggggtttgggaagggaggcttttaccgatcttaagcacgccgcaagagagaagcagatgtcaatctttctagtcgccacatctttcattcgcacaatcgagctcggtggcaaaggatatgctccacctccatccgaccctctaagaacccacgtgaaggggctctccaattttattaatttcattgacaaactagacgagattttgggagaaatccccaatccaagcatcgctggcggccagatcctgagtgtgattaagatgcagttgatcaaggggcagaattcccgggatcctttttgcaaagcgatcgaggaagtcgcacaggacttggatttgagaataaagaacattattaactctcaggagggagtcgtggcgttgtctacaacagacatctcccctgcacgccccaaaagccacgcgattaatcacgggaccgcttattgcgggcgtgacactgtcaaagcgttgttggtgctcctggacgaggaagccgctaacgcaccaaccaagaacaaagccgagctactttatgatgaggagaacacaatccaccatcacgggacctccatcctgaccctgtttagaagccccacccaggtgaataatagtattaagcctctacgggagaggatctgcgttagcatgcaagagaaaaaaataaagatgaagcagacacttattaggagccagttcgcctgcacttacaaggatgactatatgatctctaaggataactggaacaacgtcaatctagcctccaaacctctctgcgtgctctacatggagaacgacttgagcgagggagtgaatccctctgtgggcaggtctacaatcggcacctcatttgggaacgtacatctggacaggtcaaagaatgaaaaggtgtcgagaaaatccaccagccagactggaaataagtcttctaagcgcaaacaggtggacctggatggggaaaatattttgtgcgacaacaggaatgagcccccacagcataaaaacgccaaaatccctaaaaagtctaatgactcccagaacaggctgtacggcaaactggcaaaggtcgcaaagtcgaacaagtgcactgctaaggacaaactgatcagcggccaagccaagctgactcagttttttagactgtag

SEQ ID NO: 182992 - DNA, 894 bp, synthetic construct
  misc_feature 1..894: note = Description of Artificial Sequence: Synthetic coding sequence
  source 1..894: mol_type = other DNA
atggccgtgttcaaccagaagagcgtgagcgacatgatcaaggagtttaggaagaactggagagcactgtgtaattctgagcgtactaccttatgcggagctgatagcatgctcctcgctttgcagttgagcatggctgagaacaacaaacaacattccggggaatttactgtctcactgtcggacgtcctgcttacgtggaagtatctcctgcacgagaagttgaaccttcccgtggagaatatggatgtgaccgaccactacgaggacgtgcgcaaaatctacgatgacttcctgaagaatagtaatatgttagacctgatcgacgtgtatcagaaatgtagggcgttgacatctaattgcgaaaattacaataccgttagcccttcacagttgctggactttctgagtgggaaacagtatgctgtaggggatgagaccgacctctctatcccgacctcgcccacctctaagtataacagggacaatgagaaagtgcaactgctggccaggaaaattatcttctcctacctgaacctgctggttaattccaagaacgatctggccgtggcatatatcctgaacatccctgatcggggactcggaagagaagcctttacagacctcaagcatgctgcccgcgaaaagcagatgtcaattttcttggtggccacaagtttcattaggaccatagaattgggtgggaagggctacgccccccctccatccgatccgcttagaactcacgtgaagggtctaagtaactttattaatttcatcgataagctggatgagatcttgggagagattccaaatcctagaggatgcaaaagtatctgctggaaaatcaacaactggaacgagttctggaagtgcagctcagggcagaaatag

SEQ ID NO: 182993 - DNA, 1497 bp, synthetic construct
  misc_feature 1..1497: note = Description of Artificial Sequence: Synthetic coding sequence
  source 1..1497: mol_type = other DNA
atggacgtgaccgaccactacgaggacgtgcggaagatctacgacgactttctgaagaactctaacatgcttgatttaatagatgtttatcagaagtgccgggccctgaccagcaattgcgaaaactataatacagtgtcaccatcccaattattggattttctttctggtaagcagtacgcggtaggcgacgaaacagacctctccattcccaccagccccacgagtaagtataatcgggataatgaaaaagtgcagctgttggcacgcaagatcattttttcctacctgaatctcctggtgaactcgaaaaatgacctagcagtagcctatattctgaacattcccgaccgcgggctggggagagaagcatttactgatttaaaacacgccgcgagagagaagcagatgtctatcttcctagtcgctactagtttcatcaggaccatcgaactcggcggtaagggatacgccccccctccatcagaccccctccgcactcatgtcaaagggctttctaactttatcaactttattgacaaactggatgagatcctcggcgagataccaaatccaagcatcgccgggggccagatcttgtccgtcattaagatgcagctcatcaaaggtcagaactctcgggatccattctgcaaggccattgaggaagtggctcaagacctggatctccggattaagaatatcattaactcacaggagggcgttgtggccctgtctactacggatatatctcccgctcgccccaagagccatgccatcaaccacggcaccgcatattgcggccgcgatacggtgaaggcgctgctggtcctcctggatgaggaggcagccaatgctccaacaaagaataaagctgagctcttgtacgacgaagaaaacaccatacaccatcacggaacctcaattcttacactattcaggagcccaactcaggtgaacaattctatcaaaccactccgggagcgaatctgcgttagcatgcaggagaagaagatcaagatgaagcagaccctgattaggtctcagtttgcttgtacgtataaggacgactatatgatctcgaaagacaattggaacaatgtaaatctcgccagtaaacctttgtgtgtgctgtacatggagaacgacctgagcgaaggggtgaacccatcggtcgggcggtccacaatagggacctcatttggcaacgtccacctagaccgttcgaagaacgaaaaagtctccagaaaaagtactagccagactgggaacaagtcaagcaagagaaagcaagtggatttagacggtgagaacatcctctgtgacaaccgaaacgagcccccccagcacaaaaacgctaagattcctaagaaaagcaacgactcccagaataggttgtacggtaagctggccaaggtggcaaaaagtaacaaatgtaccgcgaaggacaagctgatcagtgggcaagctaagctcacccaattcttccgattgtag

SEQ ID NO: 182994 - DNA, 813 bp, synthetic construct
  misc_feature 1..813: note = Description of Artificial Sequence: Synthetic coding sequence
  source 1..813: mol_type = other DNA
atggcccggttcgccctgaccgtggtgcggcacggcgagacccggttcaacaaagaaaagattatccagggacagggggtcgatgagccactgtcggagaccggatttaaacaggccgccgcagccgggatctttctgaacaacgtgaaattcacccacgccttttccagcgatttgatgaggaccaagcaaactatgcatgggatccttgaacggagcaaattttgcaaagacatgacagtgaagtacgattcaagattaagggaacgcaagtacggggtcgtggagggaaaggccctaagtgagctgcgcgccatggccaaggctgcccgggaggaatgccccgtcttcactcccccgggcggcgaaacgcttgatcaggttaagatgagaggcatcgactttttcgaattcctgtgtcagctgatcctgaaagaggccgatcagaaggagcaattttcccagggcagtccttccaattgcttggagacgtctctagctgagatctttcctctaggcaaaaaccattcttcgaaggtgaacagtgattccggaattccaggattggctgctagcgtgttggttgtctcccatggtgcgtatatgcgctccttgttcgattacttccttactgatctcaagtgctccctcccagcgactttgagcaggtcagaactgatgtcagtcacacccaacaccggaatgtcactgttcatcataaacttcgaggaaggtagagaagtcaaacccaccgtgcagtgcatctgcatgaacctgcaagatcatcttaacggcctgactgaaactaggtag

SEQ ID NO: 182995 - DNA, 501 bp, synthetic construct
  misc_feature 1..501: note = Description of Artificial Sequence: Synthetic coding sequence
  source 1..501: mol_type = other DNA
atgagcaccgtgggcctgttccacttccccacccccctgacccggatctgtcctgctccttgggggctgaggttgtgggaaaaactgacactcctctctccagggatcgctgtcacaccggtgcaaatggcgggcaagaaggactatccggccctgctgagtttagatgagaatgagcttgaagagcaattcgttaagggccacggaccaggcgggcaggccaccaataagacctcaaattgcgttgtgctgaaacacatcccctctggtatcgttgtcaagtgccatcagactaggtctgtcgatcagaaccgaaaactggcgcggaagatcctgcaagagaaggtggacgttttctataacggcgagaattcaccggttcataaggagaaacgggaggccgctaagaagaagcaggaacggaaaaagagagcaaaagagaccctcgagaaaaaaaaactactcaaggagctctgggagtcaagcaaaaaagtgcactag

SEQ ID NO: 182996 - DNA, 501 bp, synthetic construct
  misc_feature 1..501: note = Description of Artificial Sequence: Synthetic coding sequence
  source 1..501: mol_type = other DNA
atgagcaccgtgggcctgttccacttccccacccccctgacccggatatgccctgctccatggggactccgcttgtgggagaaactgacattactatctccgggcatagctgttacccccgtgcagatggctggcaagaaggattaccccgcgctgctatcgctggatgagaatgaactggaagagcagttcgtgaaaggccacggccctggaggccaagctacaaataagacgagtaattgtgtggtgctcaagcatattccatccgggatcgtggttaagtgccaccagactagaagtgtcgatcagaaccgcaaattggccaggaagatcctgcaagagaaagtggatgtcttctacaacggggagaacagtcctgtacataaggaaaagagagaggccgccaagaaaaagcaggagcggaaaaagagggccaaggagaccctggaaaaaaagaagttgcttaaggaattgtgggagtcaagcaagaaggttcactag

SEQ ID NO: 182997 - DNA, 501 bp, synthetic construct
  misc_feature 1..501: note = Description of Artificial Sequence: Synthetic coding sequence
  source 1..501: mol_type = other DNA
atgagcaccgtgggcctgttccacttccccacccccctgacccggatttgtcccgctccctggggccttcgcctgtgggaaaaattgaccctgctcagccctgggatagccgtgacacctgttcaaatggccggcaaaaaggattatcccgccctcctcagcctcgacgaaaacgagttagaggagcaattcgtgaaaggacacggtccaggagggcaagccacaaataagacatctaattgcgttgtgctcaagcacatccccagtgggattgtggttaagtgccatcagacacgctccgttgaccagaatagaaaactcgcccggaaaatactgcaggagaaggtggacgtcttctacaatggggagaactcccccgttcacaaagaaaagcgcgaagcagccaagaagaaacaggagaggaagaagagagcgaaggaaacacttgaaaagaaaaaactcctgaaagaactctgggagtcaagcaaaaaagttcattag

SEQ ID NO: 182998 - DNA, 111 bp, synthetic construct
  misc_feature 1..111: note = Description of Artificial Sequence: Synthetic coding sequence
  source 1..111: mol_type = other DNA
atgagcaccgtgggcctgttccacttccccacccccctgacccggatctgccccgccccctggggtctcaggctctgggagaaattgaccctgttatcccccggcatttag

SEQ ID NO: 182999 - DNA, 417 bp, synthetic construct
  misc_feature 1..417: note = Description of Artificial Sequence: Synthetic coding sequence
  source 1..417: mol_type = other DNA
atgagcaccgtgggcctgttccacttccccacccccctgacccggatttgtcccgcaccctgggggctccggctatgggaaaagctcaccctactgagtccaggaattgccgtgacacccgttcaaatggccggcaagaaagactaccccgccctactgtctcttgacgagaatgaattggaggaacagttcgtaaaggggcatggaccaggaggccaagccaccaacaaaacgagcaattgcgtggtactcaagcacattccctctggtattgtggtgaaatgccatcaaacccgatcagttgatcagaacaggaagcttgccaggaaaattctgcaggaaaaggtcgacgtcttctataatggcgagaattctcccgtacataaagaaaagcgtgaggccgcaaaaaagaagtag

SEQ ID NO: 183000 - DNA, 291 bp, synthetic construct
  misc_feature 1..291: note = Description of Artificial Sequence: Synthetic coding sequence
  source 1..291: mol_type = other DNA
atgagcaccgtgggcctgttccacttccccacccccctgacccggatttgccctgctccgtggggcttgagattgtgggagaaactgacgttactgtcacccggtattgccgtcacaccggtgcagatggcagggaagaaagattacccggctctgctcagcctggacgagaacgagcttgaggaacagtttgtgaagggccacggccccgggggccaggccacaaacaaaacttcgaattgtgtcgtgctcaagcacatccctagcggtattgttgtcaaggtggactag

SEQ ID NO: 183001 - DNA, 423 bp, synthetic construct
  misc_feature 1..423: note = Description of Artificial Sequence: Synthetic coding sequence
  source 1..423: mol_type = other DNA
atgagccggttcctgaacgtgctgcggagctggctggtgatggtgagcattattgcgatgggaaatactcttcagtcattcagagaccatacattcctgtacgaaaaactgtacacagggaaacccaatttagttaatggactccaagcacggactttcgggatctggaccctgttgtcgtctgtcatcagatgtctgtgcgcgattgacattcacaataagaccctctatcatataactctgtggacattcctcctggcattggggcactttcttagcgaactgttcgtttatggcacggcggctccgacaatcggagttttggctccactcatggtagcttcattctcaatcttgggcatgctagtgggtttacgctacctggaagtcgagccagtgtcacgccagaagaagaggaattag

SEQ ID NO: 183002 - DNA, 1443 bp, synthetic construct
  misc_feature 1..1443: note = Description of Artificial Sequence: Synthetic coding sequence
  source 1..1443: mol_type = other DNA
atgaaccggaccaagggcgacgaggaggagtactggaacagcagcaagtttaaggcttttaccttcgacgacgaagatgatgagttgtcgcagctgaaggagtccaagcgagctgttaattccctgagagacttcgtcgacgacgacgatgacgatgacttggagagagtttcctggtcaggtgaacctgtgggctctatctcctggagcatcagggagacagccggcaactcgggatcaacccacgaaggcagagagcagcttaagtcaagaaatagtttctcatcctatgcacagctcccgaagccaacaagtacgtattctctatcatcttttttccgggctctcagcgacactcctgcaaagagctacgctccagagctgggtaggcctaagggcgaatatcgggactatagtaacgactggtcaccaagtgatactgtgaggcgcctccggaaaggcaaagtgtgttccctggagcgatttaggtctcttcaggacaaactgcagttactggaggaagccgtgtctatgcacgatggtaacgtgatcactgccgtcttgattttcctgaagcgtacactgtccaaggagatcctgtttagggaactggaagttaggcaggttgctctacggcatcttattcattttctaaaagaaattggcgatcaaaaactcctgcttgatcttttccgctttttggacagaacggaggaactagccctgagccattatagggagcacttgaacattcaggatccagataagagaaaagaatttctcaagacctgtgtcggactccctttctcagctgaagattccgcccacattcaggatcattatacactgctcgaaagacagatcatcatcgaggcaaatgatagacacctggaatcagccggccagaccgagatctttagaaagcacccccgcaaagccagcattcttaatatgccacttgtcaccacgctgttttattcttgtttctaccactacacggaggctgagggtaccttctccagcccagtaaacctcaagaagaccttcaagattccggataaacaatatgtgctgacggcccttgctgctcgcgccaagctcagggcctggaacgacgtagatgccttgttcaccacaaaaaattggctcggctacacaaagaagcgagctccaattgggttccatcgcgtggtagagattctccacaagaataatgctcctgtccaaattcttcaggagtatgtgaacctcgtggaagatgttgacacaaaacttaatctggctacaaagtttaaatgccacgatgtagtcatagatacttaccgagatttgaaggacaggcaacagttgctagcctacaggtctaaggtggataaggggagcgccgaggaggaaaaaatagacgccttgctgtccagctctcagatacgttggaagaactag

SEQ ID NO: 183003 - DNA, 1482 bp, synthetic construct
  misc_feature 1..1482: note = Description of Artificial Sequence: Synthetic coding sequence
  source 1..1482: mol_type = other DNA
atgaaccggaccaagggcgacgaggaggagtactggaacagcagcaagtttaaggctttcactttcgatgatgaggacgacgaattatcgcagctgaaggagtctaagagagctgttaactccctccgggacttcgtcgacgacgatgacgatgacgatttggaaagagtgtcctggtcgggtgagcccgtgggctcaattagctggtccattagagaaaccgccggaaacagcggttctacccacgagggtagggaacagctaaaaagcagaaattcttttagcagctatgcccagctgccaaagccaacttctacatactccctgtcctcctttttcagggggcggacccggccggggtcattccagtctctgtctgatgccctgtcagatacacctgccaagtcatatgctcccgaattggggagacccaaaggagaatatagggattattctaatgactggtccccttcagataccgtgcgccggctgcgcaaaggcaaagtatgttccctcgagaggttcagatccttacaggataagctgcagctgctggaggaagctgtaagcatgcatgatggcaatgtgatcaccgccgttcttatcttcctgaagcgcacactctccaaagagatcctgtttagagagctggaagtgcgccaagtggctctccgccacctgattcatttcctgaaggagatcggagaccaaaagctcttacttgacctttttcgatttctggacaggacagaggagctggctctctcccactaccgcgagcacctgaatatccaggacccagataagcggaaagaatttctaaagacatgtgtgggactccccttttcggccgaggatagtgcccatatccaggaccattatacactgttagagcggcagatcatcattgaggctaatgaccgtcaccttgaatcggccggacagactgaaatttttcggaagcaccctcgcaaggcatcgatcctgaatatgccactagtcaccacactgttctattcctgcttctatcactacaccgaagccgaaggcactttttcttcccctgtcaatctgaagaaaacttttaaaatccccgacaagcagtatgtgctgaccgccctagccgcccgtgccaaattgagagcttggaacgatgtggatgcactctttacaactaaaaactggctgggatacacaaagaagagagcacccattggcttccaccgcgtggtggagatccttcacaagaacaacgcgccagtacagattctacaggaatacgtcaacttagtggaagatgtcgacacaaagctaaatctcgccacaaaatttaaatgccacgatgtggtcatcgacacatatagggatctgaaagacaggcagcagctgctggcttaccggagcaaggtggacaaggggagcgccgaagaagagaaaatcgacgcgctgctgtcctcatcacagataaggtggaagaattag

SEQ ID NO: 183004 - DNA, 1335 bp, synthetic construct
  misc_feature 1..1335: note = Description of Artificial Sequence: Synthetic coding sequence
  source 1..1335: mol_type = other DNA
atgaaccggaccaagggcgacgaggaggagtactggaacagcagcaagtttaaggcctttactttcgatgatgaagacgacgagttatcacagctgaaagaatcaaagagggctgttaacagcctgcgagacttcgtggatgatgatgatgacgatgacctggagcgggtctcttggtcaggggagcctgttggttcacggactcgcccaggcagttttcagtccctaagcgacgctctgagcgacacccctgctaagtcctacgcgcctgagctggggcgccccaagggggagtaccgcgattacagcaatgattggagtcctagcgacaccgtgcggcgcttgcggaaaggcaaggtatgctcactcgagcggtttaggagcttgcaggataagttgcagttgttagaagaggccgtgtctatgcatgatggcaacgtgatcacagccgtcttgatatttttgaagcggacattatccaaggagatcttattcagagaactcgaggtgcggcaggtcgcactgcgccatctcattcattttttaaaggaaataggagatcaaaagctgctgttggaccttttcaggtttctggacaggacagaggaacttgcactaagccactacagggaacatctgaatatccaggatcccgataaaaggaaggaatttctcaagacttgtgtgggtttgccgttctccgctgaagactccgctcatattcaggatcattacactcttttggagcgacagataattattgaagccaatgacaggcacttggagagtgccggtcagactgaaatcttcagaaagcacccaagaaaagcttccatattgaacatgccgctcgtaactactctgttttattcctgcttttatcactatactgaggctgagggaactttttcctcccctgtgaacctcaaaaagaccttcaagattccagacaaacagtacgttctgactgccctagccgctagggcaaaattgcgagcatggaacgacgttgatgccctgttcaccaccaagaattggctcggatatacaaaaaagagagcccctattggctttcatagagttgtcgaaatactacacaagaataacgctccagtgcagatccttcaggaatatgtgaacctggtagaggacgtggacacgaaactgaatctggctactaaatttaaatgtcatgatgttgtgattgacacatacagggacctcaaggatcggcaacagctgctggcttatagaagtaaggtggataaaggctctgctgaagaggagaaaattgacgcactgctgagcagctcacagatccgctggaaaaactag

SEQ ID NO: 183005 - DNA, 1482 bp, synthetic construct
  misc_feature 1..1482: note = Description of Artificial Sequence: Synthetic coding sequence
  source 1..1482: mol_type = other DNA
atgaaccggaccaagggcgacgaggaggagtactggaacagcagcaaattcaaggctttcacattcgacgatgaggacgacgaactgagccagttgaaagagtccaagagagcagttaattccctgagggatttcgtcgacgatgatgatgacgacgatctggaaagagtctcttggtcaggagagcctgtaggtagcatcagttggtctatccgggagaccgccggcaattctggttccactcacgagggacgggagcaattgaaaagccgaaactccttttcctcctatgcacagttaccaaagcctacctctacatattctctctcatccttcttccgcggccgcacacggcccggatctttccagagcttgtccgatgcgttatcagatacccctgctaagagctatgcgccagagctgggtcgccctaaaggcgaatacagagattactcaaatgactggtcaccaagtgataccgtaagaaggcttagaaagggtaaggtctgttcattggagcggtttcgctcactgcaagataaactgcagctcctggaagaggccgtgtccatgcatgatggcaacgtcatcaccgccgtgctgatttttttaaagcgcacgctctcgaaagagatcctatttagagaactggaagtaagacaggtggctttgcgtcacctgatccacttcctcaaggagatcggcgatcagaaattgctgctagacctctttaggtttcttgataggacggaggaactcgccctctcccattacagagagcacctcaacatccaagaccccgataagcgaaaggagtttctgaaaacatgcgtggggctgcctttctccgccgaggattccgcgcatatccaagaccattacaccctcttggagcgacagattatcatcgaggcaaatgatcggcacctggagtccgcaggacagacagagattttccgaaaacaccctcgcaaagctagcatacttaacatgcctctggtaactacgctcttctacagttgtttctaccactacaccgaggccgaaggaacgttttcctcacctgttaaccttaagaagacctttaagatacccgacaagcagtacgtgctgactgccctcgcggccagggctaagttgagagcatggaacgatgttgacgccctttttacgaccaagaactggctcgggtacacaaagaagcgtgcaccaatcggttttcaccgcgtagtggagattctacacaagaataatgcgcccgttcagatcctccaagagtacgtaaatctcgtcgaagatgtagacacgaaacttaatctcgccaccaagtttaagtgccacgacgttgtgattgacacttaccgggatctgaaagatcgccagcaattactggcctatcggtccaaggtagataaaggctcagctgaagaggaaaagatagatgccctcctgagttctagccaaatcagatggaagaactag

SEQ ID NO: 183006 - DNA, 1560 bp, synthetic construct
  misc_feature 1..1560: note = Description of Artificial Sequence: Synthetic coding sequence
  source 1..1560: mol_type = other DNA
atgaccaccggcctgatcctgttcttccagagcggccggcccctgggagccggcgtgcgcctaggactcgggcttcgaatgaataggaccaagggggatgaagaggaatactggaacagcagtaaattcaaagcattcacctttgacgatgaagacgatgaattgtcccagctgaaggagtctaagcgggcagttaatagtctacgcgactttgttgacgatgacgacgatgacgacttggagagagtttcttggtctggcgagcccgtcggtagtatatcatggtcaattcgtgagacagccggcaactcaggctcgacgcacgaggggagagagcagctgaaaagccgtaatagcttttcttcgtacgcccagttgcctaaaccaacttccacatactctttgagcagcttcttccgagggcgcacaaggcccggctccttccagagcctgagcgatgccttatccgataccccagccaagtcctatgcccccgagctagggcgccccaaaggagaataccgcgactatagtaacgattggtcgccaagcgacacagtgcgaagactccgaaaaggtaaagtctgttctctcgaaaggtttaggtctctccaagacaagctgcaattgttggaggaagctgtatccatgcatgacgggaacgttatcaccgccgtgctcatatttctgaaacgcacattgtcaaaggagattctctttcgtgagctggaggtgagacaggtggcgctgcgccacctgatccattttctgaaggaaatcggcgatcaaaagctcctgttagacctgttccgattcctggacaggacagaggagcttgctctctctcactatagagaacatctgaatattcaagaccctgataaacgcaaggaattcttaaaaacatgtgtcggactaccgtttagtgccgaggatagcgcccacatccaggaccattatacccttctcgaacggcaaataattatcgaagccaatgatagacatctggaatcagcaggccagactgagatatttcgcaagcacccccgcaaagctagcattctgaatatgccgttagtcaccactctcttttattcttgcttttatcactatacagaggcagagggtactttttcttctccagtgaacctcaagaagaccttcaagatacctgataagcagtatgtgctgacggcactggcagctagagcaaagttgagagcttggaacgacgtggatgccctctttacaacgaaaaattggctgggctatacgaagaagcgggcaccgatcggtttccacagagtggtcgagatcttgcataagaataatgctccagtacagatccttcaggaatacgtgaaccttgtcgaagatgttgatacgaaactgaacttggcaacaaaattcaaatgccacgatgtggttattgatacatatcgcgacctgaaagaccggcagcagttgctcgcctatcgctcaaaggtcgataaggggtcagccgaggaagagaaaattgatgccctgctgagcagcagtcagatcaggtggaagaattag

SEQ ID NO: 183007 - DNA, 138 bp, synthetic construct
  misc_feature 1..138: note = Description of Artificial Sequence: Synthetic coding sequence
  source 1..138: mol_type = other DNA
atgaaccggaccaagggcgacgaggaggagtactggaacagcagcaagttcaaggcatttacgttcgatgatgaggatgatgaactttctcagctcaaggaatcaaagcgggccgtgaactctctgagggacttttag

SEQ ID NO: 183008 - DNA, 1482 bp, synthetic construct
  misc_feature 1..1482: note = Description of Artificial Sequence: Synthetic coding sequence
  source 1..1482: mol_type = other DNA
atgaaccggaccaagggcgacgaggaggagtactggaacagcagcaagttcaaggcgttcaccttcgacgatgaggatgatgagctcagccagctcaaggagtccaaaagagccgtcaattcccttcgcgactttgtcgacgatgatgacgacgacgatctggaaagggtgtcctggagtggagagcccgtgggctcgatctcttggagcatacgcgagacagctggcaactcaggatcgacacatgaagggagggaacagctgaagtctcgcaattccttttcatcctacgctcagctgcccaaacccacttccacatacagtttgagctccttcttccggggacggactaggcctggatccttccagtcactttctgatgcattgagtgacactccagccaagagttatgcacctgagctcggtcgaccaaaaggggagtatagggactattcaaacgactggagtccgtctgatactgtgcgtcggctcagaaaggggaaggtttgttccttggagagatttcggagcttgcaggacaagctgcaactcctcgaggaggccgtgtccatgcacgatgggaacgtcatcactgccgttcttatattcctgaagcggaccctctcaaaggaaattctgtttcgggaacttgaggtaaggcaggtggccctaagacacctgatacactttttgaaggagattggcgatcagaaactccttctggatctgttcaggtttctcgacagaacggaagaactcgccctgtcacattacagagaacatctcaacattcaggaccccgacaagcggaaggagtttctgaagacatgtgtaggactgcctttcagcgccgaggacagcgcgcacatccaagaccattacactttgctcgaacgccagataatcatcgaagctaacgaccgtcacctggagagcgctggccagactgagatctttaggaaacacccccgcaaagccagcattctcaatatgcccctggtgaccactctgttctacagctgcttttaccactacacagaggccgaagggactttttcttcaccagttaatctgaagaagactttcaaaattcccgataaacaatatgtcctgaccgcactggcggctcgcgccaagctgcgagcctggaatgacgttgacgccctttttaccacaaaaaattggttggggtacaccaagaaacgcgcacccatcggcttccaccgcgtcgtggagatcctacacaaaaacaatgcgcctgtgcaaattctacaggagtacgtgaaccttgtagaggacgttgacaccaagctgaatctagctaccaagttcaagtgtcatgacgtcgttatcgacacgtatagggatctaaaggaccgacagcagttactagcttacaggtcgaaggttgacaaaggaagtgcggaagaagagaagatcgatgccctgctctcctcttctcaaatccgatggaagaactag

SEQ ID NO: 183009 - DNA, 735 bp, synthetic construct
  misc_feature 1..735: note = Description of Artificial Sequence: Synthetic coding sequence
  source 1..735: mol_type = other DNA
atgttccggcggaagctgaccgccctggactaccacaaccccgccggtttcaattgcaaggatgaaacggagtttcgcaacttcatagtttggttagaggaccagaaaatccgtcactacaagatcgaggataggggcaacctgagaaatattcattcctctgattggcctaagtttttcgaaaaatatctaagggatgtgaactgtccttttaaaattcaggaccgccaggaggccatcgactggttgctgggattagctgtgcgcctagagtatggggacaacgccgaaaagtacaaagatttggtgcctgataactcaaagaccgccgataacgcaactaaaaatgcggagcccctgatcaacctcgatgtgaacaacccggactttaaggccggtgtaatggccctcgccaacctgcttcagatccagagacacgatgattatttggtaatgctcaaagcaatacgcatattagtgcaagagcggctgacacaagatgctgtagccaaggctaatcagaccaaggaggggttacctgtcgccctggataagcatatccttggattcgatactggcgacgccgttcttaatgaagctgcccagatcctcaggctgctgcatatcgaggaactgagagagttgcaaaccaagattaatgaggcgattgttgccgtgcaggccatcattgcagacccaaagaccgatcatcgtttggggaaggtggggcggtag

SEQ ID NO: 183010 - DNA, 177 bp, synthetic construct
  misc_feature 1..177: note = Description of Artificial Sequence: Synthetic coding sequence
  source 1..177: mol_type = other DNA
atgctgcagagcatcatcaagaacatctggatccccatgaagccctattacacgaaagtctaccaggagatctggattggcatggggttgatgggtttcatcgtctataaaatccgtgcagcggataagcggtcaaaggccctgaaggcctcagctcccgcacccggccaccactag

SEQ ID NO: 183011 - DNA, 228 bp, synthetic construct
  misc_feature 1..228: note = Description of Artificial Sequence: Synthetic coding sequence
  source 1..228: mol_type = other DNA
atgaagctgtacggcacccggggcagcgacatcagccacttccagtgtcaaatgctccagtctatcataaagaatatttggatccctatgaagccctattatactaaagtctatcaagagatttggatcggcatgggactcatgggattcattgtctacaagatcagagccgcagataaacgtagcaaagccctgaaggcctcagctcctgccccgggacatcattag

SEQ ID NO: 183012 - DNA, 177 bp, synthetic construct
  misc_feature 1..177: note = Description of Artificial Sequence: Synthetic coding sequence
  source 1..177: mol_type = other DNA
atgctgcagagcatcatcaagaacatctggatccccatgaagccctactatactaaagtctaccaagaaatctggatcggaatgggtctcatgggcttcatcgtatacaagattagagcggctgacaaacgctctaaagccttaaaggcatctgcccctgcccccgggcatcattag

SEQ ID NO: 183013 - DNA, 177 bp, synthetic construct
  misc_feature 1..177: note = Description of Artificial Sequence: Synthetic coding sequence
  source 1..177: mol_type = other DNA
atgctgcagagcatcatcaagaacatctggatccccatgaagccctattataccaaggtgtatcaagaaatctggattggaatgggtctaatgggcttcatcgtctacaaaatacgagcagccgataagcgcagcaaagctcttaaagccagtgctcccgcccctggccatcactag

SEQ ID NO: 183014 - DNA, 2928 bp, synthetic construct
  misc_feature 1..2928: note = Description of Artificial Sequence: Synthetic coding sequence
  source 1..2928: mol_type = other DNA
atgacccagcagccccaggacgacttcgaccggagcgtggaggacgctcaggcttggatgaaggctgttcaggaccagcttcaggtgaacgacaatacacaggggcctagagccgcccttgaggcacgcctttgggagacagagaaaatttgccagctcgagccggaaggtcgcgtgcgagtagatctggtcctccggatggctgaggccctgctggcatgttgtcccggcgaccagaagccggggattctggccaggctgaaggacataaaggcccagtgggaggaaaccgtcacctacatgacacattgccactcacgcattgaatgggtgtggctgcactggagcgagtatttgctcgcccgtgacgagttctatcgctggtttcagaagatgatggttaccttagaacctcatatcgagctgcagctcgggctgaaggaaaagcagtggcaactgagccacgcgcaagtcctgcttcacaatgtggataaccaggccgtcctgctcgataggctgctggaggaggctgcttcattattcaatcgcattggagaccccagcgtagacgaggacgcccagaagcggatgaaggcagagtacgatgcagtcaaggccaaggctcaaaaacgagtggatttactcgagcaggtcgcccgcgagcatgaggagtaccaggccggagtggacgagttccagctctggctgaaagccgtagtcgaaaaggtgaatggttgtctaggccgtaattgcaagctgcctattacacaacgactgtctacccttcaggatatcgcgaaagactttccccgaggcgaggagtctctggagacactcgaggagcagtcagctggagtcatccgaaacaccagccctttgggggcagagaagatcacaggagaacttgaggagatgcgtaaggtactggaaaaactccgggccttgtgggaagaggaagaggaaaggctccgcggccttttgcggtctaggggcgcctgggagcaacagatcaaacaactggaagcagagctttccgagttccggatggtactgcaacgtctagcgcaggaaggacttcaacctgccgctaaagcaggtaccgaggatgagctagtggcgcattggagaagatacagcgctacaagagcagcactggctagcgaagaaccccgcgtggaccgcctgcaagcccagcttaaagaactgattgtgttccctcacaatctgaagcccttgtcagactccgttattgctacgatccaggagtaccagtccttgaaagtgaaatccgcacgactcaggaatgcagccgccgtggaactctggcagcattttcagcgacccctgcaggacctccagttgtggaaagcactcgcacagcggctgctggaggtcaccgcgtcactgccggacctgccaagcctccatacatttctaccacagattgaagccgcactcatggaatcctctcgactgaaggagctccttacgatgcttcagctcaaaaaagacctgttaatcggaatattcggccaggaacgcgctactgcccttttagagcaagttgcgggcagtatgcgggaccgggatctcctgcataatagtcttctgcagagaaaaagcaagctacagagtcttcttgcgcagcacaaagatttcggagccgcctttgaacctctgcagcgaaaactgctggaccttcaggttcgggtccaagccgagaaaggactccagcgagaccttcctggaaagcaagcccagctgtcaagattacagggcctccaggaagagggactggatctgggtgcacaaatggaggccgccagaccactggtgcaggagaatcctaaccaccagcacaaaatggatcagctgtccagcgacttccaggcgcttcagaggtcactcgaggacctggtcgatcgttgtagacagagcgtccaggagcattgcacattctcccatcagcttctcgagttgaggcagtggattgtggttacaacccagaaattggaggctcacaggggtgaggcaggacccggggatgccgagagccaagaggcagagttcgagcgtctcgtggcagaatttcccgagaaagaggcccagttgtcgctcgtggaggcccagggctggctggtcatggagaagagttctcctgaaggggccgcagtggtgcaagaggagctgagggagctggcagagtcctggagggcacttcggctgctcgaagagtctctcctgtctttgatccgtaattggcacctgcagcggatggaagttgattccggtaagaagatggttttcactaataacatccccaaatccggttttctgataaatcccatggatccaataccacgtcatcggcgtcgcgcgaatttacttcaagaggaagaggggtctcacgaagacttcagccaactcctgcgcaactttggtcagtggctgcaggtggagaatagcaagctggttaggatcatcgccatgcgtacgagcaccgccgaagatctgagaactcggaagtccaagctgcaggagttggaagctcgcgtccctgaggggcagcacttatttgaaaacttgctccgtttaggtcccgccaggggaacttccgacgagctggaggatttgcggtaccaatggatgctttacaagtcgaaattaaaagactcaggccatctcctcactcaatcctcaccaggcgaaccaaccgggttccaaaaaactcgcaggtggagagggctaggatccttgttccgacgagcctgctgtgtagctcttcctctccagctcctgcttcttttgttcctgctgctgttatttctgttgccaatcagggaggaggacagaagctgtaccctggccaacaacttcgcccggtcattcaccctaatgttgagatataacgggccccccccaacttag

SEQ ID NO: 183015 - DNA, 1791 bp, synthetic construct
  misc_feature 1..1791: note = Description of Artificial Sequence: Synthetic coding sequence
  source 1..1791: mol_type = other DNA
atgacccagcagccccaggacgacttcgaccggagcgtggaggacgcacaggcctggatgaaggcagtgcaggaccagctgcaggtgaacgataacacacaaggtcctagggctgctctcgaggcgaggctgtgggagaccgaaaaaatctgtcagctggagcctgaggggcgcgtccgggttgacctcgtgttaaggatggccgaggcgttactcgcctgttgtcccggcgaccaaaaacctggcattctggctagacttaaggacattaaggcccagtgggaggagacagtcacatatatgacgcattgtcactctcgaattgaatgggtgtggctgcattggtccgaatatctgttggcccgcgatgagttctaccgctggtttcagaagatgatggtcaccctggagccacacatcgagctccagctggggctcaaggaaaagcaatggcaactttcccacgcccaagtcctattgcacaacgtagataatcaggccgtcctactggatcgccttctggaagaggccgctagtctcttcaacaggattggcgacccaagcgtggacgaggacgcccagaagcgcatgaaggccgaatacgacgctgtgaaagctaaggctcagaagcgcgtcgacctgcttgagcaggtggcaagggagcatgaagaataccaggctggggttgatgagttccaactgtggcttaaagcagtcgtggaaaaggtgaatgggtgcctcgggcggaactgtaaattaccgataacgcagcggctgtcaacattgcaggatatagctaaagactttccgaggggagaggagagtctcgaaactctcgaggagcagagtgccggcgtgatcagaaatactagcccactgggcgcagagaagattaccggcgagctggaggagatgcgaaaggtgttagagaaattgcgtgccctatgggaagaagaggaagaacgactacgagggctcctacggagcaggggcgcgtgggagcagcagatcaagcaacttgaggctgagctgtcggagttcagaatggtgctccagaggctcgcccaggaagggctgcaacccgccgcaaaggcgggaaccgaagacgaattagtggcacactggcgccggtattcagcaaccagggcagccctcgcaagcgaagaaccccgggttgaccgcctacaagcacaactgaaagagctcatcgtattcccacacaacctgaaaccactgagtgactctgtgatcgccacaatacaggaataccaatcacttaaggtcaaaagcgccaggctgagaaatgctgctgcagtggagctgtggcagcacttccagcgccctctgcaggacctgcagctctggaaagcgctggctcagcgcctgctcgaagtaacagcatctctgcctgatctgcccagcctgcacacttttcttccacaaatcgaggccgcactaatggaatcatctaggctcaaggaacttctaactatgttgcagctgaagaaggatctcctgatcggtattttcggccaggaacgggccaccgctctattggaacaggtggcgggctcaatgcgcgatcgggacctgctgcacaactctttgttacagcggaagagcaaactccagtcccttctggctcaacacaaagactttggggcggcatttgagcccctgcagagaaaactcctcgacctgcaggtgcgagtacaagccgagaagggtctgcagcgcgatctacctggaaagcaggcccagctatcgaggctccaggtccgcggcctttag

SEQ ID NO: 183016 - DNA, 2913 bp, synthetic construct
  misc_feature 1..2913: note = Description of Artificial Sequence: Synthetic coding sequence
  source 1..2913: mol_type = other DNA
atgacccagcagccccaggacgacttcgaccggagcgtggaggacgcccaagcctggatgaaggcagtgcaggatcagctgcaagttaatgacaacactcagggccccagagcggctctggaagcacgcctgtgggagactgagaagatatgccagcttgaacccgagggtcgagttcgtgtcgatttagttctacgcatggctgaggccctgttagcatgttgtccaggcgatcagaaaccaggcatactggccagactgaaagatatcaaggctcagtgggaggaaaccgtaacctacatgacccattgccactcacgtatcgagtgggtatggcttcattggtccgaatacctcctcgcccgggatgaattctatagatggttccagaaaatgatggtgacgcttgagccccacatagagctgcagctggggcttaaagaaaagcagtggcagctcagccatgcccaggttctgctgcacaacgttgataatcaggcagtgctgttggaccgtctcttggaagaagcagccagtcttttcaaccggatcggtgaccctagcgttgatgaggacgcccaaaagcgtatgaaagcggagtacgacgccgtgaaggccaaggctcagaaaagggtggacctacttgagcaggtagctcgagaacacgaggagtaccaggccggcgtggacgagtttcaactgtggcttaaagcagtggtggagaaggtaaacgggtgcctagggcgaaactgtaagctaccgattacacagagactgtccacgttgcaagatatcgctaaggacttcccccggggtgaggagagcctggaaactcttgaagaacagtctgccggagtgatccggaacaccagtcccctgggtgcagaaaagattacaggggaacttgaagagatgaggaaagtcctcgagaagcttcgcgctctgtgggaggaagaagaggaaaggctaagagggctactgaggtcaaggggagcatgggagcagcaaatcaaacaactggaggccgagctgtcggagtttagaatggtgctgcagcggctagcccaagaaggccttcagcccgccgctaaggctgggacagaagacgagttagtcgcccattggcggagatactcagcaacacgagccgcgctggcaagcgaagaaccccgcgttgatcgcctgcaggcacagttaaaagaactgatcgtcttcccccataacctgaaacccttatccgatagtgttattgccaccatacaagagtaccagtccttaaaagtgaaatcagctagacttagaaatgccgccgcggtggagctgtggcagcacttccagcggcccctgcaggatctgcaactctggaaagctcttgctcagaggcttcttgaagtcacagccagcctgccagatctgccttcccttcatacattcttgcctcagatagaggcggccctaatggagtcctctcgcttaaaggagctgctgactatgctgcagctcaaaaaagacctgctgattggaatctttggccaggagagggcgaccgcattattagaacaggtggcgggaagtatgcgtgaccgcgatctgttgcacaatagcctgctgcaacggaagagcaagctccaatctttactcgctcagcacaaggatttcggagctgcctttgagcctctgcaacgaaaactactcgatctgcaagtcagagtgcaggccgaaaagggactgcagcgggacttgccaggtaaacaggcgcagctgtctcgccttcagggcctgcaggaggaaggactggacttgggggcacagatggaggcagccagaccccttgtccaggaaaatccgaatcaccagcataaaatggaccagctgagtagcgacttccaggctttgcagaggtcactcgaagacttggtggatcggtgccggcagtccgtgcaggagcattgtacctttagccaccagctgctggaactcaggcagtggatcgtagtcaccacccaaaagctggaggctcaccgcggagaggcgggacccggtgatgccgaatctcaagaagccgagttcgaaaggctggtagcggagtttccagaaaaagaggcccagttgtctctcgttgaagctcaggggtggcttgtgatggaaaagagctcaccagagggcgctgcggtcgtccaggaagaactacgtgagctggcagagtcttggcgtgccctgcggctgctggaggaatcattgctgtcactcataaggaattggcacctccagaggatggaagtagacagtgggaagaaaatggtattcacaaacaatatcccgaaatctggcttccttattaacccaatggaccctattccgcgccacaggagacgtgaggaggaaggctcacatgaagacttttcccagctgctgagaaatttcggccagtggctgcaggtggagaacagtaaactggttcgtataatagccatgcgtacctcaacagctgaagatcttaggacaagaaagagcaagcttcaggagctcgaagcacgcgtcccagagggacagcatctttttgagaatttgttgcggctgggacccgcccgaggaacttcggatgaactagaagatctccggtatcagtggatgctatacaagagcaagctgaaggactccggccacctgctgacccagtcttctccaggagagcctaccggattccaaaagacaaggcggtggcggggacttgggtcactcttccgtcgcgcctgttgcgtcgccctgccccttcaactgctgttactactctttttgctgctgctgtttctactccctattagggaggaagatcggagctgcacacttgcaaacaattttgcacgctcgttcaccctaatgctgaggtataacggaccaccgccaacgtag

SEQ ID NO: 183017 - DNA, 3471 bp, synthetic construct
  misc_feature 1..3471: note = Description of Artificial Sequence: Synthetic coding sequence
  source 1..3471: mol_type = other DNA
atgggcaacctgctgagcaagttccggcccggctgccggcggcggcccctgcccggccctggacgcggcgctccagcaccactttccagggacgcttccccacctgggagagcccacagtgtcccaaccccccgcccctttagaggtcttttcagacggaatgcccgccgccggcctagtgcagcctccatttttgttgctccgaagcgtccttgccccctcccacgtgccgcagctgcacctttaggcgtcctccctgctgtggggtggggtttagctattcgaaagaccccgatgctgccagcgagaaatccaccaagattcggtcatccttcgtctgtacggatcccacccccaagcaggatgttcacactcttgctgccctctccacgggaacctgctgttaaggcacgcaagccaatcccggcgaccctgctcgaggaaacggaggtctgggcccaggagggcccacgacgcgtgaagaaggatgaggatcccgtgcagattgagggagaggatgatgagaagcgcactcctctcagttcaggcgaggcctcttccacatctaggtcccaagggactcaaggagacgtagctagctttagatgttctcctggcccactggagggtaacgtgtaccataagtttagcgagaactcgatgtcagagaaagctcaggcttcgcctgccagctcatgcctggaaggtcctgctatgccatccacccacagccaagccggttgtgctcgccatctggggaagcccgacccagatgcaacagcgccgccggagccggctgtcggctgttctttactgcaacaaaaactagccgcagaagtgttgaacgaggagcctcctccttcaagcttgggtctccccatccctctgatgagcggcaagcgcatgcccgatgagaaaccattctgcatcccccctcggagtgcggctccccctcgggctgcgcgtaaccgcccttgcaaacgtaaaatgagtatccctttactgctgccattgcccccctcgttgccgctgctgtgggatagaggggagctgcctccccccgccaagctgccttgtctttccgtggaaggtgatttgcatactctcgaaaagtcccccgagtataagcggaacagcagaattttagaagataaaactgagacgatgaccaattcttctataactcaaccggccccatctttttcacaacctgtgcagactaccgatagcttaccgctcactacatacacgagccaggtcagtgcccccttgccgattcccgatctggccgacctcgccaccggcccacttattcttcccatcccgcccctttccacaacacccaaaatggatgaaaagatagcctttacgataccaaatagtcccctcgccctgcccgccgacctggtgccaattcttggagatcagagcaatgagaaaggaggctcctacaatagtgttgtcggagcagcccccctgacgtctgatcctcctacccctccctctagtacaccatcattcaaaccacccgtcacaagggaatcccccatttctatgtgtgtggactctcccccgcctctctcatttctgacactgctgcctgtaccttccaccggcacctctgtgattacatcgaagcctatgaactctacttcagtgatctcgactgtcaccacaaatgcgtctgcccatcttacgtcccagaccgccgtggatccggaggtcgttaatatggatacaactgcccccagccaagtggtgatctttacatcgtcactgagctcccgggtgtcatccctgcccaattcccagattcactgctccgctgagcagagacatccaggcaaaacaagcgtctatactagccctctacccttcattttccacaacactaccccgagcttcaaccagctgttcgggaaggaggccacccctcaaccaaagttcgaagcccctgacgggcagcctcagaaagccagcttgccctccgcctgtgtgttcctgtcacttcccatcattcctcctccagataccagcactcttgtaaactctgcatctacagcttccagttcgaaacctccgatcgaaaccaacgcaatgcacacgacgccaccttccaaggctgtaatactacagtctgcctctgtgtccaagaaatacttgccattttatctggggttgcccgggtctgggaacactcaaccctccggtaatacagccagcgtgcaaggatccacctcgctgcccgcacagtctgttcgggctccagccacagcatcaaatcaccctctgaacccgggagcaactccccagccaaaattcggagccccagacggaccgcagcagaagacttcgctcccaagtgcccatgactttctgagtttgcctattatggtccctcctgacacatccacattggtgtcatctgcctcagccgcttcactgagcaaaccagccatagatacaagcgacatgaacaccacccctccctcaaaaactgtgatcctgcagtctacattcgtgagccgaaaagaggagtacatccgcttttacatgggtctaccaggcagtggtaatacgcttcatagtgactctatagcctcagcccaagtatcaacgtcgtttcccgcccaggccgatcgccgtccaacgaccacatcctcccacccactgaataccggaagtatctcacacagtactctcggagccactgatggtcagcagaaatcagatagctcttttatcctgggcaaccccgccacacccgcccctgtcatcggactgacctctccatctgtccagcctctgtctggtagtataattccaccagggttcgcggaactcacctcaccttacacagcgctcggaactcctgtgaacgccgagcccgtggagggacacaatgccagcgcatttcctaatggtacggctaagacctccggctttcggattgctaccggcatgcccggtacgggggacagcactctgctggtaggcaacactattcctggaccccaagttatcatggggcctggtactcctatggatggaggatccatcggctttagcatgtctgcaccagggcccagtagtacttctggcgagttgaatataggacaaggccaaagcggtacgccctctactaccagcgttttcccgtttggacaagcggcctgggacccaacaggccacagcatggcagctgctccacagggcgcctctaatattcctgtcttcgggtacacctctgccgcggcctacattcccggtctggacccccctacacaaaactcatgctcgggaatgggcggggatggcacacgcagtatcgtggggggtccctgtgtgcctgctttccagcagtgcatactgcagcatacatggactgagcggaagttctacacttcaagtacccattactacggccaggagacgtatgtgcggcgtcatgtttgctttcaactcccatag

SEQ ID NO: 183018 - DNA, 5733 bp, synthetic construct
  misc_feature 1..5733: note = Description of Artificial Sequence: Synthetic coding sequence
  source 1..5733: mol_type = other DNA
atggcctgctgccacaaggtgatgctgctgctggacaccgccggcggagccgccaggcatagcagggtgcggagagctgccttgcgattactgacctacttgtcttgtcggtttgggttggcccgcgttcactgggcatttaagttctttgattctcaaggcgctcggagcaggccttctagggtgagcgacttccgcgaactgggctcccgatcatgggaggacttcgaagaggaactggaggcccgcctcgaagacagggctcatctgcccgggccggcccccagagctacacatacccatggcgccctcatggaaaccttgctggattaccagtgggaccgcccagagatcaccagccctacaaaaccgattctaaggagtagtggtcgtagactgctggatgtggaaagcgaggccaaggaggcggaagcagctttgggaggacttgtcaacgctgtctttctgctggcaccttgcccccacagccaaagagagctccttcagttcgtctctggctgcgaggcccaggctcagaggcttccacccacacccaagcaggtcatggaaaagctcctccctaagagagtgagagaagttatggtggcaagaaaaatcaccttttattgggtcgatacgaccgaatggtctaaattgtgggaaagtccggaccacctgggatactggactgtatgcgagctccttcaccacggcggtgggacagtgttaccctccgaatcatttagctgggacttcgcccaggcaggcgaaatgctgttgcggtctggcatcaaactcagcagtgaaccccacctcagtccatggataagtatgttaccaaccgacgctaccctgaataggcttctctataattcgccggaatatgaggcctcgttccctcggatggaaggcatgctcttcttgcccgtcgaagcaggcaaggaaatccaggagacctggaccgtcaccctggaacccctggctatgcaccagcgacattttcagaagcccgtgcgcatctttctcaagggctctgtggcgcagtggtcattgcccacatcttctacattgggtactgactcctggatgttgggatccccagaagagtctacggctacccagaggctgctgtttcagcaactagttagccgtcttaccgccgaggaactgcacctggtggctgacgtggatcccggcgagggacgccccccaattactggcgtcatatcacctttgtctgcctccgctatgatcctcacagtgtgcagaaccaaagaggcagaattccagcggcacgtgctccaaactgccgtcgcagatagcccaagggatactgcctcattgtttagcgacgtggtggattccattcttaaccagacccacgattcactggccgatactgcaagcgcagcctcacccgtgccagaatgggctcagcaagagctcggacacactacaccttggagtccggctgtcgttgagaagtggtttccattttgcaacatcagcggggcctctagcgatctgatggagagtttcggcctgctgcaggctgcaagtgcaaacaaagaagagagcagtaagaccgaaggtgagcttattcactgcctcgccgagctttaccagcggaagtctagagaggagagtacaattgcccaccaggaggacagtaaaaaaaaacgtggggtccctagaacgccagtgaggcaaaaaatgaatacaatgtgccgttccttgaagatgctgaacgtggcgcgccttaacgtcaaagcccaaaagctccaccctgatggtagccctgatgtggcaggtgaaaaagggatccaaaaaatcccatcgggtagaaccgtggataaactggaagaccgcggcaggaccctgaggtcaagtaagccaaaggattttaagaccgaggaggagctgctgtcttatattagagaaaactaccagaagactgtagccacaggtgagattatgctgtatgcttgcgcaagaaacatgatttccaccgtgaaaatgttcctgaaaagtaagggaacaaaagagcttgaggtgaattgcctcaaccaggtcaagtcttcgctactgaagacttcgaagagtttgcggcagaacttgggcaaaaaactagacaaagaagataaggtgagagagtgccagctccaagttttcctccgactggagatgtgcttacagtgtccaagcatcaatgagagtaccgacgatatggaacaggtagtcgaggaggtgaccgatctcctgcggatggtgtgcttgactgaagattccgcatatctcgctgagtttctcgaagagatcctgaggctgtacatcgattcaataccaaagactctgggtaacctctacaactcactcgggtttgttatcccccagaaattggccggcgtgctgccaacggactttttttctgatgactctatgacccaggagaacaagtcccctttgttgtccgttccattcctcagctcagccaggcggtctgtgagcggatcccctgagtctgacgagctgcaagagttaagaacgcggtccgccaaaaagcggaggaagaacgccctgattcggcacaaaagcatcgccgaagtttcacagaacctgcgccagattgaaatcccgaaggttagcaaacgggccaccaagaaagagaactctcacccagcacctcaacagcctagccagccagtgaaggatacagtgcaggaggtgactaaggttcgcagaaacctctttaaccaggaattactctctcccagtaagagatccctgaaaagaggactaccgcgctcacactccgtaagcgctgtcgatggactggaggataaacttgacaactttaagaaaaacaaagggtatcacaagctgctcacaaaatcagtagctgagacccccgtgcacaaacagatcagcaagcgattgctacatcgccagattaaaggtaggtcctcggatccaggccccgacataggggtggtcgaagagagcccggagaagggggacgagatttcccttcggaggagcccaagaatcaaacaactgtcattctccaggacacattcagctagcttctattctgttagccagccgaagagtagaagcgttcagcgcgttcatagctttcagcaagataagtctgaccaacgtgaaaattcccccgtacagagcattagaagccccaagtcactgctcttcggggcaatgtcggaaatgatctcaccgtctgaaaagggatctgccagaatgaagaagaggtcccgcaacaccttggatagtgaagtgccagcggcttatcagactccaaaaaagtcccatcagaaaagtctgtcattttccaagactacccccagaaggatatcacataccccccagaccccactgtacacgcctgaacggctgcagaaaagccccgccaagatgacacctaccaagcaggccgcgttcaaggaaagcctgaaagacagtagttcccctggtcacgacagccctctcgactcaaaaattacgccacagaagcggcacacacaagctggcgagggaacttccctcgagactaaaacaccgcgcacccctaagaggcaggggacgcagccacccggtttcctgccaaattgcacttggccccacagcgtgaattccagtcccgagtcaccttcatgccctgcaccccccacatcttccaccgcacaaccccggcgcgagtgcttgactccaattagagatccactgcgcactcctcccagagccgccgctttcatgggtacacctcaaaatcagacccaccaacaaccacatgtactaagggctgccagagcggaggaaccggcacaaaaactgaaagataaagccatcaagacacctaagaggccagggaactccacggtgacatcttcaccccctgtgacgcctaaaaaacttttcacctccccgctctgtgatgtgagcaaaaagtcaccatttcgcaaatctaaaattgaatgtccttcacctggggagttagaccagaaagaaccgcagatgtcgccgtccgtcgccgcgagtctgtcatgtccggttcctagtactccacccgaactgtcacagcgcgctacactggacacggtacccccgccgccccctagtaaggtgggaaagaggtgtcggaagacttcagaccccaggaggtcaatcgtggaatgtcagccagacgcctccgccacaccaggcgtgggtacagctgactctcctgcagcccccaccgacagccgcgatgatcagaagggtcttagcctgtctccccagtctccaccggagcgccgcggctaccccggacccgggctacgctcagattggcacgcctcaagccctctcctgataacctccgacactgagcacgtcaccctcctgtccgaagccgaacaccatggcataggggatctcaagagcaacgtcctgagcgtcgaagaaggagaagggcttcgaaccgccgacgcagaaaagagctctcttagccaccctggcatccctccttcccctccatcgtgcggccccgggtctccactcatgccctctagagatgttcactgtacaactgatgggcgacaatgtcaagcctctgcacagctggataacctccctgccagcgcctggcactccactgactctgccagtccccagacatacgaagtcgaattggagatgcaggctagcggcctgcccaagctgcgcatcaagaagatcgacccttcttcctcactggaggctgagccgctttcaaaagaggagagctccttgggggaggagtccttcctaccagctctgtccatgcctcgcgccagccgttccctcagcaaaccagagcccacgtacgtatctcctccctgcccccgcttgagccattctacaccaggtaagtccagagggcagacttacatatgccaggcttgcacgcctacccacgggccttcgtcaacaccatcgccttttcagaccgatggagtaccttggacgccaagccccaaacattcaggcaaaacaactccagacattataaaagactggccccggcgcaaacgggctgttgggtgtggtgccggttcttcttccggcagaggtgaggtgggcgccgacctgcccggctccttgagcttacttgaatcggagggtaaagatcacgggctggagctgagcatacaccggacccctatactcgaggacttcgagctggagggcgtctgccagcttcctgaccagtcgcccccccgaaattccatgccaaaggccgaagaggcctcctcctggggtcagttcggtcttagctcacgaaaacgggtgctgctcgccaaggaggaagcagacaggggcgctaaaaggatttgcgatttgagagaggatagcgaagtctcgaagtctaaagaaggatccccttcctggtcagcctggcagttaccgtctacaggcgatgaggaagtgttcgtttcgggtagcaccccgcctcctagctgcgccgtccgctcctgtctgagcgctagcgcgctccaagcccttactcagtcacccctactcttccagggcaaaacgcccagctctcagagtaaggaccctagggacgaggatgtggatgtgctgcccagcactgtggaagatagccccttcagccgggccttctcccggcggaggcctatatccaggacttatactaggaagaagttgatggggacctggctggaggacctgtag

SEQ ID NO: 183019 - DNA, 354 bp, synthetic construct
  misc_feature 1..354: note = Description of Artificial Sequence: Synthetic coding sequence
  source 1..354: mol_type = other DNA
atgaagctgagcagcgccgccggccaggagagccccggccacccccatccatcccctccagcttggacactcaagaaaccttccgaaagcgtcgcgcaacgcgctatgtgcagcgctcgggcctgcccagtggcctgcccagtcggctgtcccatcgcatgtcctgtctcttgcccagtggcctgtcctgtggggtgtccagtaggctccatggccactgccccccaaggcctaagccctcaggagtgggaagcagatcgcgaaaccgggtcctcatcccatgcaggcacaacccagtgcagcatccactccccatcctcaagttcaaggcacctatcaagaacacagacatag

SEQ ID NO: 183020 - DNA, 627 bp, synthetic construct
  misc_feature 1..627: note = Description of Artificial Sequence: Synthetic coding sequence
  source 1..627: mol_type = other DNA
atgagcagcgagcccccccccccctaccccggcggccccaccgccccactgctggaagaaaagtcgggggcgccccccacacctggacgctcgtcaccggccgtaatgcaaccgccgcccggtatgcccctaccccccgctgacattggcccaccaccctatgaacctcctggtcatcccatgccacagcctggcttcatcccgccccacatgtcagcagatggcacatacatgccacctggattctacccgccacccggacctcacccgcctatggggtattatccccctgggccctacactcctggcccctacccaggtccaggcggtcacacagctacagtgctggtgcccagcggagccgcaaccacagtgaccgtgttgcagggtgagatatttgagggtgcaccagttcagactgtttgcccccactgtcagcaggccatcactaccaaaatcagctatgagattgggctgatgaatttcgtcttaggcttcttctgttgctttatggggtgtgatctgggctgctgcttgataccttgcctcatcaacgactttaaggacgttacccacacttgtccctcttgcaaagcttacatttacacctataagcggctgtgctag

SEQ ID NO: 183021 - DNA, 765 bp, synthetic construct
  misc_feature 1..765: note = Description of Artificial Sequence: Synthetic coding sequence
  source 1..765: mol_type = other DNA
atgagcctggcccggggccacggcgacaccgccgccagcaccgccgcaccactgtccgaggagggcgaagtgacaagcggactgcaggccctggccgtggaagatactggcggaccatctgccagtgccgggaaggccgaggacgaaggagagggagggagggaagagacggaaagagagggttctgggggtgaggaggctcagggcgaagtccccagtgccggtggggaggaaccagccgaggaagactctgaagactggtgcgtaccctgctctgatgaagaagtggaactccccgctgacggccagccctggatgcccccacccagcgaaatccagcgcctgtatgaactactcgcagcccatggtacgctggaactgcaggccgaaatcctaccgcgaaggccaccaactccagaggcgcagtcagaggaggaaaggagtgatgaggaacccgaggctaaagaggaggaagaggagaagccccatatgcctaccgaatttgatttcgacgacgaacccgtgacacccaaggattcactaattgatagaagaaggactcctgggtccagcgcaaggagccagaaacgggaggctagactggacaaagtgctctcggacatgaaaagacacaagaagctggaggaacaaatcctcaggacagggcgcgatctctttagcctcgattcagaggatccaagcccagcttccccaccgctgcgttcatcaggcagctctctgtttcctcggcaaagaaagtactag

SEQ ID NO: 183022 - DNA, 2010 bp, synthetic construct
  misc_feature 1..2010: note = Description of Artificial Sequence: Synthetic coding sequence
  source 1..2010: mol_type = other DNA
atgggcagcgaccccagcgcccccggccggcccggctggaccggctctctgctcggcgatagggaggaggcggcaagaccaagacttctgccattattactggtcctactcggatgcctgggcctcggtgtcgccgctgaggatgctgaagtccacgctgaaaactggttgcgtctttacggatacttgccccagccaagcagacacatgagcacaatgaggtctgctcaaattctggccagcgcactggcagaaatgcaacggttctacggaatccccgttactggcgtgctggatgaggaaaccaaagagtggatgaaacggccccgatgcggcgtcccagatcagttcggcgtgcgcgtgaaggcaaatctgcgccggagaagaaaacgctacgctctgacggggaggaagtggaataaccaccacctgacctttagcatccagaattacacagagaagttggggtggtaccattcaatggaggcggttaggcgggctttcagggtctgggaacaggccacacccctggtgtttcaggaagtgccctacgaggatatccgcctgcgtagacagaaggaggcggacattatggtgctgtttgcctctggctttcacggcgactcatcccctttcgatggcaccggaggattccttgcccatgcatatttccctggtccgggactcggcggtgacacccacttcgacgcagacgaaccttggacgttctccagtaccgacttgcacggcaataatttgttcctggtggctgtccatgagcttggccatgcactcggcttagaacactcttctaatcctaatgccatcatggcccccttctaccagtggaaagatgttgataatttcaagcttcctgaagatgatctgcgcggcattcagcagctgtatgggacccctgatggccagccccagccgacccaaccactccccaccgtcacacctaggcgaccagggcgacctgatcatcgcccgcctagaccaccacagccacccccccccggcggtaagcctgagaggcccccaaagcctggcccccctgtgcagcctagggccaccgagaggccagatcagtacgggccaaacatctgcgacggagactttgacacggttgcaatgctccggggcgagatgtttgtcttcaagggaagatggttctggcgggtgcgccacaaccgcgtgttggacaattatcccatgcctataggtcacttttggagaggtctgccaggtgatatctccgctgcctatgaacgccaagacggaaggttcgtcttcttcaaaggggaccgatattggttgtttcgggaggcgaacttggagcccggctaccctcagcccctgacctcttacggattgggaatcccgtatgacaggattgatacggcgatatggtgggaacccacaggacatactttcttctttcaggaggaccggtattggagatttaacgaagagactcagagaggcgaccccggctacccgaaacctatcagtgtttggcagggcattcctgcgagtcccaagggcgcctttttgtctaacgacgctgcctatacttacttctacaagggcacgaaatactggaaattcgataacgagcggctacggatggagccaggctatcccaaatcgattctccgggattttatgggctgccaggaacacgtggagcccgggcccaggtggcccgatgttgcacgccctcctttcaacccgcacggaggagcagaaccaggcgcagacagtgcagagggtgatgtgggcgatggggatggagattttggcgctggcgtgaacaaagatggggggagccgtgtggtggtacagatggaggaggttgcacgcacagtgaacgtggttatggtcctggtgcctctgttgcttctgctgtgcgtcttggggttgacttacgccctggtacagatgcagagaaagggcgctcctagggtactactgtactgtaagcgcagcttgcaggaatgggtctag

SEQ ID NO: 183023 - DNA, 561 bp, synthetic construct
  misc_feature 1..561: note = Description of Artificial Sequence: Synthetic coding sequence
  source 1..561: mol_type = other DNA
atgagcgccgcccccctggtgggctacagcagcagcggcagcgaggacgaatccgaagatggcatgaggaccagacccggagacggttcccacagacggggccagtccccgctccctagacagcgctttccagtccctgactccgttttaaacatgttcccaggtacagaagaagggcctgaggatgacagtaccaaacatggggggcgagtgagaacattcccccacgaaagaggaaactgggctacacacgtctatgtaccgtatgaggcaaaggaagagtttcttgatcttctggacgtcctcctgcctcacgcccaaacctacgtcccccggttggtcaggatgaaggtattccatctttcgctctctcaatcagtagtcttaaggcatcattggattctgcctttcgtgcaagcacttaaggcacgtatgacaagtttccactcccctcaccctggccctcactgcctgatcggcaccaaagatgctcccgttacacaagagatccccaaagaccttggcgcactcagacaggaaccaggctctcagaccagatag

SEQ ID NO: 183024 - DNA, 744 bp, synthetic construct
  misc_feature 1..744: note = Description of Artificial Sequence: Synthetic coding sequence
  source 1..744: mol_type = other DNA
atgagcgccgcccccctggtgggctacagcagcagcggcagcgaggatgaatcagaagatggaatgcggacacggcctggagatgggtcacatcgtcgggggcaatcccccttaccgcgccagagattccctgttcctgattctgtactgaacatgtttcccggaacggaagaggggccagaggacgactccacgaagcacggaggacgtgtgcgtacatttccgcacgaacggggcaactgggcaacccacgtctatgtgccatacgaggccaaggaagaattcctcgatttattggatgtgctgcttccccatgcgcagacctacgtgccgcgcctggtgcggatgaaagtatttcacctgtccctgagccagtccgtggtgttgaggcaccactggatactgccttttgtgcaggccctgaaggcgcgcatgacatccttccaccgtacattcattggcctcgaagttacaagtgggcatgcgcaattcttggacctcgttagcgaggtggatagggttatggaggagttcaacctcacgactttctaccaagacccatcattccatctgtccctcgcatggtgtgtgggtgacgctcggctgcagctcgagggccagtgtcttcaggagttgcaagcaatcgtggacggcttcgaagacgctgaggtcctgctgcgggtccacacagaacaggtgagatgcaagtctggcaataagttcttttccatgcctctaaagtag

SEQ ID NO: 183025 - DNA, 642 bp, synthetic construct
  misc_feature 1..642: note = Description of Artificial Sequence: Synthetic coding sequence
  source 1..642: mol_type = other DNA
atgagccccctgccccggcagcggttccccgtgcccgacagcgtgctgaacatgtttccagggactgaggagggaccagaggacgactcaacaaagcacggaggtagagtgcgcacatttccacacgaacgtggaaactgggcaacacatgtctatgttccgtacgaggccaaagaggagttcctggacttattggatgtcctgctgccacatgcccaatcagtcgtgctccgtcaccactggatcctgcctttcgtgcaggctttgaaggccaggatgaccagcttccacaggtttttcttcactgccaaccaggttaagatctatacaaaccaagaaaagacgcgtaccttcatcgggctggaggtgacaagcggacacgcccagttcctggacctggtgagtgaggtggatagggttatggaggagtttaatttgaccacattttaccaggatcctagtttccacctatcccttgcatggtgcgtgggcgatgcccgactgcagctggagggccagtgccttcaggaattacaggctattgttgacggtttcgaagatgcagaggtgttgctgagggtacatactgagcaggtaaggtgcaagtccggaaacaagttcttcagcatgcccctcaagtag

SEQ ID NO: 183026 - DNA, 1683 bp, synthetic construct
  misc_feature 1..1683: note = Description of Artificial Sequence: Synthetic coding sequence
  source 1..1683: mol_type = other DNA
atgggcagcaccgacagcaagctgaacttccggaaggccgtgatccaactgacaactaagactcagccagtcgaagccacagacgatgcctacgatcccgtgggctatgggatcccatacaaccatctgttgtttagtgactacagagaaccactggtagaagaagcggctcaggtgctgattgtcactttggatcatgatagcgcctctagtgctagcccaactgtagatgggaccactaccggcactgccatggacgacgctgaccctcctgggccagaaaaccttttcgtaaactatctcagtcgtattcatagagaggaagattttcagtttattttgaaggggatagcaagactcctctcgaacccactcttgcagacatacttgcccaacagtactaagaagatccagtttcaccaggaactgctggtgttgttctggaagctgtgcgacttcaataagaagttcctgtttttcgtactgaagtcaagcgacgtgctggatatactggttccaatcctcttcttcttgaatgatgctagagctgaccaaagcagggtgggcttgatgcacataggcgtgtttatcctgttacttttgtctggcgagcgcaactttggcgtgcggctgaataagccgtacagtattcgtgtgcctatggacattccagtgttcacgggtacccacgcagaccttctcatcgtggtctttcataagatcatcaccagcgggcatcaacgcctccaaccgctctttgattgtctcctgaccatcgtggtcaatgtatccccataccttaagtccctgagcatggtgacggcgaacaagctgttgcacctgctggaggccttctccacgacttggtttctgttttctgccgctcagaaccatcatctcgtcttttttctgctggaagtgttcaacaatatcatccaataccagtttgacgggaactcaaacctcgtatacgctattattcgaaagagatccatcttccaccaactagcaaacttgccaacagatcctcccactattcataaggccctgcaacgacggcgccgtacgccagaacctctctccagaacgggcagtcaggagggtaccagtatggaaggttctagaccagctgctccagctgagcctggcaccttgaaaacgagcctcgtggccacgcctggaatcgataaactgaccgagaagtcccaggtttccgaggatggaacactgcgttctctggagcctgagccacagcagagccttgaggacggtagccccgctaaaggcgaaccgtcccaggcttggagagaacagagaagaccgtccacgtcttccgctagcggtcagtggtcccccacacctgaatgggttcttagttggaaatccaagttaccgttacagacaataatgcgcctcttgcaggttttggtgcctcaagtcgaaaagatctgcatcgacaaaggcttgaccgatgaatccgagatcctgcgattcctacagcacggcacacttgttggactgctgccagtgccccatcccattttaattaggaagtaccaagccaactccggaactgcaatgtggtttaggacttacatgtggggtgtgatctatctaagaaacgtggacccccctgtctggtacgacaccgatgtgaagctctttgaaatccagcgagtttag

SEQ ID NO: 183027 - DNA, 2367 bp, synthetic construct
  misc_feature 1..2367: note = Description of Artificial Sequence: Synthetic coding sequence
  source 1..2367: mol_type = other DNA
atgggcagcaccgacagcaagctgaacttccggaaggccgtgatccagctgaccacaaaaactcagcctgtggaagcaaccgatgacgccttctgggaccagttttgggccgacaccgctactagcgtgcaagatgtgtttgcccttgtgcccgccgccgaaatccgcgccgtccgggaggaaagccccagtaacctggccacattgtgctataaagctgttgagaagctggtgcagggcgccgagagcggctgtcattcggagaaggaaaagcagatcgtcctgaactgctctcgactgctcacccgcgtcctcccatatatattcgaagatccagattggcgcggatttttttggagcactgtgcctggcgccgggagggggggacaaggagaggaagacgacgaacacgcacgtccactggcagaatccttgctgcttgctatagcagatcttctcttttgtccagacttcactgtacagagtcacagaaggtctacagtggacagcgccgaagatgtccacagcctggactcgtgcgaatacatttgggaggcaggcgtaggatttgctcacagcccccagcccaattacattcacgatatgaaccgcatggaactcctaaaactccttctcacatgcttctccgaggctatgtacctgccccctgcgccagaatctggaagcactaacccttgggtacagtttttctgttcgactgagaaccgccacgctctaccgctgttcacgtccctactaaacacggtctgcgcctacgatcccgtggggtatgggataccctacaatcacctcctgttctcagactatagggaacctttagtcgaggaagccgctcaagttttgatcgtgaccctagatcatgactccgcatcatccgcaagtcctacagttgacggaacaaccactggaactgcaatggatgatgcagacccaccaggcccggagaacctctttgtgaattatctatctagaatccaccgggaggaggattttcagttcatcttgaagggcatagcccggctgctctcaaacccactgctgcagacatacctgccgaatagtactaagaaaattcagtttcaccaggaactgctggtgctgttctggaagttgtgcgacttcaacaagaaatttttgttttttgtgctgaagtcctctgacgttctggacattttggtgcccatcttgttttttcttaatgacgctcgagctgatcaatctcgggtgggccttatgcacataggcgtgtttatactgttgctgctgtccggtgagcgcaacttcggggtgcgtctgaacaaaccctactcaattagggtgccaatggatatcccggtgttcacggggactcacgctgaccttttgattgtcgtgtttcacaagatcatcaccagtggccaccaacgccttcaacccctgttcgactgcttattgactatcgttgttaacgtgtctccatacctgaaaagcctcagtatggtcaccgcgaataagctactgcacctcctggaagccttcagcaccacatggtttttgtttagcgctgcacaaaaccaccatctcgtctttttcctgctggaggtctttaataacatcatccagtaccagttcgacggaaattcaaacttggtgtacgctattatcaggaagagatcaatcttccaccaacttgccaacctgcccacagaccctccgacgatccacaaagcactacagcgtagacgccgcaccccagagccgctcagccgcactggttcccaagaggggacctccatggaagggagccgacccgccgctcctgctgagccagggacactgaagacctcactcgtggccacccctggtattgataaactgacggaaaaatctcaggtgtctgaagacgggacccttcgtagcctcgagcccgaaccccagcagtcactggaagacggcagcccagctaaaggggaaccatcacaagcgtggagagaacagcgtcgcccttccacctccagcgcctcaggacagtggtctcccacccctgagtgggtcctctcctggaagagcaagctgcctctgcagaccataatgcggctgctgcaggtactggttcctcaggtagagaagatatgtatcgacaaggggcttactgatgaatctgaaatcctgcgcttcttgcagcatggtacactagtcggactccttccggttccgcatccgattctgatccgaaagtaccaggcaaatagcggaacagctatgtggttcagaacatacatgtggggagtgatctacctgcgcaacgtggatcctccagtctggtatgacacggatgtgaagctgtttgagattcaacgagtctag

SEQ ID NO: 183028 - DNA, 810 bp, synthetic construct
  misc_feature 1..810: note = Description of Artificial Sequence: Synthetic coding sequence
  source 1..810: mol_type = other DNA
atgagcagcgaccacctgaacaacagcaccctgaaggaggcccagttcaaggatctgttcttgaagaaagccgagctcgagtttgctcagatcattattattgtcgtagtagtcacggtaatggtggtggttatagtgtgtctgctgaaccactataaagtatccacccggagcttcatcaaccgccctaaccaatctcgccgacgtgaggacggcctaccccaggagggatgtctctggccctctgattctgccgcccctagattgggagccagtgagattatgcatgcgccgcggagtagagacaggtttaccgccccaagctttatacagagagatcgttttagtcgctttcaacctacctatccatatgtccagcacgaaattgacctgccgcccacaatctccctgagcgatggggaagaaccccccccataccaaggaccctgtactctacagctgagagatccagaacagcagatggagcttaacagggaaagtgttcgagcacctcctaatcggaccatattcgattccgatcttatcgatatcgcaatgtatagcgggggcccttgtccccccagttcaaatagcggcatctcagccagtacctgtagtagcaacggtcggatggagggaccacctcctacatatagcgaagtgatgggacatcaccctggtgcttccttcttacatcatcagagatctaacgctcatcgcgggtctcgactgcagttccagcagaataatgccgagagcacaatcgtgcccatcaagggcaaagacagaaagccaggaaacctcgtgtag

SEQ ID NO: 183029 - DNA, 921 bp, synthetic construct
  misc_feature 1..921: note = Description of Artificial Sequence: Synthetic coding sequence
  source 1..921: mol_type = other DNA
atgcccgaggccggcttccaggccaccaacgccttcaccgagtgcaaattcacttgtacctccggtaagtgcctatacctgggctcactggtttgcaaccagcagaacgactgtggtgataactctgacgaggagaattgcctgctggtgacggagcatccaccccctgggattttcaactccgagctcgaatttgcccaaattatcattatcgtggttgtcgttaccgtaatggttgtggtaatcgtctgcttgctgaaccattacaaggtcagtactcggtcatttattaacagacctaaccaaagccggagaagagaagacggattgccgcaggagggatgtctatggccttcagactcagccgcgccaaggctgggcgcctcagagatcatgcacgctccgcgttcacgggatcgatttacggcccccagcttcattcagagagatagattctccagatttcagccaacttacccatatgtgcagcatgaaatcgacctacccccaacaatctccctgagtgacggagaggagcccccgccctaccaagggccgtgcacgctgcagcttcgcgaccccgaacagcagatggaactcaatcgggagtctgtccgggcaccacccaatcgaacaatcttcgattcagatctgatcgatatcgcaatgtattcagggggtccttgtccgccttcctctaacagcggaattagcgcaagtacatgttcaagcaatgggcggatggagggtcccccccctacatatagtgaagtgatgggccaccaccccggagccagcttcttgcaccaccagagatcaaatgcccaccgcggttcaagattgcaattccaacaaaataatgccgagagcacaattgtccctatcaaaggtaaggaccgaaaaccaggcaatctggtctag

SEQ ID NO: 183030 - DNA, 747 bp, synthetic construct
  misc_feature 1..747: note = Description of Artificial Sequence: Synthetic coding sequence
  source 1..747: mol_type = other DNA
atggccgccgagctggagttcgcccagatcatcatcatcgtggtggttgtgacggttatggtggtcgtgatcgtctgtctgctcaatcattataaagtgagtaccagaagcttcattaatcgtcccaaccagtcacgcagaagggaggatggactgccccaggaggggtgcctgtggccaagcgattcagccgctcctcgcttaggcgcatccgaaatcatgcatgcccctagaagtagggaccgctttactgctccaagctttattcagcgtgatcgcttttcaagatttcagccgacctacccgtacgtccagcatgagattgacctacccccaacgatctccttatcagacggcgaagagcccccgccctatcaaggcccctgtacccttcagcttagggatcccgaacaacagatggaattaaatcgggaaagcgtccgggcaccccccaaccggacaatcttcgattctgatctgatcgacatagcaatgtactctggggggccttgccctccgtcttctaattctggtatttctgcttccacgtgttcctctaacggccgaatggagggcccacctcctacatattctgaggttatgggacaccaccccggtgccagctttttgcaccatcagaggtctaacgcccaccgaggtagtcggctgcagtttcagcaaaacaacgcagagtcgaccatagtcccaatcaaaggaaaggaccgcaaaccaggcaacctggtgtag

SEQ ID NO: 183031 - DNA, 756 bp, synthetic construct
  misc_feature 1..756: note = Description of Artificial Sequence: Synthetic coding sequence
  source 1..756: mol_type = other DNA
atgagcagcgaccacctgaacaacagcaccctgaaggaggcccagtttaaagacttgttcctgaagaaggcggagcttgagtttgcccagatcatcatcatcgtggttgtggtgaccgttatggtggtcgtaatcgtgtgtctcctgaatcactacaaggtgtccacccgctcattcatcaacagacccaaccaaagtcgccgtagggaggatggtcttccacagatcatgcatgcacctaggtctcgagatcgcttcacagccccgtctttcatccagcgtgacagattcagcagatttcaacctacatatccttacgtgcagcacgaaattgatctgccccccacaatcagcctgagcgacggtgaagaacctccaccttaccagggaccctgcaccctccagcttcgcgatccagagcagcagatggagctaaatcgtgaaagcgtgcgcgctccccctaatagaactatattcgatagtgatttgatagatattgcaatgtatagtggggggccatgtcctccatcaagtaactcagggattagcgctagtacatgctcctccaatgggcgaatggaaggcccgcccccgacatactccgaagttatggggcatcatcctggtgccagtttcttgcaccaccagcggagcaatgcccaccgtggctcaaggttgcagttccaacagaacaatgcagaatccacaattgtgcccataaaaggcaaagatcgtaagccaggcaacctggtctag

SEQ ID NO: 183032 - DNA, 867 bp, synthetic construct
  misc_feature 1..867: note = Description of Artificial Sequence: Synthetic coding sequence
  source 1..867: mol_type = other DNA
atgcccgaggccggcttccaggccaccaacgccttcaccgagtgcaagtttacatgcactagcggcaaatgtttgtatctgggttccctggtgtgtaaccagcagaacgattgtggagacaattcagatgaggagaattgcctgcttgtgacagaacacccccccccaggcatcttcaactctgagctggagttcgctcagatcatcataatcgtggtagtggttacagtgatggtggtcgttattgtttgtttgctgaatcactacaaggtctctaccagaagctttattaatagaccgaatcagtccaggagacgggaagacggcctgcctcagatcatgcacgctcctcgctcccgagatcgattcacggctccttcattcatccagcgggacagatttagtcgattccaacctacatacccctatgtccagcacgagatagatctccctcctactatttcattgtctgatggagaagagccaccaccctatcagggaccttgcacactgcagctgcgggaccccgagcaacagatggaactaaacagagagtctgtccgagcaccacccaacagaacgattttcgacagcgatcttatcgacatagcgatgtacagcgggggcccttgtcctcctagttcaaatagtgggatatctgcatccacttgcagttccaatggacgcatggagggcccacctcctacatactccgaagtgatgggacatcatccaggtgcctcatttctccatcaccagcggagcaatgcgcaccgcggcagccgtttgcagttccagcagaacaacgctgagtccactatcgtccctataaaaggcaaggacagaaaacccggaaatttagtgtag

SEQ ID NO: 183033 - DNA, 693 bp, synthetic construct
  misc_feature 1..693: note = Description of Artificial Sequence: Synthetic coding sequence
  source 1..693: mol_type = other DNA
atggccgccgagctggagttcgcccagatcatcatcatcgtggtggtggtgaccgtgatggttgtagtgatagtgtgcctgcttaaccactacaaagtctcaacccggagcttcatcaaccggccaaatcagtcacgtcggcgggaggacggccttccccagattatgcacgctcctagaagcagggaccggttcaccgctccatcatttattcaacgagacagattcagccgatttcaaccaacctacccttacgttcagcacgaaatagatttgccaccaactataagcctgtccgatggtgaggaacccccaccgtaccagggcccttgcactctgcagcttagggatcctgagcagcaaatggagttaaacagggagagtgttcgcgcaccccccaataggaccatcttcgacagcgacctgatagacatcgccatgtatagcggtggtccatgccctccgtcatccaatagtggcatttccgcttcgacctgctcaagtaatgggcggatggaagggccccctcccacctatagtgaagtgatggggcaccatcctggggcaagcttcctgcaccatcaacgaagcaacgcacatcgtggcagtcgacttcagttccaacaaaataacgcagagtcaacaatagtccccattaagggcaaagaccggaagccgggaaatcttgtgtag

SEQ ID NO: 183034 - DNA, 1119 bp, synthetic construct
  misc_feature 1..1119: note = Description of Artificial Sequence: Synthetic coding sequence
  source 1..1119: mol_type = other DNA
atggccaagagcaagaccaagcaccggctgtgcagccaggagagctccgttagcgcgctcctggcctcttgtaccctgtccggctcaaacagttccaatagtgacggctcgtttcattataaagataaactctatagaagcgctagccaggcactgcaggcttacattgatgactttgacctaggtcaaatctacccaggagcaagcacgggcaagataaatatcgacgaggactttacgaacatgagtcagttctgtaattacatatataaaccaaacaacgcgtttgaaaacctggatcacaagaagcacagcaattttatttcttgcaggcgccacactgttaatgacattgatagtatgtcattgaccactgacgacctcctccgactaccagccgacgggtcgtttagttatacctatgttggtccctctcaccgtacatctaagaaaaacaagaagtgtagaggaagattgggcagcctcgatatcgagaagaatcctcacttccagggaccgtacacatctatgggcaaggacaattttgtaacgccagtaattaggagcaacataaatggcaagcagtgtggcgacaagatcgagctcctcattttgaaagcaaagcgaaacctggagcagtgtacagaagaacttcccaaaagcatgaagaaagacgactcgccatgctctctggataaactcgaagccgatcgaagctgggagaatatccctgttacattcaaatcgcctgtgcccgtgaactctgacgattctccccagcaaacgagccgggccaagagcgctaaaggagtccttgaagactttttgaataacgacaatcagtcatgcactctgtctggaggaaaacaccatggacctgtggaagccctgaaacagatgctcttcaatctgcaagccgttcaagagaggtttaaccagaataaaacgaccgaccccaaagaggaaatcaaacaggtgtctgaagatgatttcagcaaacttcagctgaaggagagtatgatcccaattacaaggtcgctccagaaggctctccatcacctctctagattacgcgatctggttgacgatacgaacggcgagaggtctccgaagatgtag

SEQ ID NO: 183035 - DNA, 1602 bp, synthetic construct
  misc_feature 1..1602: note = Description of Artificial Sequence: Synthetic coding sequence
  source 1..1602: mol_type = other DNA
atggccaagagcaagaccaagcaccggctgtgcagccaggagagctccgtgtccgcactcctcgcctcatgcacactctcaggtagtaattcctcaaattcggacggtagcttccactacaaagacaaactgtataggtcggcaagtcaggcactgcaggcgtatatcgatgattttgacttgggtcagatttacccaggggcatctacaggcaaaatcaatattgacgaggacttcactaacatgtcccaattttgcaactacatctataaacccaataatgctttcgaaaaccttgaccataaaaaacactcaaattttataagctgcagaagacacaccgttaatgatattgactcaatgtccctcacgactgacgatctcttgcgcctccccgctgacgggtctttttcgtatacctatgtaggcccttctcaccggactagtaagaagaacaagaagtgccgcggacggctagggagtctagacatcgagaagaacccccacttccaggggccatatacctccatggggaaggataatttcgtaacacccgtaatcaggagcaatatcaacgggaagcagtgcggacgcctgaaaaaccccaagctcatgaatcgaacaaataactgtatcagtgagagcagcctcagctttcctaaaaagtcctcattcaaggacagctctgagcactcattagaaaaaaactatcctcgatggctgacatcccagaagagcgatctaaacgtttctggcataacatcaatcccagacttcaagtaccctgtgtggctccacaaccaggacctgttgccagatgctaactctcagagagtgtatcagatttttaaagacgatcagtgcagtccacgtcatagtcatcaggctcagggcacatcgcgtctgattaacaagctggattgttttgaatatgcctttgaaccctctaacttttctaatagcctcagcgacgacaaggaactagtcaatgaatataaatgcgactttgaacactctcagtgccagtgcgagaatcctctgttaccagggcagagcaccaagcccttttccggcgataaaattgaactgctcattctgaaagcaaagcgtaacctggagcagtgcaccgaggaactccccaaaagcatgaaaaaagatgactcaccctgctctctggacaaattagaggctgacaggtcttgggaaaacattccagtgacctttaagtcacctgtgcctgtgaacagcgatgatagcccacaacagacttcccgcgctaaaagcgcaaagggagttctggaagactttctgaataatgacaaccagagctgcaccctgagtggcgggaagcaccatgggccagtggaagctctcaagcaaatgctttttaacttgcaagccgtgcaagagagattcaatcaaaataagactaccgacccgaaggaagagatcaaacaggtaagcgaggatgatttctctaaattgcaattgaaggagagcatgattcccatcactaggtcccttcagaaagctctacaccatctgtctagactgagagatctggtcgacgacacgaatggggagaggagtccgaagatgtag

SEQ ID NO: 183036 - DNA, 522 bp, synthetic construct
  misc_feature 1..522: note = Description of Artificial Sequence: Synthetic coding sequence
  source 1..522: mol_type = other DNA
atggccgcccccagcggcggctggaacggcgtgggcgccagcctgtgggccgccttgctcctgggcgctgtagctctccgtcccgccgaggccgtcagcgagcctactacggtggcttttgatgtgaggcctggcggtgtggtgcactccttttcccacaatgtcgggcccggagacaagtacacatgcatgttcacatatgcctcccagggcggaactaacgagcagtggcagatgtcactgggcaccagtgaggatcatcagcacttcacttgcaccatctggcggccccaaggaaagagctacctctattttacgcagttcaaggcagaggtcagaggtgccgaaattgaatacgccatggcctactccaaggccgcttttgagagggagagtgatgtacccttgaagactgaggagttcgaggtgactaaaaccgccgtcgctcaccggccaggcgcattcaaggctgaactgtcaaagctggttatcgtcgccaaagccagccgtaccgagctgtag

SEQ ID NO: 183037 - DNA, 426 bp, synthetic construct
  misc_feature 1..426: note = Description of Artificial Sequence: Synthetic coding sequence
  source 1..426: mol_type = other DNA
atgaccatcatggtggaggacatcatgaagctgctgtgcagcctgtccggcgagcggaaaatgaaggcagccgtgaaacactccgggaagggagcactggtaacgggagctatggcgttcgtcggagggctggtgggggggcctcctggtctggccgtcggcggcgccgtaggaggactccttggggcctggatgacttctggacagttcaaaccagttcctcagatcctgatggagctgcccccagctgaacagcagaggctctttaatgaggccgctgcaatcatccgccatctggagtggacagatgcagtccaactcaccgcgctcgtgatgggaagcgaagcacttcagcagcagctgctggccatgttagtgaattacgtaactaaggagctcagggccgaaatccagtacgatgattag

SEQ ID NO: 183038 - DNA, 324 bp, synthetic construct
  misc_feature 1..324: note = Description of Artificial Sequence: Synthetic coding sequence
  source 1..324: mol_type = other DNA
atgaccatcatggtggaggacatcatgaagctgctgtgcagcctgtccggcgaacgaaagatgaaagccgccgttaaacatagcggcaaaggggcgctggtgactggcgcgatggcatttgtgggaggcctcgtgggaggacctcccggtctggcagtgggcggtgccgttggcgggctgcttggcgcctggatgacttccggccagttcaaacctgttcctcagatactgatggagttgcctcctgccgagcagcagcggttattcaatgaagccgctgccattacacgtccctgttcctcctcatgctggccctgctggtag

SEQ ID NO: 183039 - DNA, 459 bp, synthetic construct
  misc_feature 1..459: note = Description of Artificial Sequence: Synthetic coding sequence
  source 1..459: mol_type = other DNA
atggagcggctgaagagccacaagcccgccaccatgaccatcatggtcgaggacattatgaagctgctgtgttccctctccggggaacgcaaaatgaaggctgcggtcaagcacagcgggaagggggctctggtcacaggagcaatggcatttgttggaggcttggtagggggccccccggggctggccgtggggggggcagtggggggcctgttaggggcctggatgaccagcggacaattcaagccggtgccacagattctgatggaattgccaccagcggaacagcaacgcctcttcaacgaggccgcagcaatcatacggcatcttgaatggacggatgcagttcaactcacagcactggttatgggaagcgaagctcttcagcagcagctgctcgcaatgctggtcaattatgtgacaaaagagctccgcgcggaaatccagtacgatgattag

SEQ ID NO: 183040 - DNA, 648 bp, synthetic construct
  misc_feature 1..648: note = Description of Artificial Sequence: Synthetic coding sequence
  source 1..648: mol_type = other DNA
atggagaagaacccccccgacgacaccggccccgtgcacgtgcccttgggacacattgtggctaacgaaaagtggaggggtagccagctggcccaggaaatgcaggggaaaattaaactgatcttcgaagatggattgacacccgacttctacttaagcaacaggtgttgtattttatatgtcaccgaggccgacctcgtcgcaggaaatggctaccgcaagcgactggtgcgagtaaggaatagtaacaacctcaagggaatcgtggtggtagagaagacacggatgtccgagcaatatttccccgccctccagaagttcaccgtactcgatctcgggatggtgctgctgccagtggccagccagatggaggcctcatgtctggtgattcagctcgttcaggagcaaaccaaagagccaagcaagaacccactgctgggaaagaaaagggcactgttgctgagcgagcccagtctgttacggacagtgcaacaaatacccggcgtgggtaaagttaaagcacccctgctgctacaaaagttcccaagtatccagcagttgagtaatgcatctatcggtgagctggaacaagtcgtcggacaggctgtggcccaacagatccacgcttttttcacacagccaaggtag

SEQ ID NO: 183041 - DNA, 648 bp, synthetic construct
  misc_feature 1..648: note = Description of Artificial Sequence: Synthetic coding sequence
  source 1..648: mol_type = other DNA
atggagaagaacccccccgacgacaccggccccgtgcacgtgcccctcggccatatcgtggccaacgaaaaatggaggggcagtcagctggcacaagagatgcaaggtaaaattaaattaatatttgaggatggattgactcccgatttttacctgtctaatagatgttgcattctgtacgtgacagaagctgatctcgtcgccggcaacggctatcgaaaacggctggtgagggtacggaatagcaataaccttaagggcatagtcgttgttgaaaaaaccaggatgagcgagcaatatttcccggcactacagaaattcacagtgctcgatctgggaatggtgctgttgcccgtggcttcccagatggaggccagctgtttggtgattcagctggtccaggagcagaccaaggagccttcaaaaaacccactgttaggtaaaaaacgggctctcttgcttagcgaacctagcctgctgcgaacagttcagcagattccaggcgtgggcaaagtgaaggctcccctacttcttcagaaatttccctccatccagcagcttagtaatgcctctattggcgagcttgagcaggtcgtcggacaggcagtggctcaacaaattcatgcatttttcacccaaccccgctag

SEQ ID NO: 183042 - DNA, 1227 bp, synthetic construct
  misc_feature 1..1227: note = Description of Artificial Sequence: Synthetic coding sequence
  source 1..1227: mol_type = other DNA
atgagcgagcacgtggagcccgccgcccccggccccggccccaacggcggaggcggcggacccgctcccgcccgggggcctcgcactcccaacctgaatccgaaccctctgatcaacgtgagagatagactctttcatgctttgttcttcaaaatggctgttacctatagcaggctgttcccaccagcgtttaggagactgtttgaatttttcgtacttctcaaggcccttttcgtcctgtttgtgttggcctatatccacattgtgtttagtcgcagtccaatcaattgtcttgagcacgttagggataagtggccgcgcgaggggatcttacgggtcgaagttaggcacaactccagccgcgctcccgtgttcctgcagttctgtgattccgggggtcgcggctcattcccgggacttgctgtcgagcccgggtccaacttggacatggaggatgaggaagaagaggagcttactatggagatgtttggcaatagcagcattaaattcgaactggacatcgagcccaaggtcttcaagcctcccagctctacagaagccctgaacgactcacaggaatttccttttcctgagactcctaccaaagtttggcctcaggatgagtacatagtggaatattccctggagtatggtttccttcggctgagtcaagccaccagacagcgcctgagcattcccgtgatggttgtgactcttgacccaaccagggaccagtgcttcggtgaccggttcagcaggctcctgctggatgagtttctgggctacgacgacatactgatgtcatctgtgaagggattggccgaaaatgaagagaacaagggattcctgcggaacgtggtgtccggcgaacattatcggtttgttagcatgtggatggcgcgtactagctatctggcagcattcgccattatggtcatctttaccctgtcagtctctatgctgctgaggtacagtcatcatcaaatcttcgtgttcattgtggatctgctccaaatgcttgaaatgaatatggccattgctttccctgctgcgcccctcctgacagtgattctggctctggtcgggatggaggccatcatgtctgaattcttcaacgacacaactaccgccttttatattatacttattgtttggctggccgaccagtacgatgccatctgttgccacaccagtacttcaaaaagacattggctccgtattccttag

SEQ ID NO: 183043 - DNA, 1863 bp, synthetic construct
  misc_feature 1..1863: note = Description of Artificial Sequence: Synthetic coding sequence
  source 1..1863: mol_type = other DNA
atgagcgagcacgtggagcccgccgcccccggccccggccccaacggcggcgggggcggccctgcccccgccagaggtcctaggacccctaacttgaacccaaatccactgatcaacgtgagagatcgcctctttcatgcccttttctttaagatggctgttacatatagtagattgttcccccccgcttttcgtcgccttttcgaattttttgtactgttgaaggctctattcgttctgttcgttcttgcctatatccacattgtgttctctaggagccccattaactgcctagagcatgtcagagataagtggccacgagagggtattctgagggttgaggtccggcacaattcttcaagagccccagtgttccttcagttttgtgattcaggcggtcgtggctccttcccaggactcgccgttgaaccaggctctaacctggacatggaggatgaagaggaagaggaactgacaatggaaatgttcggaaacagcagcatcaaattcgaattggatatcgagcctaaggtgttcaagccaccctcctcaacggaagctctcaacgattcccaagagtttcctttccccgagacccctacgaaagtgtggccccaggacgagtatatcgtcgagtacagcctagagtatggattcttgcggctaagccaagccactcggcagcggttgagcattccggtgatggtagtgactctcgatccaacgcgggaccagtgttttggtgacaggttttcacgcttgttacttgacgagttcctggggtatgacgatatactgatgtctagtgttaaaggcctggctgagaatgaggagaacaaaggatttctcagaaacgtggtctctggtgaacattataggttcgtgtcaatgtggatggcgcgcacctcctacttagctgccttcgccattatggtcatcttcaccctgagcgtgtccatgctgctccgctatagccatcatcagatttttgtcttcatagtggatcttctacagatgctggaaatgaacatggccatcgcgtttccggccgctcccctgctaaccgtcatcctagcactcgttggcatggaagccataatgagtgagttttttaacgatacaactaccgcattctatattatcttaattgtatggctggcagaccaatacgacgcaatctgttgtcataccagcacatcgaagcgccattggctgagattcttttatctctaccacttcgccttctacgcttaccactatagatttaatgggcagtattcctccctcgcactggtgacatcctggttgttcattcaacactcaatgatctacttttttcatcactacgagcttccagccatcctccaacaggtgcggatccaggaaatgttgctccaagcccccccgctaggccctggaacccccactgcactgccagacgacatgaataataactccggcgcgcccgctaccgcccctgactccgctggccagccacctgcactgggacccgtgtccccaggcgcctctggcagcccggggccagtggcggctgcaccaagttctctggtcgcggccgcagcgtccgttgctgccgccgctgggggcgatctgggatggatggccgaaactgccgcgattattaccgacgcctcctttctcagcggactatctgcttctctgctggagagacgtccagccagccctctggggcccgctggggggctgcctcacgcaccccaggattcagttcctccttcagactccgccgctagcgatacaactcccctcggcgctgcagtgggcggtccctcgccagcatcaatggcaccaaccgaggcaccttccgaagtcggcagctag

SEQ ID NO: 183044 - DNA, 447 bp, synthetic construct
  misc_feature 1..447: note = Description of Artificial Sequence: Synthetic coding sequence
  source 1..447: mol_type = other DNA
atggccgccagccccgcccggcccgccgtgctggccctgaccggcctcgcattgttgctccttctgtgttgggggccggggggcatttctggcaataaactcaaactcatgctccaaaagagagaagcccctgtaccaaccaagaccaaagtagccgtggatgaaaacaaagccaaggagtttttggggtcgctcaagagacagaaaaggcagttgtgggatcgcactaggcctgaagtgcagcagtggtatcagcagttcctgtacatgggcttcgatgaggccaaattcgaggacgacatcacctattggttgaaccgcgataggaatggccatgagtactatggcgattactatcaacggcattatgatgaggacagcgccattggcccgcgatctccttatggttttagacacggagcctctgtgaactacgatgattactag

SEQ ID NO: 183045 - DNA, 2964 bp, synthetic construct
  misc_feature 1..2964: note = Description of Artificial Sequence: Synthetic coding sequence
  source 1..2964: mol_type = other DNA
atgacccccgccctgcgggaggccaccgccaagggcatcagcttctcgtcattgccatcgaccatggaatccgataagatgctttacatggaaagccctcggaccgtggatgagaaactgaagggcgatacattcagtcagatgctcggtttccctacaccggagccgacactcaataccaacttcgttaatctgaagcacttcgggtccccccagtcatctaagcactaccagactgtgttcctaatgaggtccaatagcactcttaacaagcacaacgaaaattacaagcagaaaaagctgggcgaacctagttgcaacaaattgaaaaacatcctatataatggttccaatatccagttgagcaagatttgcctgtcgcattctgaggaattcatcaaaaaagagccattatctgacaccacttcccaatgcatgaaagatgtacaaatcatcctggactcaaatatcactaaagacaccaacgtagataaggtgcaactgcagaattgcaaatggtaccaggagaacgcactgctcgataaggtcaccgacgccgaaattaaaaagggcctgcttcattgcacacagaagaagattgtgccgggtcactccaacgtgccagtgtcgtctagcgccgcagaaaaggaggaagaagtgcatgcgaggttgctccactgtgtttccaaacaaaagattcttttaagccaggccagaaggacccagaagcacctgcagatgctgttggccaagcacgtcgtcaagcactatggtcagcagatgaaactcagcatgaagcatcagcttcccaaaatgaagacttttcacgagccaaccactatccttggtaacagtcttcccaaatgtaccgagattaagcccgaagttaacaccctgaccgccgaaaacaaattatgggacgacgctaaaaatggttttgcacgctgtacagctgccgagatccagaggtttgctttttccgccacaggactgttgtcccacgtcgaggaaggcctagattccgacgccacagactcctcttcagacgatgacttggacgagtacaccctcagaaagaacgtcgcagtgaactgctcaacagaatggaagtggctggttgaccgcgcccgagttgggtcaagatggacatggctgcaggcccagatttctgaccttgagtgtaagattcaacagctgacggacatccatcggcagatacgagccagtaaagggatagtggtcctcgaggagtgtcagctgcctaaggacattttgaagaagcagatgcagttcgctgaccaggcggcttctttgaacatcctgggcaatcctcaagtgcctcaggagtgccaggacccagttcctgagcaagattttgaaatgagtccttccagtcccactcttttattacgcaacattgagaagcaatctgctcagttgacagaaattataaattcactgatcgcccctctcaacttgagccctacctcctcacccctgagttccaagagctgcagtcataagtgtctagctaatggaatctaccggtcagcctccgaaaatctggatgaactcagctcatcttccagctggcttttgaatcagaagcacagtaagaagaagcggaaggatcgaactaggcttaagagtagcagtctcacattcatgagtactagcgccagaacacggccactgcaaagctttcacaaacggaagttatacagactgtccccaaccttctattggactccacaaacgctaccttcgaaggaaacagcttttttgaatactacccagatgccatgcctccagtccgcttcaacctggtcttcttatgagcataacagcgaatcttatctcttacgtgaacacgtctctgaactggatagctcattccacagtgtgcttagcctgccgtcagatgtgcctctgcattttcacttcgaaacgctgctgaagaaaaccgaaatcaagggaaacctggccgaaaacaaatttgtggatgaatacatcatcagcccatctcctgtacattccaccctcaatcagtggaggaatgggtattccccaatatgcaagccacaaatccgctccgagagcagtgcccagttgctacaagggcgaaagaaacgtcatctctcagagacagcgctgggggagaggaccaagctggaagagtccgatttccaacacacagaatcaggtagccattcaaatttcacagcggtgagtaacgttaatgttctgagtcggatccaaaactcaagcaggaacaccgccaggagacgactgagaagtgaaagttcctatgatatagataacatcgttatacccatgtctctcgtcgcccctgccaagctggaaaagctgcagtacaaggagatcctgaccccgagctggaggatggtggtcctgcaacccttggacgaatataaccttggcaaagaggagatcgaagatctatctgatgaagtctttagcttgcgccataaaaaatacgaggagagggaacaggctcgctggagcttgtgggaacaatcaaagtggcatcggcgaaattcaagagcttactcaaagaacgtagagggccaggacctgctgttgaaggaataccctaataatttctcttcatcccagcaatgcgccgctgcctccccacccggacttccttcagaaaaccaggatctgtgcgcgtacggcctgccctcgctgaatcagtcccaggagactaaatctctctggtgggaacgccgcgcctttcccctgaaaggcgaggacatggccgcactgctttgtcaggacgagaaaaaggatcaggtggagagaagcagcacagcctttcacggcgaaatcttcggtacatccgttcctgaaaacggacatcacccaaaaaagcagtcagatggcatggaagaatataagaccttcggcctgggcctaactaatgtgaagaaaaatcgatag

SEQ ID NO: 183046 - DNA, 687 bp, synthetic construct
  misc_feature 1..687: note = Description of Artificial Sequence: Synthetic coding sequence
  source 1..687: mol_type = other DNA
atgagctacgccgagaagcccgacgagatcaccaaggacgagtggatggagaagctcaacaacctccacgtgcagcgtgccgatatgaatcgactgattatgaactatttagtaactgagggcttcaaggaggccgcggaaaagttccgaatggaatcaggaatagagccgagtgtcgatcttgagacactggatgagagaattaagattcgagaaatgatcctgaagggacagattcaggaggctattgcccttattaacagtcttcaccctgagttgctggatactaaccggtacctgtacttccacttgcagcagcagcatctgattgaactgatacgccagagggagacagaagcagctcttgagtttgcccagacacagctggctgaacaaggagaagaatcaagggagtgtctgacagagatggagcgtaccctcgcccttctggcgttcgactccccagaggaatctccatttggggacctgctgcacacaatgcagaggcaaaaagtatggagtgaggtgaatcaagctgtgctggactatgagaatagagagtctaccccaaaactcgcgaaactgttaaagcttctgctgtgggctcagaatgaactcgatcagaagaaggtcaagtatccaaaaatgacagatttatctaagggcgtgattgaagagcccaagtag

SEQ ID NO: 183047 - DNA, 468 bp, synthetic construct
  misc_feature 1..468: note = Description of Artificial Sequence: Synthetic coding sequence
  source 1..468: mol_type = other DNA
atgagctacgccgagaagcccgacgagatcaccaaggacgagtggatggaaaagttgaataatctgcacgtgcagagggccgatatgaatagactcattatgaattacctagtcacagagggttttaaggaggccgccgagaagttccgaatggagtcgggtatagagccctccgtcgatctggaaactctggatgagcgaattaagatcagggaaatgatcctgaagggccagattcagcaggtggtgcatgattgttggcgaaaggagcgggtatttatactcagcgacctcccatcttctattagcgccgcaagccacccgcccagttctgccggctctgcagacgtactcctgctgttcacccacaggactgtcccttgttccgtggtcgggcgtcgcgaggtggtgcaggggtgcgtccactgtctgagagtcggtacagttgacggccatatggcgctgtag

SEQ ID NO: 183048 - DNA, 3534 bp, synthetic construct
  misc_feature 1..3534: note = Description of Artificial Sequence: Synthetic coding sequence
  source 1..3534: mol_type = other DNA
atggacgtgtaccccccccggcggcagggcctgccccgggcccggtcacctgggggaagttcacggggctctccttcggtttcatgctccaggctgcggcaggtgcagtcgatattgacccagagcagcaagtcgagacctgatggcattctgtgtatcctcgggattgacagccgctataacgaagggtgccgggaattggcaaattacctcttgtttggactttacaatcaaaatactagtgacttcgaaaaaacaggattctccgaagaggtcctggacgatgtaataattctgatcaaaagcgactccgtacacctgtactgcaaccccgtgaacttcaggtacctcctcccttatgtggctcactggagaaatctacattttcactgcatgacagaaaacgagtatgaggacgaggaagcagcagaagaatttaagataacaagctttgtggatatggtgagggactgcagcaggattggaatcccctattctagccaaggtcatctgcagatctttgatatgtttgttgtcgagaaatggccaattgtgcaggccttcgcactggaaggaattggaggagatggcttcttcactatgaagtacgaattgcaagacgtgagcctcaatctgtggaatgtgtacagcaagatggatcctatgtccctagagtccctgctcagcgatgatctcgttgcattcgaacatcagtggacatccttttttgccaactttgacactgaaattccattcttactggaacttagtgagagtcaggcaggcgaacccttcaggagttactttagccacgggatgatttcaagccatattactgagaacagccccaaccgccaaccttttgttctgtttggcaatcacagcacccgggaaaatcttaatgctggcaacttcaattttcctagtgaagggcacctcgtccgcagtactggacctggtggtagcttcgctaagcacatggtcgcccagtgtgtcagcccgaaaggccctctcgcttgtagccgtacctactttttcggcgccacccacgtaccttatttggggggcgatagtaaactgccaaagaagacagaacagatccgtcttctgtcacagatttacgcagcggtgatcgaggcagtgctggccgggatcgcctgttacgccaaaacctcttccttgactaaggccaaggaggtcgctgaacagacgctgggatcaggcctggactcctttgaattaattccttttaaggcagccctgcgaagcaaaatgacgttccatattcatgctgtaaataaccaaggaagaatagtcccactggattcggaagatagtttatcctttgttaagaccgcctgtatggctgtgtatgatatcccagacctgctaggcgggaacggttgcctcggatctgtggtgttttccgagtcattcctcacctcccagatcctggtaaaagaaaaggatggaacggtaacaacggagacctcatcagttgtgctaacggcagcggtcccacggttttgttcttggttagtagaggacaatgaggtcaagttatcagaaaagactcagcaagccgttcggggtgacgaaagctttctgggaacctatctgactggaggcgaaggagcgtatctgtactctagcaatctgcagtcctggccggaggaagggaacgttcattttttcagctccggcttgctgtttagtcattgccgacaccgctcaattatcatttcaaaggaccacatgaattctatatctttttatgacggtgattccacatctaccgtggctgctcttctgattgattttaaatcatcactgcttcctcatcttcctgtgcactttcacggatcctctaacttcctgatgatcgctttgtttccaaaatctaaaatataccaggctttctacagcgaggttttctctttgtggaaacagcaggataacagcggaatcagtctcaaagtgattcaagaggatgggttgtctgtggagcagaaacgcctccatagctcggcccagaaattgtttagcgccctgagccagccggccggcgagaaacgttcttccctgaaactactgagcgccaagctgcccgagctggactggtttctgcagcacttcgctataagctcaatttctcaggagcctgttatgcgaacacatctgcccgttttgctacagcaggccgagattaacaccactcatcgaattgagtcggataaagtgattatctctatcgtgaccggcctccccggctgtcatgccagtgaactgtgcgcattccttgttactttgcacaaagaatgtggcagatggatggtgtacaggcagatcatggacagttccgaatgctttcacgctgcccacttccagagatacctctcttcagcgctcgaagcgcagcagaaccggtctgcacggcagtcagcttatatccgtaagaagacaagacttctcgtcgtgcttcagggctacaccgatgtcatagatgtggtgcaggcccttcagacccacccagatagcaatgtgaaggcctccttcaccattggcgcgattacagcttgtgttgagccaatgtcctgctacatggagcacaggtttctcttccccaaatgcctggaccagtgtagccagggactcgtctccaacgtggtatttacctcacacactacggaacagcggcaccctcttctagtgcagctgcagtccctcatccgcgccgcaaatcccgcagcggcctttatactggccgagaacggcatagttactcggaacgaagatatcgaactcatcctctccgagaattctttcagctccccagagatgctcaggtctcgctacctgatgtaccctggctggtatgagggcaagctgaatgccggcagcgtgtatcccctgatggtccaaatttgtgtgtggtttggacggcccctggagaagacacgatttgtcgcaaaatgtaaggcaatccaaagttcgatcaaaccctcaccattttccgggaatatttatcatatcttgggaaaggtaaaattttccgattcagaacgcactatggaggtatgctataacaccctggcgaactcgctgagtattatgcccgtgctggagggccctacgccaccaccagacagcaagagtgtctcccaggattctagcggtcagcaggaatgttacctggttttcatcggctgcagcctgaaggaagattccatcaaagactggctgcggcagagcgctaaacagaaacctcaacgcaaggctttaaagactagaggaatgctgacgcaacaggaaattcgctccatacacgtgaagcggcacttagaaccactccctgcaggttacttttacaacggcacccaatttgtgaatttttttggcgacaaaaccgacttccacccgttaatggaccaattcatgaacgattacgtcgaggaagcaaatagagaaatcgagaagtataatcaggaattggagcaacaggagtaccatgacctttttgagttaaagccctag

SEQ ID NO: 183049 - DNA, 1488 bp, synthetic construct
  misc_feature 1..1488: note = Description of Artificial Sequence: Synthetic coding sequence
  source 1..1488: mol_type = other DNA
atggagggctgcctgggccaggagctgttcagcaaccacatgttcctgacatccttatctagtccgaacagacagccctttgtgctgtttggtaaccactcaacccgggaaaatctcaacgctgggaatttcaatttccctagtgaggggcaccttgtgcgcagcacaggcccgggcgggagtttcgctaagcacatggtcgcgcagtgcgtgagtcctaaaggccccttagcctgttctaggacttacttcttcggcgctactcacgtcccttacttgggtggggacagcaagctgcccaagaagaccgagcagatgttattatctcagatctatgccgccgtaattgaggcggtgttagcagggatcgcttgctacgctaaaacctcctcattgaccaaggccaaagaggtggcagagcagaccctgggcagtggcttagactcattcgagctcattcccttcaaggctgctttaaggagcaagatgacatttcacatccacgctgttaacaatcaaggaaggatcgtgcccctcgattccgaggattccctatccttcgttaagacagcgtgtatggccgtttatgacattccagatttgctgggagggaatgggtgtctggggtccgtcgtatttagcgagtccttcctgacctcccaaatcctggtcaaagaaaaggacggaaccgttacaaccgagacctccagcgtggtcttgaccgccgccgtgcctaggttttgttcttggctggtggaggacaacgaggtgaagttgagcgaaaagacgcagcaggccgttaggggggacgagtccttcctgggcacatacctgacaggaggtgagggcgcttatctgtactcctccaatcttcagagttggcctgaggaaggcaacgtccattttttttctagcgggctcttgtttagtcattgtcggcaccgaagcatcataatcagcaaggatcacatgaactctatcagcttttacgacggtgattcgacctccactgtggcagcccttttaattgacttcaaatcatccctgttacctcatctgcccgttcacttccatgggtctagcaatttcttaatgattgcccttttcccaaagtccaagatctatcaggccttctacagtgaagttttcagcctctggaagcagcaggacaactccggcatatctcttaaggttatacaggaagacggactgagcgtcgagcagaaaagactgcactcatctgcccagaaactgtttagcgccctgtcacaacctgcgggagaaaagaggtccagcctaaaactcctgtctgcaaaattacccgaactcgattggtttttgcagcactttgccatatctagcatttctcaagagcccgtcatgaggacacatttgcccgtgttgctgcagcaggctgaaattaacaccacacatagaatcgagagcgacaaaatggacggcgtttctccaaaccatggacagttgtag

SEQ ID NO: 183050 - DNA, 615 bp, synthetic construct
  misc_feature 1..615: note = Description of Artificial Sequence: Synthetic coding sequence
  source 1..615: mol_type = other DNA
atgggcgaggccgaggtgggcggcggcggcgccgccggcgacaagggacccggcgaggccgctacctctccagcggaggagaccgtcgtttggagtccagaggtggaggtgtgcctttttcatgccatgctggggcataaacctgtgggagtaaacagacatttccatatgatttgcatccgggataagttttcacagaacattggtagacaggtacctagcaaagtcatttgggaccacctgagcacaatgtacgacatgcaggcacttcacgagtctgaaatcctgcccttcccaaacccagaaaggaactttgttctccctgaagaaatcatccaggaagtgagggagggcaaagtgatgatcgaggaagaaatgaaggaggagatgaaagaggacgtagacccacataacggcgctgacgacgtgttttcttcctcagggtccctaggcaaggctagtgagaagtcaagtaaggacaaggagaagaattcctctgatctagggtgtaaggagggtgccgacaagagaaaacggtcccgggtgacggacaaggtactgacggctaacagtaatcctagtagtccttcggctgccaagcggaggagaacctag

SEQ ID NO: 183051 - DNA, 1278 bp, synthetic construct
  misc_feature 1..1278: note = Description of Artificial Sequence: Synthetic coding sequence
  source 1..1278: mol_type = other DNA
atgtaccccagcaacaagaagaagaaggtgtggcgggaggagaaggagcgcttgctgaagatgaccctagaggagcgccggaaagagtacttgcgggactatatacccctgaattctatactgagctggaaggaagaaatgaagggcaaaggacagaatgacgaggagaacacccaggaaacctcacaggtcaaaaaatccttgaccgagaaagtgtccctctacaggggtgacattactctgctggaggtggacgcgatcgtcaacgcggctaatgcgtctctactgggcggtgggggtgtggatgggtgcattcatagagccgctggcccttgccttctggctgagtgtcgcaacctgaacggctgtgatacaggccatgcaaagatcacttgcggatacgatctgcctgcgaagtacgtcatccataccgtgggccccattgctagagggcatatcaatggctcacataaagaagatctggccaactgctacaagtcctccctgaagttagtcaaggagaataatattcgtagcgtagcattcccatgtatctccacgggcatatacggcttccctaacgagccagccgctgttatcgccttaaatactattaaagaatggcttgccaaaaatcatcacgaggtcgacaggatcatattctgcgtgtttctcgaagttgatttcaaaatctacaaaaaaaaaatgaacgaattcttctccgtcgacgacaacaatgaggaggaagaggatgttgaaatgaaggaggattcagatgagaatggccccgaagagaaacagtcggtggaagaaatggaggagcagtctcaggacgctgacggcgtcaacactgtgacagtgcccggtccagcttcggaagaggcagtggaagattgtaaggacgaagattttgccaaggatgagaacataacaaaggggggcgaagtaacggaccattcagtgagagaccaggaccatccagacgggcaggaaaatgacagcaccaagaacgagatcaaaatcgagaccgaaagtcagtccagctacatggagaccgaggaattgtcctcaaaccaggaggatgccgtaatcgtcgagcaacctgaggtaatcccactcactgaggaccaggaggagaaagagggagaaaaagcacccggagaggacacccctaggatgcccggcaaaagcgagggatcctctgacctagaaaacacacccggcccagatgcaggagctcaagacgaggccaaagagcaaaggaacggcaccaaatag

SEQ ID NO: 183052 - DNA, 1248 bp, synthetic construct
  misc_feature 1..1248: note = Description of Artificial Sequence: Synthetic coding sequence
  source 1..1248: mol_type = other DNA
atggccttcctgatgcacctgctggtgtgcgtgttcggcatgggcagttgggtcactatcaatggtctgtgggtggagctacctttactagtgatggaactgccagaggggtggtatctgccctcctacttaacagtagtgatccagctggcgaacatcggacccctcctggtgaccctcctccaccatttccgtcctagctgtctcagcgaagtgcccatcatctttaccctgctgggtgttgggaccgtcacttgcatcatattcgccttcctatggaacatgaccagctgggtcctagacggccaccacagcattgcgttcctcgtgttgacattctttctcgccctagtggattgcaccagctctgttacttttctcccttttatgtcacggctgcccacgtattacttgaccacattctttgtgggcgaagggctgtctgggcttctgccggccctggtggcacttgcacagggatcaggactgactacctgcgttaatgtgactgaaataagtgatagtgtcccgtccccagtccccacgcgtgaaactgatatcgcccaaggcgtgcccagagctcttgtgagcgctctgcctggcatggaggctccgctgtctcacttggagtccagatacctgcccgcacacttcagtcccctagtgttttttcttttgctctctataatgatggcttgctgcttggtggctttctttgtcctccagagacagccaagatgctgggaggccagtgtagaggacctgctcaacgaccaagtgactctgcattcaattcgtccacgagaagagaatgatctcgggcccgctggaactgtcgactccagtcaaggacagggctatcttgaagaaaaagctgccccttgctgccctgcacatcttgcatttatttataccctggtcgccttcgtcaacgcgttgaccaatgggatgcttccaagcgtgcagacttacagctgtctgagctatggtccagtagcatatcacctcgctgccactttatcaattgtcgctaatcctctggcgagcctggtgagcatgtttctccccaaccgctcactgctgtttctcggcgtactgagcgtgctcggcacctgctttggtggttacaatatggcaatggccgttatgagcccttgtcctctcctccagggtcattggggaggcgaagtgttgatcgtatctatcagaccggtggggctgcttccacttcgaacgccacacccctag

SEQ ID NO: 183053 - DNA, 1038 bp, synthetic construct
  misc_feature 1..1038: note = Description of Artificial Sequence: Synthetic coding sequence
  source 1..1038: mol_type = other DNA
atgctgcggcccgccggcctgtggcggctgtgccggcggccctgggctgcgcgcgttccggctgaaaatttgggcagaagagaggttaccagcggggtctctcccagagggtctacaagcccccgcaccctgaatatcttcgaccgagacctgaagcgcaaacagaagaattgggctgcccgtcagcctgagccgaccaagtttgattacctgaaggaagaagtggggagtcggatagccgacagagtgtacgacatccctaggaacttcccactggctctggatttgggatgtggccgcggttacattgcacagtaccttaacaaggagaccattggcaaattttttcaggctgacatcgccgagaatgcacttaagaactcttcagagactgagatccccaccgtgtccgtgttggccgacgaagaattcctgcccttcaaagagaacactttcgatttggtggtttcgtctttatccctgcactgggtcaacgatctgcccagggcactcgaacagatacattatatcctgaaacccgatggagtgttcataggcgccatgttcggaggagacacactgtatgagttgaggtgctccctgcagcttgcagaaacggaaagggagggcggtttcagtccgcatatctctccattcaccgccgtgaacgacctgggacatctgcttgggcgcgccggcttcaacaccctcaccgtggataccgacgaaatccaggtgaactacccaggcatgtttgagcttatggaggacctccaaggaatgggagaatccaactgcgcatggaataggaaggctctgctccatcgtgacacaatgctagccgccgcagccgtctacagggagatgtatcgcaacgaagacgggtcggtgcctgctacttatcagatatactacatgattggatggaagtatcacgagtcccaagctagacctgcggagagaggaagcgccaccgtgtccttcggggaattgggcaaaatcaataatttgatgccacccggcaagaagtcacaatag

SEQ ID NO: 183054 - DNA, 954 bp, synthetic construct
  misc_feature 1..954: note = Description of Artificial Sequence: Synthetic coding sequence
  source 1..954: mol_type = other DNA
atgctgcggcccgccggcctgtggcggctgtgccggcggccctgggcagcccgggttcccgccgagaatcttggcaggcgggaggtgacaagtggcgtatcacctagaggaagcaccagccctaggactctcaatatttttgacagagatctgaagcggaaacagaagaattgggccgctaggcaaccagaaccgacgaaatttgactatttgaaagaagaggttggttcccgtatcgcagacagagtgtatgacattccccgcaactttccactcgcactggacctggggtgcggaaggggctacatagctcaatatctgaataagctgcaactgttccattgccggaagcttttggaatctttcagcaagctgacactccagaagatgttgtgcctgcactgggtgaatgatctgcctagggccctcgagcagatccattacatcctcaagccagacggagttttcatcggagcaatgtttggtggcgacactctgtacgagctccgttgcagtctgcagctcgccgaaaccgagcgcgagggaggattttctcctcacatatccccttttaccgccgtgaacgacttggggcaccttttggggcgagcgggttttaacacgttgactgtggatacagatgagattcaggtgaattaccccggaatgttcgagctcatggaggatctacagggcatgggcgagagtaattgtgcgtggaatcgaaaagcacttctgcatagggacacgatgctcgccgccgccgccgtttatcgtgaaatgtaccgaaatgaagatggctcagtaccagctacataccagatctactacatgatcggatggaagtaccatgaaagccaagcccggcccgccgagcggggatccgccaccgtcagcttcggcgagttagggaagatcaacaatctgatgccaccagggaagaaaagtcagtag

SEQ ID NO: 183055 - DNA, 804 bp, synthetic construct
  misc_feature 1..804: note = Description of Artificial Sequence: Synthetic coding sequence
  source 1..804: mol_type = other DNA
atgctgcggcccgccggcctgtggcggctgtgccggcggccctgggctgccagagtacccgcagaaaatctgggtaggagagaggttaccagcggcgtgagcccgaggggttcaaccagtccaaggaccttgaacatttttgaccgagacctcaagcgtaaacaaaagaactgggccgctaggcaacccgagcccactaagtttgactatttgaaagaggaagttggatcccggattgcagatcgagtctacgatattccccggaactttccacttgccctggacctgggttgtgggcgcggttatatcgcccaatatctcaataaagagacaattgggaagttttttcaggctgacatcgcagagaacgccctgaaaaactctagtgaaacagaaataccgacagtgtctgttcttgcggacgaggaatttctgcccttcaaagagaataccttcgatcttgtggtgtcgtctctgagcctccattgggtcaacgatctgcctagggcgctggaacagattcactatatcctgaaacctgacggcgttttcattggggctatgttcggtggcgatacactctacgagctccgctgctctcttcaactggcagaaacggagagggagggagggttcagtccccacatctcaccctttactgcagtcaatgacctcgggcatctgctgggtcgggccggttttaacactctgaccgtcgatactgacgagattcaagttaattatcccggcatgtttgaactcatggaagatctccaggaacaaaagagccgtatgctcacatag

SEQ ID NO: 183056 - DNA, 771 bp, synthetic construct
  misc_feature 1..771: note = Description of Artificial Sequence: Synthetic coding sequence
  source 1..771: mol_type = other DNA
atgaagctgacccggaagatggtgctgacccgggccaaggccagcgagttacactccgtgcggaaactgaactgctggggttccagattgaccgatatcagtatttgtcaggagatgccatcccttgaggtgatcactctgtccgtcaattccatctcaacactggagccggtgagcagatgtcagcggctctccgagctgtatctcaggaggaatcggattcctagcttggcggaactgttctacctaaagggcttacctcgactgcgcgttctgtggctcgcagagaacccttgctgcgggactagccctcaccgatacaggatgacagtgcttcgtacactcccccggctgcagaaactcgataaccaggccgtgacagaggaggagctctcccgggcactttcagagggggaagagatcactgcggctcctgaaagggaaggaacaggccatggcggacctaagctgtgttgcaccctgtcatccttgtcctccgcagccgagacaggacgggatcccttggacagtgaggaagaagcaacctctggcgctcaggacgaacgggggctcaaaccaccatcccgaggccagttccccagccttagcgctagggacgcaagcagcagccaccgcgggcggaatgtgttgacagctatcctcctgctgctgagggagctggacgccgaaggtctggaagctgtgcagcaaactgtagggtcccgattgcaagcgcttagaggtgaggaggtgcaggagcacgcagagtag

SEQ ID NO: 183057 - DNA, 654 bp, synthetic construct
  misc_feature 1..654: note = Description of Artificial Sequence: Synthetic coding sequence
  source 1..654: mol_type = other DNA
gtgacccagggcccccagggcctgcgggccagcggccggagctgcgtcggaccatttttgtctcacctcgggagggatcgcacccctggcgtgctgaccgaattaaggtgcgtggtgcctgccaggctaaccgccctggagagatcaagaaagcctcgggggagagggagagggcggtatatcaccttgttacccgtacctgaggccgatcccattctggagcgtgtgccacagcctgaattctgctcttgtgtgaattccatatccactcttgaaccagttagccgctgccaaaggcttagtgagctctacttgaggcggaatcggatcccttccctcgccgagctgttctacttaaaaggtttgccgcgtctgcgtgtgctgtggctggcagaaaatccatgttgtgggaccagccctcataggtatcggatgaccgtcctgaggacacttccgcgccttcaaaagctggacaatcaggccgtaacagaggaggagctgtcaagagcactgagtgagggggaggagatcacagctgccccagaacgcgaaggcaccgggcacggagggcccaagctctgttgcacactatcaagtctgtcgtccgccgcagagaccggacgggaccctctggactccgaagaggaggcctag

SEQ ID NO: 183058 - DNA, 1128 bp, synthetic construct
  misc_feature 1..1128: note = Description of Artificial Sequence: Synthetic coding sequence
  source 1..1128: mol_type = other DNA
atgaagctgacccggaagatggtgctgacccgggccaaggccagcgagctgcacagcgtgaggaagcttaactgctggggctcacggctcacagacatatcaatctgtcaagagatgccttcccttgaagttattaccctgtccgtgaacagtatatctacactggagcccgtgagtcgctgtcagaggttatccgagttgtatctccgcagaaaccggataccctccctcgcggagctgttttacctcaaggggttgccaagactgagagtgttatggttggccgaaaatccttgctgcggtacatcccctcatcggtaccgcatgacagtgcttcgcaccctgcctaggctgcagaagctcgataaccaagcagtcaccgaggaggagctcagccgcgctctgagcgagggagaggagataacggcagcccccgagagggaggggactggccatggcggacctaagctatgttgtacacttagctcccttagctcggccgcagagacaggacgggatcccttggatagtgaggaggaagccacaggggctcaggatgagcgaggattaaagcccccctccagagggcagttcccaagtctgtccgcccgtgatgcctcctctagccaccgaggacgggtatcaggtggcccactcggcgccgccgcagccagtgctcattgtacacactgtaccgagaccgtcggccgcgaacatggagcctctcagggtccagtcggacgggagcacggggcttcccaaggcctcgaggagttgtgcccgcggggatcctgcgtgtgcgggtcggtcaacgcccacaccagagtcacaagagcgccccatggtgctgtgttagccccccaacccttacttctttcgtggagcgtggaatgtggtccgggtccatgctgggctgaagggaaccgtagccatgtagaagaagttccccatacacgtccccaggctgggttgctatgcagcgactctccgagcgttcccaacgtcttaaccgccattctgctcctgctgcgtgaactcgatgctgagggcctagaagcagtccagcaaacagttgggagcaggttacaggccctgcggggcgaggaggtccaagagcacgcggaatag

SEQ ID NO: 183059 - DNA, 807 bp, synthetic construct
  misc_feature 1..807: note = Description of Artificial Sequence: Synthetic coding sequence
  source 1..807: mol_type = other DNA
atggccgccgtgcgggtgctggtggccagccggctggccgccgcctcagcattcacctccctttctccaggtggaaggactcccagtcaacgggcagctctgcacctgagtgtaccccggccagcagcccgagtggctctcgtactgtcggggtgcggagtgtacgatggcaccgagatacacgaagcgtcagctatcctggtgcacttgagtcgagggggggccgaagttcagatattcgcaccagatgtacctcagatgcacgttatagaccacaccaaggggcagcccagcgaaggcgaatcacgaaatgtacttaccgaatctgcccgcatcgccaggggtaagattacagacctggccaatctgtccgccgccaaccatgatgcagccatttttccaggcgggtttggcgccgcaaaaaatctatccacctttgctgtggatggcaaggactgcaaagtgaataaggaggtcgagcgagtcctgaaggaatttcaccaggccgggaaacccatcggcctatgttgcatcgcacctgtgctggcagctaaagtactaagaggtgtcgaagtcactgtggggcacgaacaggaggaaggaggaaagtggccatatgccggaaccgctgaagccattaaggcactgggggccaagcattgtgtcaaggaggtggtggaagctcacgttgaccagaagaacaaggtggtgacaactccagcgttcatgtgtgagaccgctcttcattacatccacgacggcattggtgccatggtacgaaaagtgctggaattgactggcaaatag

SEQ ID NO: 183060 - DNA, 714 bp, synthetic construct
  misc_feature 1..714: note = Description of Artificial Sequence: Synthetic coding sequence
  source 1..714: mol_type = other DNA
atggccgccgtgcgggtgctggtggccagccggctggccgccgccagcgcattcacctctctctctccgggtgggaggacgccatcccagcgcgcagccctgcatctgagcgtccctcgccctgcagctagagtggcccttgtgctcagcggctgtggagtgtatgacggaaccgagatacacgaagcctccgcgatacttgttcacctatctcgggggggcgccgaggtgcagatttttgctcccgacgttccgcaaatgcacgtcatagatcataccaaagggcagccttcagagggagagtcgcggaatgttcttaccgagtccgctcgaattgcccggggtaaaattaccgacctggccaacctcagcgctgctaaccacgatgctgccattttccctggcggattcggtgccgccaagaatctgttatgctgcatcgctcccgtgctcgccgcgaaagtgctgagaggggtagaggtgaccgttggtcacgaacaagaggagggcggcaagtggccatatgcgggtaccgccgaggctattaaagcccttggcgcaaaacattgtgtgaaggaggtagttgaggcacatgttgaccagaagaacaaagtcgttacaacacccgcctttatgtgtgagacggctctccattacattcacgatggaataggggcgatggtgcgcaaagtgctggagctgaccggcaaatag

SEQ ID NO: 183061 - DNA, 1023 bp, synthetic construct
  misc_feature 1..1023: note = Description of Artificial Sequence: Synthetic coding sequence
  source 1..1023: mol_type = other DNA
atggccgagggcggcgagctgatgagccggctgctgagcgagaacgcagatttaaagaaacaggttcgtctgctgaaagagaaccagatgctccgcagacttctttcccagtcctgccaggagggcggcggacatgacctgcttcctccccgtgctcacgcgtacccagaggccggctcgcccggtagtggagttcccgattttgggagatttacttcagtggccgacacaccctctcagctgcaaacttcttcactcgaagacctgttatgttcccacgcccccctctcttcagaggatgatacatcccccggctgcgcggccccctcccaggcgccctttaaagccttcctgagtcctccagagccccattcacatagaggtacggatcgcaagctcagtcctctcctctcgcccctgcaggacagcctggtagacaaaacattactggagccacgggaaatggtacgccccaagaaggtctgcttttccgagagttcccttccaaccggggatcgcacgaggcgtagttactatctgaatgagatccaatcttttgctggagccgagaaagacgctagggtcgtaggagagatcgcctttcagctcgaccgtcggattctcgcctatgtttttcccggggtcaccaggctgtacggttttacagtggccaatatccccgagaaaatagaacagacttccacaaaatctctggacggcagtgtggacgagaggaagctgcgtgaactcacccagcgatatctagccctcagcgctcgcctcgaaaaattgggctacagtagagacgtgcatccagcctttagtgaattcctaatcaacacttatgggattctgaaacagagacctgatttacgggccaatccgcttcattcatcccctgctgccctccgcaagcttgtcattgacgtggtcccccctaaattcttaggagactcactcctgttgcttaactgcctctgcgagctgagcaaggaggatggcaagcctctgttcgcctggtag

SEQ ID NO: 183062 - DNA, 561 bp, synthetic construct
  misc_feature 1..561: note = Description of Artificial Sequence: Synthetic coding sequence
  source 1..561: mol_type = other DNA
atggtgcggcccaagaaggtgtgcttcagcgagagcagcctgcccaccggtgatcgcaccaggcgtagctactatctgaatgagatccagtcgttcgcaggcgcggagaaggacgcccgagtggttggagagatcgcatttcagctagacaggcgcatattggcctacgtgttcccaggcgtgacacggctttacggctttaccgtggctaacatcccagaaaaaattgagcagacttctacaaagtccctggacggcagcgtcgacgaacgcaaactgcgcgagcttacccagcggtaccttgctctgtccgccagactcgagaaattgggttacagccgcgatgtgcatccagctttttctgaattcctgattaatacctatggcattttaaaacagcggccagacctgagggcgaatcctctccacagttcccctgcagcactacgaaaattagtcatcgatgttgtgccacccaagttcttgggggactccctcctcctgctcaattgtctctgcgagctctcaaaagaagatggcaaaccactctttgcctggtag

SEQ ID NO: 183063 - DNA, 438 bp, synthetic construct
  misc_feature 1..438: note = Description of Artificial Sequence: Synthetic coding sequence
  source 1..438: mol_type = other DNA
atggtgcagctgatcgcccccctggaggtgatgtggaacgaggccgcagacttgaagcccctcgccctgtctaggagactggaatgcagcggaggaatcatggctcattacagccctgacctgctcggcccagaaatggaaagcagatatttcgctcaggtcgggttagagcacttggcctcatcttctccccctgcatttggctttttaaaatgcctagattactctatttcggtcctctgctcagcgaccagcttagcgatgctcgaggacaatcccaaggtaagtaaactggcaacaggagactggatgttgactttaaaacctaagagtatcacagtaccagttgaaataccatcaagcccactggccggaagaccaagacggagaagacgcctgcggtgcccccacgaccagcactcccaaggcacctgctag

SEQ ID NO: 183064 - DNA, 429 bp, synthetic construct
  misc_feature 1..429: note = Description of Artificial Sequence: Synthetic coding sequence
  source 1..429: mol_type = other DNA
atgatcagcaccgcccgggtgcccgccgacaagcccgtgcggatcgcgtttagtcttaatgacgcttcggatgacaccccccctgaggattcaatacctttagtgtttcccgagcttgatcagcagctgcagccacttcccccctgccatgattccgaggagtctatggaagtattcaaacagcattgccaaatagctgaagaataccatgaggtgaagaaggagatcaccctcctggagcagcgtaagaaagagctcatagccaagttggatcaagccgaaaaagagaaagtagatgctgcggaactggtccgcgaattcgaagccctcaccgaggagaaccgcactctgcggctggcccagtcacagtgtgttgaacagctcgagaagctgcgaattcagtatcagaaacggcagggttcaagttag

SEQ ID NO: 183065 - DNA, 729 bp, synthetic construct
  misc_feature 1..729: note = Description of Artificial Sequence: Synthetic coding sequence
  source 1..729: mol_type = other DNA
atggtgcagctgatcgcccccctggaggtgatgtggaacgaggccgcagacctgaagccattggctctgtctaggcgtctggagtgctcgggcggaatcatggcccactatagtccggatctcctgggccccgagatggaatccagatactttgcacaggtcggtctggaacatctcgctagttctagtccacccgcattcgggttcttaaagtgtctagattatagcataagcgtgctctgttcagctactagcctcgctatgctggaggataacccaaaggtttctaagctggcaacaggcgattggatgctgactctgaaacctaaatccattactgtgccggtggaaatcccaagcagtcctcttgacgacacaccccccgaggactccatccctttagtgttccccgaactggaccagcaactgcagccactgccgccatgtcacgactctgaggagtctatggaggtctttaaacagcattgccaaatcgctgaggagtatcacgaagtcaaaaaagagattaccctgttggagcaacggaagaaggagctgatcgcgaaactcgatcaggcagagaaggaaaaggtagacgcagctgagctagtgcgggaattcgaggccctgaccgaggagaaccgcactctgagattggcgcaatcccagtgtgtggaacagctagagaagctacggatacagtaccagaaaaggcagggttcatcatag

SEQ ID NO: 183066 - DNA, 429 bp, synthetic construct
  misc_feature 1..429: note = Description of Artificial Sequence: Synthetic coding sequence
  source 1..429: mol_type = other DNA
atgatcagcaccgcccgggtgcccgccgacaagcccgtgcggatcgcattttcgctcaacgacgccagtgacgacaccccgccagaagactccattccactggtgtttcctgagctcgatcagcaactgcagccccttcccccctgccacgatagcgaggaatctatggaggtcttcaagcagcattgtcagatagccgaggagtatcatgaagtgaagaaggaaatcaccctgcttgagcaaagaaagaaagagctgatcgccaagttggatcaggcagaaaaagagaaagtggatgcggccgaattagtacgagagtttgaggcgttaaccgaggagaatcgtacactgcggctggctcagtctcagtgtgtggagcagctcgagaagttacgcattcaatatcagaagcgccagggctccagctag

SEQ ID NO: 183067 - DNA, 429 bp, synthetic construct
  misc_feature 1..429: note = Description of Artificial Sequence: Synthetic coding sequence
  source 1..429: mol_type = other DNA
atgatcagcaccgcccgggtgcccgccgacaagcccgtgcggatcgcattttccctgaatgacgctagcgatgacacaccacccgaggatagcatcccattagtttttcctgaactggaccaacagctgcagcctctgcccccttgccacgacagcgaagagtctatggaggtgttcaagcagcattgccagatcgccgaggagtaccacgaagtcaagaaggagataacactattggagcaaaggaagaaagaactgatcgcgaaactggatcaagcagagaaggagaaagttgacgctgcagaactcgtacgtgagttcgaagcactgactgaggagaaccgaaccctgcgcctggctcagagccagtgcgtggaacagctggagaaacttaggatccagtatcagaagaggcaggggtcaagctag

SEQ ID NO: 183068 - DNA, 429 bp, synthetic construct
  misc_feature 1..429: note = Description of Artificial Sequence: Synthetic coding sequence
  source 1..429: mol_type = other DNA
atgatcagcaccgcccgggtgcccgccgacaagcccgtgcggatcgcgttctccctcaatgacgcaagcgatgacacaccacccgaagactcaatcccactggtgtttcccgaactcgaccagcagctccagccgctgccaccttgccacgacagcgaagaaagcatggaggtcttcaaacaacactgccaaatcgctgaagagtatcacgaggtgaagaaggagatcactttgctggagcagcggaagaaggaactgattgccaagttggatcaggcagaaaaggaaaaggttgatgcagcggagctggttagagaattcgaagcattaaccgaggaaaatagaaccttgcgactcgcgcagtcgcagtgcgttgagcaattagagaaattgagaattcaataccagaagagacaagggtcttcctag

SEQ ID NO: 183069 - DNA, 429 bp, synthetic construct
  misc_feature 1..429: note = Description of Artificial Sequence: Synthetic coding sequence
  source 1..429: mol_type = other DNA
atgatcagcaccgcccgggtgcccgccgacaagcccgtgcggatcgcttttagcctcaacgacgcaagcgacgacactccccccgaagacagtattcccctggtcttcccagagctcgatcagcagctgcagcctcttccaccgtgccatgatagcgaagaatcaatggaggtgttcaagcagcactgccagatcgctgaagagtaccacgaggtcaaaaaagagatcacactccttgaacagcgtaagaaagaactgatcgcaaaattggaccaagccgagaaagaaaaagtcgacgccgccgagctggtgcgcgaattcgaggctttgacagaagaaaatcggaccctgagactcgcacaaagccagtgtgtggaacaactggagaagctcagaatccagtatcagaaacgtcaggggtcttcctag

SEQ ID NO: 183070 - DNA, 429 bp, synthetic construct
  misc_feature 1..429: note = Description of Artificial Sequence: Synthetic coding sequence
  source 1..429: mol_type = other DNA
atgatcagcaccgcccgggtgcccgccgacaagcccgtgcggatcgccttttctctgaatgacgcttctgatgataccccacccgaggactctattcccctcgtatttcccgaactggaccagcagctccagccccttcctccttgtcacgacagcgaggagtctatggaggttttcaagcaacactgccagatagccgaggaatatcatgaagtcaaaaaagagattaccctcctggagcagcgcaaaaaagaactcatcgcgaaattggaccaggccgagaaggagaaggtggacgccgcagagctcgtgagagagttcgaagcccttactgaagaaaacaggactctgaggctggcccagagtcagtgcgtcgaacagctggaaaaacttaggatccagtatcagaaacggcagggatccagctag

SEQ ID NO: 183071 - DNA, 729 bp, synthetic construct
  misc_feature 1..729: note = Description of Artificial Sequence: Synthetic coding sequence
  source 1..729: mol_type = other DNA
atggtgcagctgatcgcccccctggaggtgatgtggaacgaggccgctgatctcaaaccactggccctctcaaggagactggagtgttccggcggcatcatggcccattacagcccagacctgctgggccctgaaatggagagccggtatttcgcacaagttggactggagcatctcgcttcgtcatctcctccggcattcggattcctcaaatgcctcgactattctatctccgtgctgtgtagcgctacatcactcgctatgcttgaggacaaccccaaggtctctaaacttgccacaggggattggatgttgaccctgaaaccaaaaagtataactgtccccgttgagatcccaagttccccccttgacgacaccccacccgaggatagcattccacttgtgttcccggagcttgatcagcagttacaaccattgccgccctgccacgattctgaggagagtatggaggtgttcaagcagcattgccaaattgcagaagaatatcacgaagtgaaaaaggagattactctgcttgaacaaaggaagaaggagcttatcgcgaagttagatcaagctgagaaggagaaagtggacgctgcggagctggtgcgggagttcgaagcactgacagaagagaataggaccttacgtttggcccagagccaatgcgtagaacaactggagaaattaagaatccagtaccagaagagacagggatccagttag

SEQ ID NO: 183072 - DNA, 135 bp, synthetic construct
  misc_feature 1..135: note = Description of Artificial Sequence: Synthetic coding sequence
  source 1..135: mol_type = other DNA
atggtgcagctgatcgcccccctggaggtgatgtggaacgaggccgccgacctgaagccattggcgttatcaaggcgcctggagtgctcaggtggaattatggcccactactcaccggatcttcttggcccatag

SEQ ID NO: 183073 - DNA, 285 bp, synthetic construct
  misc_feature 1..285: note = Description of Artificial Sequence: Synthetic coding sequence
  source 1..285: mol_type = other DNA
atgatcagcaccgcccgggtgcccgccgacaagcccgtgcggatcgcgttcagcctgaatgatgcctctgacgacaccccacctgaggactcgatcccccttgtattcccagagctcgatcagcagttgcagccattaccaccttgtcatgattctgaagagagcatggaggtttttaagcaacactgtcagattgctgaggaatatcacgaggtgaagaaagagatcaccttacttgagcagagaaaaaaggaactaattgctaagcttgatcaggccgaatag

SEQ ID NO: 183074 - DNA, 411 bp, synthetic construct
  misc_feature 1..411: note = Description of Artificial Sequence: Synthetic coding sequence
  source 1..411: mol_type = other DNA
atgctggtgagcagcagcagcctgacccccttcccccccgtgcggaccgcagacgacaccccaccagaagactcaatccccctggtgtttccagagctggaccagcagcttcagcctctgccaccttgccacgactctgaagaatccatggaagttttcaaacagcactgccagatagcagaggaataccacgaagtgaaaaaggagatcacactacttgagcagagaaaaaaagagctgatcgctaagctggaccaggctgaaaaagagaaagtagacgccgctgaactcgtcagagagtttgaagctctgactgaggagaaccgcacccttcgtctcgcccaatcccagtgcgtggaacagctggagaaactgaggatccaatatcagaagcggcaaggatccagctag

SEQ ID NO: 183075 - DNA, 786 bp, synthetic construct
  misc_feature 1..786: note = Description of Artificial Sequence: Synthetic coding sequence
  source 1..786: mol_type = other DNA
atggtggtggtggccgccgcccccaaccccgccgacggcacccccaaggtgctcctactctcagggcagcccgcctccgctgctggcgctccagccggtcaggcacttcccctgatggtccctgcgcagcggggcgcctcccctgaagcagcatctgggggcttgccacaggcaagaaagagacagcgactgacgcatctgagcccagaagagaaggctctccggcgaaagttgaagaacagagtcgctgcccaaacggcccgggatagaaaaaaagcccggatgagcgagcttgagcagcaagttgttgacctggaggaggagaaccaaaaactgctgttagaaaatcagctgctgcgcgagaagacgcatggcttagtcgtcgagaatcaggagctacgacagagattaggaatggatgctctggtggctgaagaagaagccgaagctaagggaaatgaggttcgtccagtggcgggtagtgctgagagcgcagccctccggttgagagcacctcttcagcaggtgcaggcgcaactaagccccctgcagaacattagcccctggatcttagcagtgttgaccctgcagatccagagcctgatctcctgttgggcgttttggaccacgtggacccagtcctgcagtagtaacgctctaccacagtccttgcccgcctggagatccagtcagcggtccacccagaaagatcccgtaccttatcagccccctttcctgtgtcaatggggtaggcaccagcctagctggaaaccgttgatgaattag

SEQ ID NO: 183076 - DNA, 528 bp, synthetic construct
  misc_feature 1..528: note = Description of Artificial Sequence: Synthetic coding sequence
  source 1..528: mol_type = other DNA
atgagccggagctacaacgacgagctgcagttcctggagaagatcaacaagaattgttggcgtatcaaaaaggggtttgttcctaatatgcaggttgagggcgtgttctacgtaaacgacgcgttagagaagctgatgttcgaagagctgagaaacgcatgtagaggcggcggtgtgggcggctttctcccggccatgaagcagataggcaacgttgctgcgcttccggggatcgtgcatcgctctattgggctgcccgacgtacatagcgggtacgggtttgctatcggcaacatggccgcctttgacatgaatgatcctgaggccgtggtctctcccggtggtgtaggtttcgatataaactgcggtgtccgactgctcagaaccaacctggatgagagcgatgtgcaacctgtgaaggagcagttggcacaggctatgtttgatcacatccccgttggagtcggttctaagggcgatatgatgcgcgccgtacattgccccgagcaaaatctcgacgttatctag

SEQ ID NO: 183077 - DNA, 2304 bp, synthetic construct
  misc_feature 1..2304: note = Description of Artificial Sequence: Synthetic coding sequence
  source 1..2304: mol_type = other DNA
atgagccacgccgtgaccatcgaggagccccaggcccagccccaggtcagtcagactcgctatcgggaacggtccagagccggatctcatatctcatccaaccgcgcctacgattttctctatgaccctctcttcattgtgagcagcgaaaaggaccacacgcaagccaatatccaggcgaccctgatcagatccaggcttaggaaggtcccgcgcttcaaaactatgttttccaatttgattcattacccgaggtactcactgtattggtccaagagcgatcccgtgcccccctttatctcgagagaatggaagggccataaagaaaagcaccgggaagccctgcggcagcttacaacaaccgacgccagttttcagatgcccaaagaggtgtacgaggacccagaagttacaggtaaaaatcgatacaagtatttcgagcggccgtttctgccattctttcagcagatgccatttaacgttgtgtacgccgttagcaaagccgagccgtacactttcccacctacatcgacgaaacacctctcaattccctccaagtccacagttggaacacagacagactacagggacgccgacgtgcagacagacccatatagtgcagagtatgtggtgtgtcaggatagcatcccggaacttttgactctggccaccctgacctgggggcgaggtctgccagccggtcaagctgaggtagagatgatcgagcgggcccgtgaaaagcgcgcatgggaagcatctcttcccgctctctctgacacaagccagtttgagaaacgacgaaaaatgatgaacgaaatggaaagaaaagaatgggcgtttcgtgagcaggaaatcgagaaactccaggagatcaggcttgaagtgctgaaggagttgctccgtaagcgggaagaaaaccagaatgaggttaatatgaaacatctgaatgcacgctggtccaagctccaggagggcaaggaggccaaaatggcgaagatccaacggacgcacgttagcaccataaggaaactggtcggaaagagaaaaaatatcgaaggcaaattagaacgccgaaatattataaaagactacagtgattacgctagtcaagtatacggccctctgtccaggctgggctgcttccctgacaacaacagcgaggatttcgtagttaaaaattactatcttaatacttacgagggtttggtggagctcgagagctgtctaccagacttcgtcacccagccccagataagggccccaaaaccaaaggtcatcacaactaaggccggcttcttgaaaagggcggctcgacttgactacgaactagcagaggttcacaaggcacttctcgataagaagaacaaggtactggaagtcaagaagcctccaaggtttctccagcggaatcccatcccccagcctagactgcccactccaactctggagatgaccagtaatgaggaagaggaaatggagatggctgtgatctatctccagaagctgcttagaggccgcgtcgttcagaacatgatgttcgaaggcaaagagaaacggctcgagctcattcaggagcttagaacctgccatgcactgcaagaagacgagaagctcgtaaaaaaggcggagaaacaggtgaccctggccctgcagcgacaacgaaacctccatgaacacaaagtaagcttagtggagaatcacctggcagggctcgagggcagggccttggcagacatgtttgattttcttagcaaggagctggtcagactccaggaagagcggagaatccacgcttttgttatgctggcagagagacagaggagagtccgggaagccgaggaatccggaaggaggcaagtggagaaacaacgccttcgcgaagaggacgagatatttaaagaggtagtgaaagtccaccatagcactatttcatcttatctggaagatatcattctgaacactgaggctaacaccgctgaggagcaagcgagggccgagatcgaaaagatggccgaaaagataaacgatatcgcatatgagatggaatcacggagaacatatttgcagtctgaggaaatcgtggccgaactcgtgtattcctttttaattcccgaagttcaaaagtatttcgtcaaagagaaggtaaggaatgcgcagaggaaacatatcttagctgctcatcagatcatccactcctacactgaaagtatggttcagaagaagcttaccgagggggagcaagacgaggccagcaatgccgccatgctcctggagaaggaaactcagaacgagaacaatagctag

SEQ ID NO: 183078 - DNA, 564 bp, synthetic construct
  misc_feature 1..564: note = Description of Artificial Sequence: Synthetic coding sequence
  source 1..564: mol_type = other DNA
atgagccacgccgtgaccatcgaggagccccaggcccagccccaggtcagtcaaactcgttatcgcgagaggtcaagggctggctcacatatcagctcaaacagagcttatgacttcctctacgatcctctatttatcgtgtcttctgagaaggaccacacccaggccaatatccaggctaccctgataagatcacgcctgagaaaggtcccccgttttaaaacaatgttctccaaccttatccactatccacgctacagtttatactggtccaagagtgacccagtgcccccattcatttctcgggaatggaaggggcataaggagaaacaccgggaggccctgagacaactgaccacaaccgacgccagttttcagatgcccaaggaggtatacgaggacccagaggtgacaggcaaaaatcgttataaggggcaaaaccacaccctatttttactattgctcctttctacatacccgagcctgcaaagcctgctctgggcccttaggttgatcataggaatgctgacattcaaacagatccacacactccagaacatgtag

SEQ ID NO: 183079 - DNA, 717 bp, synthetic construct
  misc_feature 1..717: note = Description of Artificial Sequence: Synthetic coding sequence
  source 1..717: mol_type = other DNA
atgagccacgccgtgaccatcgaggagccccaggcccagccccaggtctcccagacccggtatcgtgaaagaagcagagccgggtcccacatcagtagcaacagggcatacgacttcctgtacgaccccttattcattgtctcttccgagaaggatcacacacaggcaaatatacaggctactttaattcgcagtcggctccggaaggtgccccggttcaagactatgtttagcaacttaatccattatcccaggtactctctatattggtccaaaagtgatcctgttcctccatttatatccagggagtggaagggccacaaagagaagcatcgcgaggcactcaggcagctgaccaccacagacgcctcctttcagatgcccaaagaggtttatgaagaccctgaagtcaccggcaagaacaggtacaaatactttgagagaccttttctgccattttttcagcaaatgccctttaacgttgtgtacgctgtctcgaaagcagagccatatacgttcccaccgactagtactaagcatctatccattccatctaaatccactgttggcacccagaccgattatcgggacgccgacgtacagaccgacccatacagcgctgagtacgtcgtgtgtcaagacagcatcccggagctgctgaccctggccactctcacctggggggaattggtcaaccttcttactattggacgatag

SEQ ID NO: 183080 - DNA, 654 bp, synthetic construct
  misc_feature 1..654: note = Description of Artificial Sequence: Synthetic coding sequence
  source 1..654: mol_type = other DNA
atggacctggcccagcccagccagcccgtggacgagctggagctgtctgttctggagagacagcctgaggagaacacaccgctgaacggggctgataaggtcttcccctccctggacgaggaggtacctcccgctgaggcaaacaaagagtccccctggagtagctgtaacaagaacgtggttgggcggtgtaaactttggatgatcattacctcaatcttcctcggcgtgattaccgtaattattattggactatgcctagctgctgtgacctatgtagatgaggatgagaacgagatattggaactcagttccaataagacattttttataatgctgaagatacctgaagaatgcgtggctgaagaggagctcccacatctgcttacagagcggctaacggatgtgtatagcacaagtccaagtttgggcaggtacttcacctccgtggaaatcgttgactttagcggcgaaaatgcaactgtgacatacgacctgcagttcggagtgccaagtgatgacgagaactttatgaagtacatgatgtcagaggagctggttctcggaattctgctgcaagatttcagggaccagaatatcccgggttgcgagtcactcggactggaccccacatcattactcctctatgagtag

SEQ ID NO: 183081 - DNA, 444 bp, synthetic construct
  misc_feature 1..444: note = Description of Artificial Sequence: Synthetic coding sequence
  source 1..444: mol_type = other DNA
atggacctggcccagcccagccagcccgtggacgagctggagctgtccgtgctggaaaggcaacctgaggagaatactccacttaatggggctgataaagtttttccaagcttggacgaagaagttccgccagctgaggccaacaaggaaagcccctggtcatcctgtaacaagaacgtagtgggacgctgtaagctgtggatgatcattacatccattttcctgggggtaatcacagtgatcattattggattgtgtcttgcagccgtgacctatgtggatgaagacgagaatgagattctggaattatcttccaacaagacctttttcattatgctgaaaattcctgaggagtgtgttgctgaggaggaactgccacacttactgacagagcgagaagtggggcttaaacctaatcccgaagccctggtgggatttgagtag

SEQ ID NO: 183082 - DNA, 753 bp, synthetic construct
  misc_feature 1..753: note = Description of Artificial Sequence: Synthetic coding sequence
  source 1..753: mol_type = other DNA
atggacctggcccagcccagccagcccgtggacgagctggagctgagcgtgctggagagacagcccgaggaaaacaccccattgaatggggccgataaagtgttcccttcactggacgaagaggtcccccctgctgaggctaacaaagaaagcccgtggtctagctgtaataagaatgtggtgggccgatgtaaattatggatgattattaccagcatattccttggcgtgataacagtgatcattataggactctgccttgctgcagtcacctacgtcgacgaggacgagaatgaaatacttgaactcagctcaaacaaaacattttttattatgttgaagattcccgaggaatgtgtagcggaggaagagcttccccatctgctgaccgaaaggaatgaggttatggaagccgggctctgcctgaaagcggtcctgtaccaggttcttgagatgaaaggaattcattcggtcctgcagaaacgtttttgtgggctgattcagaaacaccaacaacatcagagaggaggggactcttttttgtcaaggttttactctctggctctttcacccgtcaagcaattgccctccaccgcttctgccggttcctctctcgacaagggcaggaagcccgcccgggtgggggccatcggaagtgcaggaatgagccattgctggcgatctcttgttttctgtcttttcctcttttgtttcgtactgttctttgaaacgggatcccggagtgttgcctag

SEQ ID NO: 183083 - DNA, 1293 bp, synthetic construct
  misc_feature 1..1293: note = Description of Artificial Sequence: Synthetic coding sequence
  source 1..1293: mol_type = other DNA
atgtggcggctggtgccccccaagctgggccggctgagccggagcctgaagctcgcagcactgggctcactgctggtacttatggtgctgcactcccctagtctgctggcatcttggcaaaggaatgagctaacagataggcgcttcttgcagctgaataaatgtccagcttgcttcggcaccagttggtgtaggaggttcctgaacggacaggttgtctttgaagcatggggcagactaaggcttttggatttcctgaatgtcaagaatgtatacttcgcccaatatggcgagccccgggagggcgggagaagaagggttgtgctcaagagattggggtcccagagagagcttgcccaactagaccagtccatttgtaagcgcgctactggaaggccacgctgtgacctcctgcaagccatgccacgtacagaatttgcaaggctgaacggtgatgtgaggctgctcacccctgaggccgtggagggctggagtgatctggtccattgtcccagtcagaggctgttggaccgactcgtgcggcggtacgcagagaccaaggactctggcagcttcttgctgaggaacctcaaagattccgagcgcatgcagctgcttttaacactggccttcaaccccgagcctctagtcttgcagtccttcccctccgatgagggctggcccttcgcaaagtatctcggagcatgcggacgcatggttgccgttaattacgtgggcgaggagctgtggtcttactttaatgccccctgggagaaaagagtcgatctcgcttggcagctgatggaaattgctgaacagctgacaaataatgatttcgagtttgcgctgtatttgcttgatgtttcttttgacaacttcgccgtcggcccacgtgacggaaaagtgattattgtcgacgccgagaatgtcctcgtggctgacaaaaggctaattcgtcagaataagccagaaaactgggatgtgtggtatgaatcgaagttcgatgattgtgacaaggaagcctgtctgtccttcagcaaagaaatcctgtgtgcccgggctactgtggaccataattactatgcagtgtgtcagaatctcctgtcgagacatgctacgtggcgcggtacgtctggaggattgctccacgatccgccaagcgagatcgcaaaggatgggaggctcgaggctctcttggatgagtgtgcaaaccctaaaaagaggtatggcaggtttcaggccgcaaaggagctgagggagtacctggctcagctgagcaataatgtaagatag

SEQ ID NO: 183084 - DNA, 666 bp, synthetic construct
  misc_feature 1..666: note = Description of Artificial Sequence: Synthetic coding sequence
  source 1..666: mol_type = other DNA
atgaagagcgagaacggcaccgtggtgggcagcttccccagcgacgagggatggccctttgcaaaatatctgggggcctgtggtcgcatggtcgccgtgaattacgtgggggaggaactgtggtcctacttcaatgccccatgggagaagagagtcgatctcgcttggcagctcatggaaatcgccgagcagcttacaaataatgattttgagtttgctctttatctcttagacgtgtcgttcgacaacttcgcagtgggacctcgggacggcaaggtcatcattgtcgacgccgagaacgtcctggtcgctgataaaaggctcatacggcagaacaagcccgaaaactgggacgtatggtacgagtccaagttcgatgactgcgataaggaagcatgcctgagtttttctaaggagatactctgtgcccgggcaaccgtggatcacaactattacgcggtatgccagaatctgctgagcaggcacgcaacatggagagggacttccgggggacttctccatgacccgcccagtgagatcgctaaggatggacgcttggaggcgcttctggatgagtgcgctaacccaaagaaaaggtacggccgatttcaggctgctaaagaattgcgggagtacctggctcaattgtctaataatgtccgctag

SEQ ID NO: 183085 - DNA, 5079 bp, synthetic construct
  misc_feature 1..5079: note = Description of Artificial Sequence: Synthetic coding sequence
  source 1..5079: mol_type = other DNA
atgcggcggcccccccccctgggccccaccaccgccagcggccccgagggaaatgtccgaaatctacaaaagcgacaagcccctgggccgggggcagctggtgggtgcgggcctgaggcaggggggtgtagggaaaacaagcagaaacggaggatggtcgccagagccactccgggacggggggaagtggaatcagataagagtgtagccgcttcaggtgcagggaaggcagcacggcgtcaagtagaaggccgtcgaggtcccgtaagcccctcagactcatccgacccccggggcctggaagccgcaaaagaagcagaactaccgctccagacagaacggcacaccaaagagaagcgcaaggtcacagaggcctcttccgacgatcctcagcctggcctggaccttgtccggaaggagagcctgacctccagcgagtctttccagacagtagaatgccttcagtcactgggcaaggaatccataatcgagggtatcaagcggagaattaggaataagaagcttaaatctcttgaaaacccgccacttaagattactgaaaacgaggccacccaaaatatcaaggtggaatttcaagatgagttgtacaagaacacacccaagtattcttgcaacatcctgagcccggaggtggaaaacaatagtgtgctcaagttaagggattgcaactgttttccccactccaaggggtgcaatgacgagaataatcttccatataagcccgatggcggatgcatgcacgttgccgaaaacttcagcaagaaggaaaaccttcgcagcctggccgagaagtccgataccaactccataccacagctgctacagacagaggaaaacgtgatgggcgttaacaagctgctcccagaagaatctgacctctaccagtcaaagaccaatggcctgctttcctgtttgcagcacgaaaagaacaagtacagtattgaggagagctctgtaggtcgcaaaccccgtaaacgcatgaagctgagcgagaaggccgacgaaaccgtgacagagatgaacttctctaacgagtacaacaagtccgagctgatgctgcaagagaaccagatgatagctgacggcaaggaggccgaaactaagtctccccttaatgtactgcgtaaagtgagtcacaacaccgtcagtttaatggatcacctgctgagcgtcccagagacggttgaaaaggaaacatctagcgaacatcacgtcaatgctgtgttccaaaaaaccattgagcccctcctgaaggaggaaaccgagaatgctagcgaaccactcggttacgagtccatggcatcaaaagaagactttaagtcaatgaaaagcttcatcggtaagagccccaacgagtaccacattgagaggcgcagttcaagagaggacctcaggtcagcatcagaggagctaaagctgtcttgccagcgcacaatacctatgacaggaaaaaggacatggccttactattcttgtgcaaggatctcagcctggtgctggaagaaggcctccctgccagagtcatcttacttcctgcgcgggagccaggaatcgtgccgccaggtagacgtgcctaaacatcaaaccaatcaaacccatctgaccgatagcaaactgcttctccagagcagcctcaccgagacaaacaccgaatcatcctcaaaagagaagctggactccaacagcaactgtttaagctcagtatctgcagtcgaacccaccctcatggtcattaaagaacccatcattaaagacgataagaagatcaaaagtgaagagctatcgagacgtggatcagaggtcatatccaacacgacggaagacacgcagctgacctccgaaacacagagcctcactggtaataagaaaaaagccagaggtaacttgaccaagcttaacctcacggccacttccaaagacggtcaagaggccaataatagcgcaggcaagacaatacatcgtaaggcttgcatcgcccagcaaacctttattgtgccagatttagtgaagatcctgaacaccggcaggctgactaactttaaaatcccactcttaaagaacaagagcgagaagcggaaggaggtgaatgcgaaaagctcagagcgagaagcatacagccccttagagctgttggacaatctgagtggggcggatgtgcggcagaatagatccaaggaaaatgtgtccatgatgatgcttggcccgcagacattgagtatcagaaattcagtaacacccgtccaggcctccagtgatagcttttacaataagaagtcatactccattagtccctctttcacaaaacaaggtaacaattctaagccatctaaccacgtcagcgaacctggaaacattgtgagcaataaggaggtagcgtccctgaccgttgagaacaacgccttctcatgcgatcctggatatgttgaaaaatcacccagcttctgctgtaacgaacaggagaccttcagacctgtcagtagtgaagtgcgaggtcgaaagataaccaagaattttagcgaggtgggcttccccgacatcttgaaggcctatgaggatgatgtcctgctaatcgatgtcatccaagatgatcctgatctatttggcgtgtcaaatgagggagaattgagcttcacatctgaggtgccaaaaatctcccaggaacccaacgttgccggcgagcatcagtcaactgactcaaagtatatggaaactcccgtgaagaaagaaccaagcgacgatctgagagaactgccggtgctagactgcggttggattaaacctgacatctgcgcctcaaacagcgctgagtctgaaatcaagagagatccaaaggatgtgaacacatctctgggggaagtggccaatgagacctccgaaaatgaaacactgggcgatttttccgagcagataaagggcagcgacctggatgagaagcaccggttcacagacaaagttattacaaaggaggagaaggagaatatatacgaggtttgtaaatcgaaggactctaggaatgcagattttatggtgggcgaatgccagtttgcagtgccagtgcctaagcccctgtgtctcctcgtgccaccactaaatttgtcgggcagacaggaagacactatcctaaacacttggatgaatgacttcaggttcctaggcaaacattcagtcctgaagcttcagaatcccgaaacatgcgagatcttcaaacgggagaaaaacgtgggggtgtttcagaagtcattgggcttgatgatcccctataagtattgcaagtttcactttaacacattgaggggctgcgagcggcctctttgcaagtttgcccacgtaccggagcagggcgacgagaaggtgtgtatggatgtgttcaaaaaatatattaacattaacgagctgtgtctgctgcagcgagcggtcaacatctttatggagtactataggaagtttcctccaggggtgtactttgatctccaggtcctgaacgatctgctcaattctctgctgaaacattgcctgttaaaagaggtcttccagatcgtcaatctgagcataatggtgaaaatgttacccagcctgaagatcctgttaaatattttcgagtatgtcgccaccatgaagttgagaaatgcagttcccgcccttattgatatcttctgtaaactggttgaagccggaatggtgctagatccagagcacttcaattatattgtcaagctgttgtaccaagtgcaggcttcaaaacaggaaattacagctgtccttgaaatgaaatctcgtctgcaaatgcgtcggttcaagaagaattggaagtgtgacctggactctgccctcaacaagttagaacactgtaaggagaaaggtgattggaccaaactggggaagctgtacatcaatgtcaaaatgggctgtgaaaagtttgccgacttccagacattttgcgcgtgtattgctgaaacattgacaaagaattacgaagacgagcgaccagatatccccttttgcgagtttgcagagaccgtgtccaaggatcctcagaatagcaaggtggacaaaggagtgctggggagaattggcatctccgccatgtacttctatcataaactcctgcagtggagcaaaggccgaaaagtattggaaaaactgtatgagctcaaaattcattttacctccctgaagggccttatcggtccagagaagttggcttcacgctgccagatcgtgaatgtggccgccgagatattcctgaagtctggaagcctcgatggagccatatgggttatgagggaaagtgaatggatcatcaacacccccctatggccctgtgaccgacttgacgtgctgaatcgacacaacctgctctgcacgattgcacatgagatactcgccaaatctctctatcgccagacctttgaggttcttcagaatcttccagggtttcagaattcacaggaaacagtggaagttagccagtactccctgctatttaacaaattactgggtagctgtattgagagttctagtctgggaatgagctccagcgtggctgagtttatgatcagtaagagtattcctattgatttctcgtttcttcgtcgcttgattacttcattaggacggtccaggctgtggctcaaggcacgggctcactacaagtccgccctgtcgttggggtgttatcccccactggagggcaatctataccgcaagttgctgcttattccctcatacttaagtgaaattgaaatgcttctcgcgattgagatcttcatggtctcaaacgcctcttctatacaaagccccggaacgagcactcagatcctgcagattgtactgaagaggtgcgaagataaccaatcacgctccaacgatgattaccaggccgccgtggagcggctcatcatggctgctaggatttcagatcccaagctgtttgtcaaacacatgaccgtaaatgtgaataaggagcaggtctacagccttgagcattgctccgccttgaaatggctgaaagagaacatgaaatgggctggtaaagtgtggctcttcagtaaccactag

SEQ ID NO: 183086 - DNA, 207 bp, synthetic construct
  misc_feature 1..207: note = Description of Artificial Sequence: Synthetic coding sequence
  source 1..207: mol_type = other DNA
atggtgtactaccccgagctgttcgtgtgggtgagccaggagcccttcccaaacaaggacatggaggggaggcttcccaaaggacgtttaccggtgcctaaggaagtcaataggaagaaaaatgatgaaactaacgccgccagcctcacccctttaggctctagtgagctaagaagccctcgaatcagctatctgcattttttctag

SEQ ID NO: 183087 - DNA, 207 bp, synthetic construct
  misc_feature 1..207: note = Description of Artificial Sequence: Synthetic coding sequence
  source 1..207: mol_type = other DNA
atggtgtactaccccgagctgttcgtgtgggtgagccaggagcccttccccaacaaagatatggagggacgactaccgaaaggccggctccccgtcccaaaagaggtgaacagaaagaaaaatgacgagactaacgcggcatcactgactcccctcggcagcagcgaactccggtcccctcgcatcagctacctgcacttcttctag

SEQ ID NO: 183088 - DNA, 339 bp, synthetic construct
  misc_feature 1..339: note = Description of Artificial Sequence: Synthetic coding sequence
  source 1..339: mol_type = other DNA
atgaagggcgtgtggaactacagcgccctgagccggcgggaggacgaaactagaacccagcgatctcggatgacagatcgggttccatgcagcaaatgcttccaggttcactgtcagatcagtgtattgaattgcgtgtactatcctgaactgttcgtatgggtgagccaggaaccctttccaaacaaagatatggagggtcggcttcctaaagggagactgccagtgcccaaagaggttaacaggaagaagaatgatgagactaatgctgcctccttaactccgctgggaagttcagaactgagaagcccgcgaatctcttacctgcatttcttctag

SEQ ID NO: 183089 - DNA, 207 bp, synthetic construct
  misc_feature 1..207: note = Description of Artificial Sequence: Synthetic coding sequence
  source 1..207: mol_type = other DNA
atggtgtactaccccgagctgttcgtgtgggtgagccaggagccctttccaaataaggatatggaaggcagacttcccaagggtcggctccccgtacctaaggaggtcaaccggaagaagaacgacgaaaccaatgctgcaagcctgacccctctcggcagctcagagctgaggagtccgcgtattagctatctccactttttttag

SEQ ID NO: 183090 - DNA, 207 bp, synthetic construct
  misc_feature 1..207: note = Description of Artificial Sequence: Synthetic coding sequence
  source 1..207: mol_type = other DNA
atggtgtactaccccgagctgttcgtgtgggtgagccaggagccctttcctaacaaggatatggaaggcagactgcccaaaggtaggctgccggtacccaaagaagtgaaccggaaaaaaaacgatgagactaacgctgcgagccttacgcctttgggatcttccgagctcagaagtccaagaatctcgtacttacacttcttctag

SEQ ID NO: 183091 - DNA, 207 bp, synthetic construct
  misc_feature 1..207: note = Description of Artificial Sequence: Synthetic coding sequence
  source 1..207: mol_type = other DNA
atggtgtactaccccgagctgttcgtgtgggtgagccaggagccctttccaaacaaggacatggagggccgactgccaaagggccgcctgcctgttcccaaggaggtcaacaggaagaagaacgacgagactaacgccgcctcactgactccgctgggttccagtgaactgagatcgcctcgaatcagctatctccactttttctag

SEQ ID NO: 183092 - DNA, 207 bp, synthetic construct
  misc_feature 1..207: note = Description of Artificial Sequence: Synthetic coding sequence
  source 1..207: mol_type = other DNA
atggtgtactaccccgagctgttcgtgtgggtgagccaggagcccttccctaataaggacatggagggcagactgcccaagggacggttgcccgtgccaaaagaagtcaatcgcaagaagaacgacgaaacaaacgcagccagtctgacccctcttggcagtagcgaattacggtctccgcgcattagctacctgcattttttttag

SEQ ID NO: 183093 - DNA, 207 bp, synthetic construct
  misc_feature 1..207: note = Description of Artificial Sequence: Synthetic coding sequence
  source 1..207: mol_type = other DNA
atggtgtactaccccgagctgttcgtgtgggtgagccaggagccctttcccaataaagatatggagggtcggctgcctaagggcaggctcccagtgcccaaggaggttaatagaaagaaaaatgacgaaacaaacgcagcctccctaacgcctctgggcagttctgaacttcgctcaccccggatatcttacctgcacttcttttag

SEQ ID NO: 183094 - DNA, 207 bp, synthetic construct
  misc_feature 1..207: note = Description of Artificial Sequence: Synthetic coding sequence
  source 1..207: mol_type = other DNA
atggtgtactaccccgagctgttcgtgtgggtgagccaggagccctttccaaataaagacatggaaggacgtctgcctaaaggccgcctccccgttcctaaagaggtaaacagaaaaaagaacgacgagactaatgccgcatctctgacacctttggggagcagcgagttacgatcccccagaataagttatttgcatttcttttag

SEQ ID NO: 183095 - DNA, 18 bp, synthetic construct
  misc_feature 1..18: note = Description of Artificial Sequence: Synthetic coding sequence
  source 1..18: mol_type = other DNA
atggtgtactacccctag

SEQ ID NO: 183096 - DNA, 102 bp, synthetic construct
  misc_feature 1..102: note = Description of Artificial Sequence: Synthetic coding sequence
  source 1..102: mol_type = other DNA
atggtgtactaccccgagctgttcgtgtgggtgagccaggagcccttccccaataaagatatggaggggaggttgcccaaaggacgtctgccagttccctag

SEQ ID NO: 183097 - DNA, 207 bp, synthetic construct
  misc_feature 1..207: note = Description of Artificial Sequence: Synthetic coding sequence
  source 1..207: mol_type = other DNA
atggtgtactaccccgagctgttcgtgtgggtgagccaggagccctttccgaacaaggatatggaaggccgactgcctaaggggcggctgcccgttcctaaggaagtgaatcggaagaaaaacgatgagactaacgctgctagcctgacacccctcggttcatcagagttgcgttcccctaggatctcttaccttcacttcttctag

SEQ ID NO: 183098 - DNA, 207 bp, synthetic construct
  misc_feature 1..207: note = Description of Artificial Sequence: Synthetic coding sequence
  source 1..207: mol_type = other DNA
atggtgtactaccccgagctgttcgtgtgggtgagccaggagccctttcctaataaagacatggagggaagactgccaaagggccggctccctgttccaaaagaagtgaacagaaagaagaacgacgaaacaaacgctgcatccctgaccccgcttggctcttccgaactccgctcgccgaggatatcctaccttcattttttttag

SEQ ID NO: 183099 - DNA, 198 bp, synthetic construct
  misc_feature 1..198: note = Description of Artificial Sequence: Synthetic coding sequence
  source 1..198: mol_type = other DNA
atggtgtactaccccgagctgttcgtgtgggtgagccaggagcccttccccaacaaagacatggagggcaggttgccaaagggtcgtctgcctgttcccaaggaagttaaccgtaagaagaatgatgagactaacgccgcctcacttacgcctctgggaagctctgaattgcgaagcccaagaatctcctatctgtag

SEQ ID NO: 183100 - DNA, 735 bp, synthetic construct
  misc_feature 1..735: note = Description of Artificial Sequence: Synthetic coding sequence
  source 1..735: mol_type = other DNA
atgcactacggcgccgccacccacatccagaacagccggagccacggattagaaaccgtcccaggacatcagaggcttgagcgaggggcaggaggtgagacccctgaattccctggatgccatagccctgctccccccgagaatttcggcaatgagctcctgcccctgtccgctccgcttcagggtcttagcgaaggactgtaccccccagggcgaaacaagaccttacctgccggcgtactccgtgaaggcgcagtgcagtttctgcacaggggactctgcaactcaaatctcagctctgaagctagcgcccggccatcaggcacccaagatgagcttcacagtagccgcaggaaaacaggccagactagacgtgagggggccagaaagcacttagtgtgttcattccggctatatcccttcacagtccacaccgtgagccccggaaactctcacctagctttgtaccaggtgttcaaggcagtcaaactctgcccatctgagacctccttcttccttagccgaaagtccctcaagtcttccgatccctggcaccctccttctctcagccccaatagctggaacaggcaagccggattccgcgcctggagtagccatctgatctctctgagccttacatgcagtgattcccagagccgccgagtgtcctcttctcagcagccaccgttacactctttaagttctcacaggagggctgcacatgttcctgagtag

SEQ ID NO: 183101 - DNA, 480 bp, synthetic construct
  misc_feature 1..480: note = Description of Artificial Sequence: Synthetic coding sequence
  source 1..480: mol_type = other DNA
atgtaccggcggaagagcggctggaccggctgcgccatcacctgctctccatgcaccgccatgacccagctgcggaactgcatgaggctgtctagaagttgctcgctgacatgggagacaccgcgttggtacatggccggaagagtggccacttccacctctggttgccattgctggatgagccgccgagacctaacaccactccctcaccccagtgagcctggggtcctggactgtctcgggccatgccacctcctgcctctgctgagccccggatcgccctgctgggtacttggtttgcactttagcctgcacccgccctccgccgcaagcgcctcccacgccctaacaatcaccagcctgccccccggccttctccctttcgtgggagttgagttaactgcccacccacaagctttgatgggtagggggttcccaagtggcatgggcgccgcaggcagacatctttgctttctctag

SEQ ID NO: 183102 - DNA, 480 bp, synthetic construct
  misc_feature 1..480: note = Description of Artificial Sequence: Synthetic coding sequence
  source 1..480: mol_type = other DNA
atgtaccggcggaagagcggctggaccggctgcgccatcacctgctcaccgtgtactgctatgacacaactgcgcaattgtatgcgactctcacgttcttgtagtctgacttgggagactcctagatggtacatggccggtagggtggcaactagcaccagtggttgccactgctggatgagtcggcgcgatctgacaccacttcctcatccatcagaacctggagtcttggactgtctgggaccttgtcacctgcttccgctgctgagcccagggtctccctgctgggtactgggcctgcacttctctctccatcctccctcggctgcatccgccagtcatgctctaactataacctcattaccccccggcttacttcctttcgttggtgtcgagctgactgcccacccgcaggccctgatgggtagaggatttcccagcggtatgggcgccgcgggacgtcatctttgcttcttatag

SEQ ID NO: 183103 - DNA, 480 bp, synthetic construct
  misc_feature 1..480: note = Description of Artificial Sequence: Synthetic coding sequence
  source 1..480: mol_type = other DNA
atgtaccggcggaagagcggctggaccggctgcgccatcacctgctccccttgcaccgctatgacccagctgcgaaattgcatgagattatctcggagctgctctctgacatgggaaacccctcgctggtacatggcggggcgtgtggcgaccagcacatcaggttgtcattgctggatgagtcgccgagatctgacacctctgccacatcctagcgagccaggcgtgctcgactgcctgggcccctgtcaccttctgcccctactgagcccaggcagcccatgctgggtactcggactccacttttcccttcaccctccgagtgccgcttccgctagccatgcactcacgatcacctccctcccacctggcctgctccccttcgtcggagtcgaattgaccgcgcacccgcaggcacttatgggacgaggattcccctccggtatgggcgccgcagggagacacctttgttttctttag

SEQ ID NO: 183104 - DNA, 480 bp, synthetic construct
  misc_feature 1..480: note = Description of Artificial Sequence: Synthetic coding sequence
  source 1..480: mol_type = other DNA
atgtaccggcggaagagcggctggaccggctgcgccatcacctgctcaccttgtacggccatgacacagttgaggaattgtatgcgactttcacggagctgttccctgacatgggagaccccacgctggtatatggccggccgggttgccactagtacttccggatgtcactgttggatgagcaggcgagatctgacgccactgcctcatccctctgagcctggcgtcttggattgtttggggccttgccacctgcttcctttgttaagccccgggtctccctgttgggttctgggactgcatttctcgctccacccacccagcgccgcttctgcatctcacgcattgacgatcactagtctccctccaggtctgctgccttttgtgggcgtggagctaacagcacacccgcaagcgttgatgggtaggggcttcccaagtggtatgggggctgccgggcgccacctttgctttctgtag

SEQ ID NO: 183105 - DNA, 294 bp, synthetic construct
  misc_feature 1..294: note = Description of Artificial Sequence: Synthetic coding sequence
  source 1..294: mol_type = other DNA
atgagcagcgcccccgagccccccaccttcaagaaggagccccccaaagagaaggagtttcaatccccaggattgcgcggggtgcggacaactactctgttcagggcagtcaatcctgagctatttatcaagcccaacaagccagtcatggccttcggcctagtcaccctttcactctgcgtggcctatataggttatctccatgcaatccaggaaaacaagaaggatctttatgaagcgatagactccgagggccacagttacatgcggaggaagacctctaaatgggactag

SEQ ID NO: 183106 - DNA, 768 bp, synthetic construct
  misc_feature 1..768: note = Description of Artificial Sequence: Synthetic coding sequence
  source 1..768: mol_type = other DNA
atgaccaagaccagcacctgcatctaccacttcctggtgctgagctggtacacctttctcaattactatatttcccaggagggcaaggatgaggtcaagcctaagatcctggctaatggggcccgttggaaatacatgacacttctgaatttactccttcagacaattttttatggggtgacttgcctggacgatgttctcaaacgcactaagggaggcaaagacattaagtttctgacggcgttcagggatctacttttcacaacactggccttccccgtgtcaacttttgtgtttttagcattctggatcttgtttctgtacaatagagatctcatatacccaaaagttctagataccgttataccagtgtggctgaatcatgcgatgcatacttttatcttccctattacgctcgccgaagttgtgctgagaccccacagttacccttccaaaaaaactggactgactttactcgccgctgcgtccatcgcctacatttcgaggatcctctggctctatttcgaaacaggcacatgggtttatcctgttttcgccaagctttctctgctcggacttgcagctttcttctccttgagttatgtgtttattgcctccatctatctactgggtgaaaagcttaatcactggaagtgggtaagcgttcagatcttgcagcgttggagactggaatctgttggcatctgtttccaatggcctgattggaagtcgcctgctaagcaccagctcgtgaagaacatccggtag

SEQ ID NO: 183107 - DNA, 510 bp, synthetic construct
  misc_feature 1..510: note = Description of Artificial Sequence: Synthetic coding sequence
  source 1..510: mol_type = other DNA
atgaccaagaccagcacctgcatctaccacttcctggtgctgagctggtacaccttcctcaactattacatttctcaagagggtaaagatgaagtcaaaccaaaaattctcgctaatggtgcacgctggaagtatatgaccttgctaaatttactgctccaaacaatcttttatggcgttacatgcctggatgatgtgctgaagcgcaccaagggtggaaaggacatcaagtttctgaccgcatttcgagatctgctgttcaccacgctggcattccctgtctccaccttcgtctttttggccttctggatcctgttcttgtataacagagatctgatctaccccaaagtgctggacacagtcatacccgtgtggctcaaccacgccatgcacactttcatttttcccattaccttggctgaggtagtcctaagacctcattcctatccttccaagaagactggtcttacgctactggccgccgccagtattgcctatatctcgaggtag

SEQ ID NO: 183108 - DNA, 693 bp, synthetic construct
  misc_feature 1..693: note = Description of Artificial Sequence: Synthetic coding sequence
  source 1..693: mol_type = other DNA
atgaccaagaccagcacctgcatctaccacttcctggtgctgagctggtatacttttctgaactactacatcagtcaggagggcaaggacgaagtgaagcccaagatcctcgcaaatggagctaggtggaaatacatgacgttgctgaatttactcttacaaacaatattctatggagtgacatgcttagacgatgtgctcaagaggacaaagggcggaaaggacatcaaatttctgaccgcctttcgcgacctattgttcacaaccctggctttcccagtatctacatttgtgtttcttgcattttggatcctcttcctgtacaatcgggacttgatataccctaaggtgctcgataccgtaatcccagtgtggctgaatcacgcaatgcacaccttcatcttccccattactctcgccgaggtggtgttaaggccacactcttatccaagcaagaaaaccgggctcaccctgctggcagccgccagcatagcctatataagccgcattctttggctttattttgagaccgggacctgggtctatcctgtgttcgcgaaactttcacttctgggtctggccgccttcttctctctgtcttatgtctttattgcctcaatatacttgttgggtgagaagctcaaccattggaagtggggcgatatgcgtcagccacggaagaaacgcaaatag

SEQ ID NO: 183109 - DNA, 507 bp, synthetic construct
  misc_feature 1..507: note = Description of Artificial Sequence: Synthetic coding sequence
  source 1..507: mol_type = other DNA
atgaccaagaccagcacctgcatctaccacttcctggtgctgagctggtataccttcctgaactactatatctcgcaggaaggcaaggatgaggtgaaacccaaaatccttgctaacggagccaggtggaagtatatgacactgcttaatctgctgttacagactatattctacggggtcacatgcctggacgacgtgctcaagcgcactaagggggggaaggatatcaaattcctcacggcattcagagacctgctgttcacgaccttggcatttccagtctcaacctttgtgtttctcgctttttggattctcttcctttataacagagacctcatttatcctaaggttcttgacaccgtgattccagtctggctcaaccatgctatgcacacatttatattccccattaccctggcagaagtcgtcttgagaccccatagttaccctagcaagaaaacaggattgacactcctggccgcagcctctatcgcctacatttcctag

SEQ ID NO: 183110 - DNA, 675 bp, synthetic construct
  misc_feature 1..675: note = Description of Artificial Sequence: Synthetic coding sequence
  source 1..675: mol_type = other DNA
atgagcttcgtggaggacgtgaccatcggcgagggcgagagcatccctccagatacccagtttgtcaaaacctggcgcatacagaattcaggggctgaggcctggccacccggagtctgtttgaaatatgtgggtggcgatcagtttggtcacgtaaatatggttatggtgcggagcttagaacctcaagagattgcggacgtgagcgtccagatgtgttctccttcccgggccggcatgtatcaggggcagtggagaatgtgcacagccacaggactgtattacggcgacgttatctgggtcattctatctgtggaagtggggggtctgctgggggtgacgcaacagctgagtagttttgagacagagtttaacacacagccgcacagaaaagttgaggggaattttaaccccttcgcaagtccccagaagaatagacagtcggacgagaataacctgaaggatccaggtggctcagagttcgactccattagcaagaatacgtgggcgcctgcccccgacacatgggcaccagctcctgaccagactgaacaggaccaaaatcgtctctcccagaattctgtgaacctcagtccctccagtcacgctaataatttgagcgtggttacctactccaaaggcctgcacggtccgtacccctttggccaatcatag

SEQ ID NO: 183111 - DNA, 897 bp, synthetic construct
  misc_feature 1..897: note = Description of Artificial Sequence: Synthetic coding sequence
  source 1..897: mol_type = other DNA
atggagggcatggacgtggacctggaccccgagctgatgcagaagtttagctgccttggcaccactgacaaagatgtgttaatatcggaatttcagagactcctaggattccaactgaaccctgctggctgcgcattttttctggatatgactaactggaacttgcaggccgccattggcgcctactatgacttcgaaagcccaaacatctcagtcccttctatgtcatttgtggaagatgtgaccattggagaaggcgagtccatccccccggatacacagttcgtgaaaacatggcggatccagaattccggcgccgaagcctggcctcctggagtgtgtctgaaatacgtggggggcgatcagtttggccatgtcaatatggtgatggtcagatctctcgaaccccaagagatcgccgatgtatctgtgcagatgtgttccccctcccgggcgggaatgtatcagggccagtggaggatgtgcacagccaccgggctctactacggagacgtgatctgggtcattttgtctgtggaagtaggcggccttctcggggtcactcagcagctgagcagttttgagaccgagttcaatactcagccgcaccggaaagtggagggaaacttcaacccgtttgcctcccctcaaaagaaccgacagagtgatgagaataacttgaaggaccctggcggtagtgagtttgattccatatcaaaaaatacttgggcccctgctcccgatacttgggcccctgctcctgaccaaactgaacaggatcagaatcgcctgtctcaaaacagcgtaaacttgagcccctcttcacatgccaataatctgtcagtagtgacatattccaagggtcttcatggaccgtacccctttggacagtcttag

SEQ ID NO: 183112 - DNA, 699 bp, synthetic construct
  misc_feature 1..699: note = Description of Artificial Sequence: Synthetic coding sequence
  source 1..699: mol_type = other DNA
atggagggcatggacgtggacctggaccccgagctgatgcagaagttctcatgtctgggaaccactgataaggatgtgctgatatccgagtttcaacgacttctgggcttccagctgaacccagccggctgtgccttcttcctcgacatgactaattggaatctccaagccgccataggagcctattacgacttcgagtctccaaatatcagcgttcccagtatgtcattcgtcgaagacgtcacaattggggaaggcgaaagtattccgcccgacacccagtttgtgaaaacatggaggatccagaacagtgatgtaatatgggtgatactgagcgtcgaagtcggggggctgctgggcgttacccagcagctttccagttttgaaacagagttcaacacccagcctcataggaaagtagaaggaaattttaacccctttgcctctccgcagaagaatcgacagagtgatgagaacaacctgaaggaccccgggggtagcgaatttgactctatttcgaagaatacttgggcccctgccccagacacttgggcccccgcccctgatcagactgaacaggaccagaatcgtctctcacaaaacagtgtcaatctgtccccttcttcgcacgcaaacaatctgtcagttgtgacctattccaagggtttgcatggcccctacccctttgggcagtcttag

SEQ ID NO: 183113 - DNA, 126 bp, synthetic construct
  misc_feature 1..126: note = Description of Artificial Sequence: Synthetic coding sequence
  source 1..126: mol_type = other DNA
atgggcgacatctacatcacctggatcggctgcggcctggaccggttgcagtgggagaatgtcagcgctatgatcgaggaagtgtttgaagcaaccgacattaagattaccgtatataccctgtag

SEQ ID NO: 183114 - DNA, 459 bp, synthetic construct
  misc_feature 1..459: note = Description of Artificial Sequence: Synthetic coding sequence
  source 1..459: mol_type = other DNA
atggccagcagcctgaacgaggaccccgagggcagccggatcacctacgtcaaaggagacctgttcgcatgcccgaagacggattctctagcccattgtatcagcgaagactgtagaatgggggcaggcatcgcagtgttgttcaagaaaaaatttggaggagtgcaagagctgttgaatcagcagaaaaagtctggtgaggtagctgtcctgaagcgagacgggcgctatatttattatctgattactaagaagagagcaagtcacaaacctacttatgagaaccttcagaaatctctggaggccatgaagagccactgtttgaagaacggtgttacagacctcagcatgccccggataggatgtggtttggacaggttacaatgggaaaacgtctcagcaatgattgaagaggtgttcgaggcaactgatattaagattactgtatataccttgtag

SEQ ID NO: 183115 - DNA, 459 bp, synthetic construct
  misc_feature 1..459: note = Description of Artificial Sequence: Synthetic coding sequence
  source 1..459: mol_type = other DNA
atggccagcagcctgaacgaggaccccgagggcagccggatcacctacgtgaagggggatctgttcgcatgccctaagaccgattccttagcacactgtatcagtgaggactgccggatgggcgctggaattgccgtgctcttcaaaaagaaatttggtggagtgcaggagctgctgaaccagcagaagaagtcaggcgaggtggctgtcctcaagcgggatggaaggtacatctactatctgatcactaagaaaagagctagtcataagcccacttacgagaatctacagaagagcttagaggcgatgaaatctcactgcctgaagaacggcgtaacggacctgtctatgcctaggattggatgcggactcgaccgcttgcagtgggagaatgtgagtgctatgatagaagaggttttcgaagctaccgacattaagattaccgtgtacacattatag

SEQ ID NO: 183116 - DNA, 459 bp, synthetic construct
  misc_feature 1..459: note = Description of Artificial Sequence: Synthetic coding sequence
  source 1..459: mol_type = other DNA
atggccagcagcctgaacgaggaccccgagggcagccggatcacctacgtgaagggcgacctgttcgcctgtccgaagaccgactcgttggcacattgcatctccgaggattgccgaatgggagctggcattgctgttttgtttaaaaaaaagttcggaggggtgcaagaactgctgaatcagcagaagaagtctggagaagtggctgtgctgaagagggacggacgttacatctactatttgattaccaaaaagcgtgcatcacacaaacctacctatgagaacctgcaaaaatctctggaggccatgaaatcccattgtctgaaaaatggtgtgaccgacttgagcatgcctaggataggctgtgggttagatcgactgcaatgggagaatgtttcagctatgatagaagaggtttttgaagcgaccgatattaaaataaccgtctacacactctag

SEQ ID NO: 183117 - DNA, 459 bp, synthetic construct
  misc_feature 1..459: note = Description of Artificial Sequence: Synthetic coding sequence
  source 1..459: mol_type = other DNA
atggccagcagcctgaacgaggaccccgagggcagccggatcacctacgtgaagggcgatctattcgcatgtccaaagaccgactcgctcgcccactgcattagtgaagactgcaggatgggcgccggcattgcagtgctgtttaaaaaaaagttcggcggggtacaggagctgcttaatcaacagaaaaagagcggagaggtggctgtgttgaagcgcgacggacgttacatctactacttgatcactaagaaacgggctagccacaaacctacctatgagaacctgcaaaagtcgctggaagctatgaaaagccactgcctcaaaaacggggtgaccgacctgtcaatgccaagaatcggctgcggtctcgacagactgcagtgggagaacgtgagtgcgatgatagaggaagtgttcgaggctacagacattaaaataacagtctacactctgtag

SEQ ID NO: 183118 - DNA, 396 bp, synthetic construct
  misc_feature 1..396: note = Description of Artificial Sequence: Synthetic coding sequence
  source 1..396: mol_type = other DNA
atggccagcagcctgaacgaggaccccgagggcagccggatcacctatgtgaagggggacctcttcgcctgccccaagaccgactccttggctcactgcatttcagaagattgtcgcatgggggctgggatagcagtactcttcaagaaaaagtttggcggggttcaggaactgcttaaccagcagaaaaagtcaggcgaggttgccgtgctcaagcgagatggcaggtacatctactatttaattacaaaaaaacgggcttctcacaagcccacctacgagaacctgcaaaaatctctggaagctatgaagagtcactgcctcaaaaacggagtgacggacctctctatgcctcggattgggtgtggactcgacaggctgcagtgggagaattag

SEQ ID NO: 183119 - DNA, 1371 bp, synthetic construct
  misc_feature 1..1371: note = Description of Artificial Sequence: Synthetic coding sequence
  source 1..1371: mol_type = other DNA
atggaggccctgggcgacctggagggcccccgggcccccggcggcgacgatccagccggcagcgctggggaaacacccgggtggttgtcaagagagcaggtgttcgtgcttatctctgcagcctctgtcaatctaggctccatgatgtgttactccatcctgggacctttcttccccaaagaagccgagaagaaaggcgcatccaacaccattattgggatgatttttggatgtttcgccctcttcgagctgctcgcctcgctcgtcttcggaaactaccttgtccacatcggtgccaaattcatgttcgtggctggcatgtttgtgtctggaggagttactatcctgttcggcgtgttggaccgggtgcctgacggccccgtgtttattgccatgtgtttcctagtgagagttatggatgcggtgtcatttgcagccgctatgaccgcaagttcctctatactggctaaagcctttccaaataacgttgccaccgtgcttggctccctggagaccttctcaggcttaggcctgatcctcggacccccagtgggaggattcctctaccagagtttcggttatgaggtcccgtttattgtgctagggtgcgttgtgctcctgatggtgccgctcaatatgtatatcttgcctaattacgagtcagatcccggcgaacatagtttctggaaactcattgccttgccgaaggtgggcctgatcgcgtttgttataaacagcctctcttcgtgttttggatttctggatcctacactgtccctgttcgtgctcgaaaagtttaacctccctgcagggtatgttggattggtgttcctaggcatggcgctgtcttacgccatcagttcccccttgtttggattactaagcgacaaaaggcctccactgaggaagtggttacttgtgttcgggaatctgattacagctggatgctatatgctgctcggtcccgtcccgattctgcatatcaaatcacagctgtggctgctcgtccttattctggtggtcagtgggctgagcgccgggatgagcattataccaacatttcctgagattctgagctgtgcccacgaaaatggctttgaagagggtctctccacactgggcctggtttctgggctgttctctgccatgtggtcaattggagcattcatgggtccaaccctggggggatttctctacgagaaaattgggtttgagtgggctgcggccatccaggggttgtgggccctaattagcgggctcgctatgggactgttctacctcctcgagtattctcgtcggaaacgttcaaagagtcagaacattttaagcacagaggaggaaaggaccacactactgcctaacgagacttag

SEQ ID NO: 183120 - DNA, 324 bp, synthetic construct
  misc_feature 1..324: note = Description of Artificial Sequence: Synthetic coding sequence
  source 1..324: mol_type = other DNA
atggaggccctgggcgacctggagggcccccgggcccccggcggcgacgacccagccggctctgctggagagacccctgggtggctttcgcgcgagcaggtgtttgtcctcatcagcgccgcttcggtcaacctgggatcaatgatgtgttattcaatcctaggcccattcttcccaaaggaggcagagaaaaaaggggccagcaatactatcattggaatgatcttcggctttcagtttaccagctggatatgcggtacctctatccccggatacggaacagtgctttgtcacctttttacgacaatttggtcccccaagtag

SEQ ID NO: 183121 - DNA, 324 bp, synthetic construct
  misc_feature 1..324: note = Description of Artificial Sequence: Synthetic coding sequence
  source 1..324: mol_type = other DNA
atggaggccctgggcgacctggagggcccccgggcccccggcggcgatgaccctgctggctccgcaggcgaaacccctggttggttgagccgagaacaagtgttcgtccttatttcggcagcgagtgtgaacctgggttctatgatgtgctattctatcctcggcccattttttccgaaggaggccgagaagaagggagcatcaaacacaattatagggatgatctttggctttcagtttacatcctggatctgcggcacctccataccaggttacggaaccgtactctgccacctgtttacaacaatatggagccccaagtag

SEQ ID NO: 183122 - DNA, 711 bp, synthetic construct
  misc_feature 1..711: note = Description of Artificial Sequence: Synthetic coding sequence
  source 1..711: mol_type = other DNA
atgttctgcttcgtgcgggtggccggcatcctgggcatctggaagttgtcatgtacgtattggtctaagatctacgtctgcagcaggaacgtgtgtctccggcgtagctataacagcctatggggctcattggagaccttcagcgggctcggcctgattttaggacctcctgtgggaggttttctttaccagagcttcgggtacgaagtaccctttattgtcttaggctgcgtggtcctcttaatggtccctctgaacatgtacatacttccaaattatgagagtgatcccggagaacactctttctggaagcttatcgccctgcctaaggtgggcttgatagcttttgtcattaattctctgtccagctgcttcggttttctcgatccaactctttcactgtttgtgttagagaaatttaacctccccgccgggtatgtaggtttagtcttcctgggcatggcactcagttatgccatcagcagtcctctgtttggcctcctgtctgataagaggccacccttgaggaagtggctgttggtctttgggaatttgattacagcaggctgttacatgcttttaggtcctgtgcccattcttcacatcaaaagtcagttatggctgcttgtcctcattctggttgtgagtggattgtcagctggcatgtccatcatcccaacctttcccgagatactgagctgtgcacagtag

SEQ ID NO: 183123 - DNA, 654 bp, synthetic construct
  misc_feature 1..654: note = Description of Artificial Sequence: Synthetic coding sequence
  source 1..654: mol_type = other DNA
atggacgccccccggcggttccccaccctggtgcagctgatgcagccaaaagccatgccggtggaagtgctgggtcacctaccgaagcgcttctcgtggtttcactcagagttcctcaaaaaccctaaagttgtacgcctggaagtgtggctggtcgagaaaatatttggacgaggcggggagaggatcccccatgttcaaggcatgagccagatcctgatccacgtgaatcggctggaccctaatggagaagccgagatcctggttttcggtcgaccctcgtatcaggaggatacaatcaagatgatcatgaacctggcggattaccaccgccaactgcaggccaaaggtagcggtaaagcgctggcccaggatgtggcaacacagaaggcggagacacagcggagctctattgaggttcgtgaggctgggactcagagatctgtggaagtacgcgaagcaggcacacagaggagcgtggaagtgcaggaagtgggcacccaagggagcccggtggaggtccaggaagctggaacacagcagagtttacaagcagctaataaaagcggcacacaacgctcacctgaagcagcaagtaaagccgtcacgcagcgtttcagggaggatgcacgggaccctgttactcgtctttag

SEQ ID NO: 183124 - DNA, 1416 bp, synthetic construct
  misc_feature 1..1416: note = Description of Artificial Sequence: Synthetic coding sequence
  source 1..1416: mol_type = other DNA
atgcccagcgagacccacgccatgctggccaccctggcccgggtggccgcgcttcgccgcacatgcctgttctctgggcgcggtgggggaagaggactctggacggggcggcctcagagcgatatgaataatatcaagccactagagggcgtaaagattcttgatttgacaagagtgctggctggtcccttcgctacaatgaatttaggtgacctgggtgcggaagtcattaaagtggagcgccccggcgccggggatgacactagaacgtggggccctccgtttgtaggcaccgaatctacctattaccttagcgtgaatcggaataaaaagtcaatcgctgtcaatattaaggatccaaagggtgtcaaaatcattaaggaactggccgcagtttgcgacgtttttgtggaaaactacgtgcctggaaaattatctgcgatgggactggggtatgaggacattgacgaaatcgcacctcacataatctactgttccatcacaggatacgggcagactgggccaatttctcagagggcgggatacgatgccgtcgcatccgctgtttcggggttgatgcatatcaccggtcccgaaaacggggatcctgttcggcccggagttgcgatgacggacctcgcgacagggctgtatgcttatggcgcaattatggctggtctgatacaaaagtataagacgggcaagggcctttttattgattgtaacctgctgtcctcacaggtggcgtgcttatctcacatagccgcaaattacctcataggacagaaggaagccaaaaggtgggggaccgcccacggatctatcgtgccatatcaagcgttcaaaaccaaggatggatacatcgtcgtgggagccgggaacaaccagcaattcgctaccgtgtgtaagatcttggacctgcctgagctgatcgacaattcgaaatataagacaaaccaccttagggttcataaccgcaaagagctgattaagatcttgtcagaacggtttgaggaagagttaacctcgaaatggctgtacctgtttgagggttccggtgtgccatacgggccgatcaacaatatgaaaaacgtcttcgccgaaccccagaacgcggtgtccggttttcagtcactcctacactctctggcccacggcccatttctgcacctgcagggttcagcccgtgtgctccataacggccttgttatggaaatggaacacccaacagtgggcaagatttccgtgccaggccccgcggtgcggtatagcaagtttaagatgtcggaggccagaccaccaccgctgctgggacagcacacaacacatatcttaaaagaggtcctccgctacgacgacagagctattggagagttactgagcgccggagtggtggaccagcacgaaacccactag

SEQ ID NO: 183125 - DNA, 1338 bp, synthetic construct
  misc_feature 1..1338: note = Description of Artificial Sequence: Synthetic coding sequence
  source 1..1338: mol_type = other DNA
atgcccagcgagacccacgccatgctggccaccctggcccgggtggctgccctgaggcgcacttgtctgttttccggcagaggcggtggaagaggcctgtggacaggtaggcctcagagtgatatgaataatattaagcctcttgagggcgtgaagatccttgatctaacgcgcgtgttagccggtcctttcgccacaatgaatctgggagatctgggtgctgaggtcatcaaagtggagcgaccaggcgcaggggatgatactcgaacctggggaccaccatttgtaggcaccgaaagcacatactatctgagcgtcaaccgaaataagaagtccattgccgtgaacattaaggatcccaagggcgtgaaaattattaaagagctggccgcggtttgcgacgtgttcgtcgagaactatgtaccaggcaagctgtcagcaatgggacttggatatgaggacatagacgagatagctccccacataatttactgtagtattactgggtatgggcagactggtccaatatcacagagagccggatacgatgctgtcgcctccgccgtgtctggcctcatgcatatcaccggccctgagaacggggatcccgtgcggcccggcgtcgctatgactgatctggcgaccggcctgtacgcatacggggccattatggctggcctcatccaaaaatacaagacgggcaagggactgtttatcgattgtaacctcctgtcctcacaagtggcttgtctgtctcacatcgcagctaactatctcatcggacagaaagaggcgaagcgttggggcacagcccatggtagtattgtgccctaccaggctttcaagaccaaggacggctacattgtggtgggtgccggaaataaccaacagtttgccacagtgtgtaagattttagaccttcccgagttgatagacaacagcaagtataagacaaaccaccttagagtacataatcgcaaagaactgatcaaaatactgagtgaaaggtttgaggaagagttaacctcaaaatggctatatctttttgagggctctggcgtgccctacggacctatcaacaacatgaaaaacgtcttcgcagagccccaggttctgcacaatggcttggtaatggagatggaacaccctactgtgggtaagatttcggtgcccggacccgccgtgcgttactcaaaattcaagatgagtgaggctcgccccccgcccttgctcgggcaacatacgactcatatcctcaaagaggtactcagatacgatgacagggccatcggcgaattgctgagcgcaggggtagtggaccagcacgaaacgcactag

SEQ ID NO: 183126 - DNA, 609 bp, synthetic construct
  misc_feature 1..609: note = Description of Artificial Sequence: Synthetic coding sequence
  source 1..609: mol_type = other DNA
atgctggccaccctggcccgggtggccgccctgcggcggacctgcctcttttccgggcgcggtggcggcagaggactttggacagggagacctcaatccgacatgaacaatataaagccactggagggggtaaaaatcttggacctcaccagagtgttggcaggtccttttgctaccatgaacctgggggacctgggcgctgaggtgattaaggtggagaggccaggcgccggagacgatacccggacttgggggcctccctttgtagggactgaaagcacctattatctgtccgtcaataggaacaagaagtctatagccgtcaatataaaagatcccaagggggtgaagatcataaaagagctggccgccgtttgtgatgtgttcgtagaaaactacgttccaggcaagctgtctgcgatgggactgggctatgaggatattgacgagattgccccccatattatctactgtagcatcacggagaaggggttctctcacgtagcacaggacgggctagatcttcagacatcatctaatctgcctgccctggtgtctcagagtgccggaataaccggaatgtcccatagggcgtggccaactagctag

SEQ ID NO: 183127 - DNA, 1194 bp, synthetic construct
  misc_feature 1..1194: note = Description of Artificial Sequence: Synthetic coding sequence
  source 1..1194: mol_type = other DNA
atgcccagcgagacccacgccatgctggccaccctggcccgggtggctgctttacgacgaacgtgcctatttagcgggagaggaggtgggcgggggctgtggacgggaaggccccagagtgatatgaacaatattaaaccactggaaggggttaaaatccttgatctaacgcgggttctagccggtccttttgccaccatgaacttgggagatctgggtgccgaggtaataaaggtcgaacggccgggcgccggggacgacacccgaacctggggcccaccatttgtaggcacagagagcacatattacctctccgtcaatcggaataaaaagtctattgctgtcaatatcaaggacccaaagggcgtgaaaatcatcaaggagctcgccgctgtctgtgatgtgtttgtagagaattacgttcccggtaagctgtccgccatgggattagggtatgaggacattgacgagatcgctccacacataatctactgtagcatcacagggtatggccagacaggtccgatttcacagcgcgctggctatgacgccgtggccagcgcagtgagtgggctgatgcacattaccggacccgaagtcgcttgcctctcacatatcgcggcgaattatctgatcggccaaaaggaggccaagcgctggggcacagctcacggatccatcgtaccatatcaggccttcaagacaaaggatgggtacattgtggtgggggcaggaaataaccagcagtttgctacagtttgtaagatccttgatttgcccgagttgatagataacagtaaatacaagaccaaccacctccgcgttcataatcggaaggagctgatcaagatcctgtctgagcggtttgaagaagagctgacatcaaagtggctctacctatttgagggtagcggagtgccctatggcccgatcaataacatgaagaacgtgttcgccgagccgcaggtactccataacggccttgtgatggagatggagcatcccactgtcggcaagatctccgtgcctggccccgcggtccgttattccaagtttaagatgagtgaagcccgaccacctcccctacttggtcaacacaccacccacattttgaaggaagtgttacgctacgacgatcgggccatcggtgagttgttatcagcaggggtggtggaccagcacgagactcactag

SEQ ID NO: 183128 - DNA, 540 bp, synthetic construct
  misc_feature 1..540: note = Description of Artificial Sequence: Synthetic coding sequence
  source 1..540: mol_type = other DNA
atgcagcggcagaacttccggccccccacccccccctaccccggcccagggggcggcgggtggggcagtgggagctcatttcgcggtacacctggggggggcggccccaggccgccttctccccgggacggctacggatctccgcaccacactcctccctacggtcctagatctagaccttacggctcttcacacagcccaaggcacggggggagcttcccaggcggccgctttggtagtcccagtcccggcggctaccccggatcatattcccgtagcccggccggctcccaacaacagtttggctactcgcctgggcaacaacaaacccatccacagggatctccccggactagcaccccttttggatctggcagggtgcgagaaaagagaatgagtaatgagttggagaattattttaagccgtcgatgctggaggacccatgggccgggttggaacctgttagtgtcgtcgacatatctcaacagtacagcaacacgcagacctttacggggaagaaaggacggtatttctgttag

SEQ ID NO: 183129 - DNA, 480 bp, synthetic construct
  misc_feature 1..480: note = Description of Artificial Sequence: Synthetic coding sequence
  source 1..480: mol_type = other DNA
atgaagatcgtggacgagcgggagaagaacctggacgacaaggcctaccgaaacatcaaggagctggagaattacgccgaaaatactcagtcctcactgctgtatttgacgctggagattcttgggatcaaggacttacacgccgaccacgcagcttcccatatcgggaaggctcagggtatcgtcacctgtctcagggccactccataccacggctcaaggcgcaaagtctttcttcccatggatatttgtatgttacacggcgtctctcaggaagatttcctgcggcgcaatcaggacaagaatgtgagggatgtgatctatgatatagccagccaggcacaccttcatttgaagcatgctcggtcatttcataagacggtaccagtgaaagcgttcccagccttcctccagactgagataaaagatgccgacacccagggggtgtgcctggctcaacccgcatccctcgggaagtag

SEQ ID NO: 183130 - DNA, 1002 bp, synthetic construct
  misc_feature 1..1002: note = Description of Artificial Sequence: Synthetic coding sequence
  source 1..1002: mol_type = other DNA
atggccgccagcgcccacggcagcgtgtggggccccctgcggctgggcatacccggactgtgttgccgccgaccccccctcggactctacgctcgcatgcgaaggttgcctggacccgaggttagcgggcggtccgtggccgcagctagtgggcccggagcctggggtacggatcactactgcctcgaactgctgcggaaaagggactacgaagggtacctgtgttctcttctgttgcctgctgagtcccgttcctctgtttttgccttgcgcgcattcaacgtcgagctggcccaggtgaaagactctgtgtcagaaaagactattggcctgatgagaatgcaattttggaagaaaaccgtggaggacatttattgcgacaaccctccacaccagccggtggctatcgaactgtggaaggccgtgaagcgacacaacttgacgaaacggtggctgatgaaaattgtggacgaaagagagaagaacttagatgacaaggcctaccgaaatatcaaagagctggaaaattacgccgagaatacacagtcttccctcctgtacctgaccttagaaattttagggattaaagatctccacgctgatcacgccgcatctcatatcggaaaggctcaggggattgtcacttgtctacgagcaaccccttatcacggctccagaaggaaggtttttctgccaatggacatctgtatgttgcacggagtgtcccaggaggacttcctgcgcagaaatcaggataaaaatgtgcgcgatgtaatatacgacatcgccagtcaggctcacctgcacttgaagcatgccaggtcttttcacaagaccgtacctgtgaaggcttttcctgccttccttcagacagtgtcactcgaggacttcttgaagaagattcagcgagtggactttgacattttccatccatccttacaacagaaaaacactctgctgccactctacctctatattcagtcatggaggaagacctattag

SEQ ID NO: 183131 - DNA, 846 bp, synthetic construct
  misc_feature 1..846: note = Description of Artificial Sequence: Synthetic coding sequence
  source 1..846: mol_type = other DNA
atgcccatcagcatcagccacagcagctggctggtgcagcggaagagagactacgaagggtacctgtgctccctcctgctcccggctgagagccgcagctccgtgtttgccctgcgcgccttcaacgtggaactcgctcaggtgaaggactccgttagcgaaaagaccatagggctgatgcgtatgcagttttggaagaagacggtggaagacatttattgcgacaatcctccacaccaacccgtcgccattgagctgtggaaagccgtcaagcggcataatttaacaaaacggtggttaatgaagatcgttgacgagcgagaaaagaacctggatgacaaggcatatagaaatatcaaggaactggaaaactacgccgaaaacacccagagcagtctgctatatcttacgttggagattctcgggattaaggacctgcacgccgaccatgccgcatctcacatcggcaaagcgcaggggatcgtaacatgtctgagagccacaccataccacggttcccgcaggaaggtgtttctgcctatggatatttgcatgttgcatggggtctcccaggaagactttctgcgacggaatcaggataaaaacgtccgggacgtcatctacgatatagcttctcaggctcacctgcatctgaagcacgcccggtcctttcataagacagtgcccgtaaaagctttcccggcgtttttacaaactgtcagcttagaagattttctgaaaaagatccagagagtagactttgacatttttcacccctccttacagcagaaaaacacccttctgcctttgtacctgtatatccagtcgtggcgaaaaacttattag

SEQ ID NO: 183132 - DNA, 321 bp, synthetic construct
  misc_feature 1..321: note = Description of Artificial Sequence: Synthetic coding sequence
  source 1..321: mol_type = other DNA
atgaaggccaagcggagccaccaggccgtgatcatgagcaccagcctgagggtctccccctccatacacgggtatcactttgacaccgcctctaggaagaaggcagtggggaacatttttgagaataccgaccaggagagcctcgagagactctttcggaactcaggtgacaagaaagccgaggagcgggcgaagatcatctttgccatagaccaggacgtagaggagaagactcgcgcccttatggccctcaaaaaacggactaaggacaagcttttccagtttctcaaactgaggaaatattctatcaaggttcattag

SEQ ID NO: 183133 - DNA, 1185 bp, synthetic construct
  misc_feature 1..1185: note = Description of Artificial Sequence: Synthetic coding sequence
  source 1..1185: mol_type = other DNA
atggccggcgccgccatggccgagcggggccgggtgcccccccccgcaccggcacccagcacagaggggctgcctagagcttttctgcagtccctgcgcactctgttcgacatactcgacgatcgtagacgtggctgcgtccatctcagagaaatcgagtctcgttggcaagggacagatgcccgggagctccctaggggggtcctagagggtctgaggcaggtggcccctgcgtcaggttacctgacctttgagcgattcgtcgcaggcttacgtaccagcctgctctctgctgatggtggacctcgcgatccgacgcgcgcccctgccagaccgggggatcagcctccaccaccccctcagaggctggtgttcgcacctgccgatgaaccgcggacggtgcttgaacgaaagcccctgccactgggcgtgagagccccccttgcaggaccttctgctgcagctcggagccctgagcagctctgcgctccggcggaagctgccccatgtccagccgaacccgagaggagccagtcagccgcactcgagcctagctctagtgccgatgccggagctgtcgcctgcagggctttagaagccgactctggagacgctaggcgcgcaccccgagcccgtggcgagcgcagaaggcatactattgccagtggcgttgattgcgggctactgaaacaaatgaaagagctcgaacaggagaaagaggtcctgctgcagggcctcgagatgatggccagaggcagggattggtatcagcagcagctgcagagggtccaggagagacagcggagactgggccagtctagagcctctgccgattttggggctgccgggtcaccccggccactcggccggttgcttccgaaggtccaagaagtggctaggtgccttggagagctgctggccgcagcctgcgccagccgtgcgctgcccccatcctcgtctggtcctccctgcccagcactgacgtcgacatcaccacctgtgtggcagcagcaaacaatcttgatgctgaaagagcagaacaggttattgactcaggaggttacggaaaaaagcgaacggattacccagcttgagcaagagaagtccgcgctgattaagcagctcttcgaagccagagccttgtcacagcaggatggtgggcccctcgatagcacgtttatctag

SEQ ID NO: 183134 - DNA, 1035 bp, synthetic construct
  misc_feature 1..1035: note = Description of Artificial Sequence: Synthetic coding sequence
  source 1..1035: mol_type = other DNA
atgcggcggccccggcagggcggcggcggcgccggcggcagcgccgccgcacgagctagggcgggcggacttggcggcggtagcgttcccgcgagggcccgcggggcacccgctgctgccagggccgcctggctcagagacttatgtgctcgcatggccagacctccccgtcagcaccccggcgtgtgggcctccctgttactgctgctgttgacaggacccgctgcgtgcgcagccagcccagccgacgacggagccgggccgggaggtcgcgggccccgcggccgggcgcgcggtgataccggtgcagatgaagccgtcccccgacacgactcttcatatggcaccttcgcaggcgagttctacgatttgagatacctgtcagaagagggctatcccttccccaccgcccctccagtggatccctttgcaaaaatcaaggtggatgactgtggtaaaactaaaggctgttttaggtacggaaagccaggatgcaacgctgagacatgcgactactttctatcctatcggatgataggagcggacgtcgaatttgaactgagcgcagacactgacggctgggttgccgtcggctttagctctgacaagaagatgggcggtgacgatgtcatggcatgcgtgcatgatgacaatgggcgggtacggattcagcatttctataacgtcggtcagtgggctaaagagattcagcggaaccccgctcgcgacgaggagggcgtgttcgaaaataacagagtgacatgtcggtttaaacggccggtgaacgtgcctcgggacgagaccatcgttgaccttcacctttcttggtattacctcttcgcctgggggccagcaattcagggcagcataacccgccacgacatcgactctccgcctgcgtccgaacgcgtcgtgtctatttacaagtacgaggacatcttcatgccatccgctgcttaccagacattcagtagcccattttgtctgctactgattgttgctcttacattttatttgctgatgggcacaccctag

SEQ ID NO: 183135 - DNA, 393 bp, synthetic construct
  misc_feature 1..393: note = Description of Artificial Sequence: Synthetic coding sequence
  source 1..393: mol_type = other DNA
atgagcagcagcggcggcgcccccggcgccagcgccagcagcgcccctcccgcccaggaagaaggaatgacttggtggtacaggtggctctgccgcctctctggagtactcggagccgtcagttgtgcaattagcggactgtttaactgcattacaattcatcccctaaacatcgcagcaggcgtttggatgatgatggcagttgtcccgattgtgatttcattgactttgacaacgctccttggtaacgctatcgcatttgccacaggtgtcctgtacggtctctctgctctgggcaaaaagggcgacgctattagctatgccaggattcagcagcagcggcagcaagccgacgaggaaaaactggctgagaccctggagggcgagctgtag

SEQ ID NO: 183136 - DNA, 519 bp, synthetic construct
  misc_feature 1..519: note = Description of Artificial Sequence: Synthetic coding sequence
  source 1..519: mol_type = other DNA
atgagcagcagcggcggcgcccccggcgccagcgccagcagcgccccaccagcacaggaagagggcatgacatggtggtatcgctggctgtgccggctcagcggcgtcttaggcgcggtctcctgtgccatctccggcctcttcaattgcatcaccatacaccccctcaacatcgcagcgggggtttggatgatcatgaatgcttttatcctcctgctgtgcgaagcacccttttgttgccaatttattgagtttgccaacaccgttgcagaaaaggtcgatcgactgcgcagttggcagaaagctgtgttctattgtggcatggctgttgtccccatcgttatctcactaacgctgaccactctgctcgggaatgcaattgctttcgctaccggagttctgtacggtctgtcggctttgggcaagaagggcgatgctattagttacgcgcgtatccagcaacagaggcagcaagcagatgaagagaaactggcagagactttggagggagagttgtag

SEQ ID NO: 183137 - DNA, 345 bp, synthetic construct
  misc_feature 1..345: note = Description of Artificial Sequence: Synthetic coding sequence
  source 1..345: mol_type = other DNA
atgctgaccgccgccggcagcaccgccgagctgagcgcctgcgccatttctggacttttcaattgcatcaccatccaccctctcaatattgcagccggtgtatggatgatcatgaacgcattcattctgctcctttgtgaggctcctttctgctgccaatttatagagttcgcaaacacagttgctgagaaagtggatcgcctgagatcttggcagaaagctgttttctattgcggaatggccgtagtgccaatcgtcatcagcctgaccctcacaacgcttctgggaaatgctatcgccttcgccaccggggtcctctatggtctttctgccctgggtaagtag

SEQ ID NO: 183138 - DNA, 489 bp, synthetic construct
  misc_feature 1..489: note = Description of Artificial Sequence: Synthetic coding sequence
  source 1..489: mol_type = other DNA
atgagcagcagcgccccccccgcccaggaggagggcatgacctggtggtacagatggctttgtagactgtccggagtgttaggagccgtgtcatgtgcaataagtggcctttttaattgcatcacgattcatcctctgaacatcgcagccggcgtgtggatgattatgaatgctttcattcttctactctgcgaagccccattctgctgccagtttatcgagtttgcaaataccgtggccgaaaaggtggaccgcttgcggtcttggcaaaaagcagtgttctattgtggaatggccgtcgttccaattgtgatctcccttactttgaccaccctactcggtaatgccatcgctttcgccacgggagtgctgtacggtctgagcgctcttggaaaaaagggcgacgcgatctcttacgcccgcatccagcagcagcgacagcaggcggatgaagaaaagctggcagagactctggagggcgaattgtag

SEQ ID NO: 183139 - DNA, 702 bp, synthetic construct
  misc_feature 1..702: note = Description of Artificial Sequence: Synthetic coding sequence
  source 1..702: mol_type = other DNA
atgagcagcagcggcggcgcccccggcgccagcgccagcagcgccccccccgcacaggaagaggggatgacttggtggtatagatggttatgtcgcttgtcgggtgtcctgggggccgtgagctgtgccatcagcggactgtttaattgcattacaattcaccctctgaacatagctgccggagtttggatgatcatgaacgctttcatactcttgctgtgcgaagcacccttctgttgtcagttcatagagttcgctaacactgtggcagagaaggtcgaccgactgaggagctggcagaaggcagtgttctattgcgggatggctgttgtccccatcgtcatctctttgacacttaccaccttactgggtaatgccattgctttcgcaaccggggtgctatatggcttgtctgctctggggaaaaaggcacagacggaagctggatctttcgccgcacagcaccctagagagcccggaccattttcagagggcacaaggcaggccttcgccactcccgctgtggtaagtggagaaatccgaatgccagccggcgccatgcggagcccgatgcctggtagcagcagtcgcggtagtcgcagaatgagacgctccagtcgtaggccttggcgtggctcatgtgagggactcggcgctcctccctctctctcacccctgctggcactatgcggctcgaaatag

SEQ ID NO: 183140 - DNA, 576 bp, synthetic construct
  misc_feature 1..576: note = Description of Artificial Sequence: Synthetic coding sequence
  source 1..576: mol_type = other DNA
atgagcagcagcggcggcgcccccggcgccagcgccagcagcgccccccctgctcaggaagaaggcatgacctggtggtatcgctggctttgccgtctctccggcgtgctcggtgccgtgagttgtgcgatatccggattatttaattgtattacaattcatcctctgaatatagccgccggcgtctggatgatgatggcggtcgtgcccattgtgattagccttactctaacgacgctgctcgggaacgccattgcttttgccacgggtgtcctgtacggcctctctgcccttggaaaaaaggcccagaccgaggcaggctccttcgccgctcaacatccaagggaaccaggccctttcagcgaaggcacacgccaggcattcgccacaccagccgtcgtgtcgggggaaatacggatgccggctggagcgatgcgatctcccatgcccggcagcagctctagaggaagccggaggatgaggcgctcttcccgccggccttggcggggtagttgcgaaggccttggggcccctccttcactgagcccgcttctggctctgtgtgggagtaagtag

SEQ ID NO: 183141 - DNA, 669 bp, synthetic construct
  misc_feature 1..669: note = Description of Artificial Sequence: Synthetic coding sequence
  source 1..669: mol_type = other DNA
atgagcaccctgtgccccccccccagccccgccgtggccaagaccgaaattgcgcttagcggcaagtctcctctccttgctgctactttcgcttattgggacaacatattagggcctagagtgagacacatctgggctcctaagactgaacaggtcctcctgagtgacggtgagatcacctttctcgccaaccacaccttgaatggcgagatcttgcgaaatgctgagtctggcgctatagatgtaaaattctttgtcttatccgaaaaaggcgtgattatcgtgagtcttatcttcgacggtaactggaacggtgataggtcaacctacgggctgtccataatcctgccacaaactgaactctccttttatctgcctttgcacagggtttgtgtggatcgcctgactcatattattaggaagggcaggatatggatgcacaaagagcggcaagaaaatgtgcagaaaatcatacttgaggggactgagcggatggaggatcaaggtcagtcaatcatacctatgcttacaggtgaagtgattccagtgatggagttactgagttccatgaagagtcactccgtgcccgaagagattgacatcgctgacactgtcttgaatgacgatgacatcggcgatagctgccatgagggcttcctgctcaaatag

SEQ ID NO: 183142 - DNA, 669 bp, synthetic construct
  misc_feature 1..669: note = Description of Artificial Sequence: Synthetic coding sequence
  source 1..669: mol_type = other DNA
atgagcaccctgtgccccccccccagccccgccgtggccaagaccgagattgcactctcagggaaatcacccttgttagcggccacctttgcctactgggataatatcctggggcccagggtgcgacacatctgggcccctaaaacagagcaagtcctgctctccgatggcgaaataacatttctcgccaaccacaccctgaatggcgaaattctgcgaaacgcagaaagtggtgctatcgatgtcaagttctttgttctctccgagaagggagtgatcatcgtgtccctcatttttgacggcaattggaatggcgataggagcacttatggactttccatcatcctgccacagacagaattgagcttctatttacctctgcatcgggtctgtgtcgaccggctgactcacattatccggaaagggcggatttggatgcacaaggaacgacaagagaacgtgcaaaagattattctagaagggacggaacgcatggaagaccaggggcagagtattattcctatgctgactggcgaggttattcccgtaatggagctgctaagctctatgaagtcacattcagtgcccgaagagattgacattgcagatacagttctgaacgacgacgacatcggagatagttgccatgagggatttctgttgaaatag

SEQ ID NO: 183143 - DNA, 1446 bp, synthetic construct
  misc_feature 1..1446: note = Description of Artificial Sequence: Synthetic coding sequence
  source 1..1446: mol_type = other DNA
atgagcaccctgtgccccccccccagccccgccgtggccaagaccgaaatcgccctgagtggcaagagcccactactagccgcgactttcgcttattgggacaacatactgggtcctcgggtgagacatatctgggcccctaaaactgaacaagtacttctgtcggacggcgagattacattccttgctaatcacacactgaacggtgaaatcttgcggaatgccgaatcgggtgccatcgatgttaagtttttcgtgctctctgaaaaaggggttattatagtttccctcatttttgacggaaactggaatggggaccgttcaacctatggccttagcatcatcctcccccagaccgagctgtcattctacctgccactccatagagtgtgtgtcgaccgcctcacccacatcattcgcaagggcagaatttggatgcataaagagcgtcaggagaatgtgcaaaagatcatccttgagggtaccgagagaatggaagatcagggacagtcaatcatccccatgctaacaggggaagtcatacctgtgatggagctactttcaagcatgaaaagtcactccgtccctgaggagatcgatatcgccgacacggtgttaaatgacgatgatattggtgactcctgccatgagggcttcctgttgaatgccatctccagccacctccaaacctgcggctgttccgttgtagtaggcagttcagccgagaaagtgaacaaaattgttaggactctttgtctgttcctgacccctgctgaacgaaagtgttcccggttgtgtgaggcagaaagtagtttcaagtatgaatccggtctcttcgttcagggtctcctgaaggacagcacagggagttttgtcctgccgttccggcaggttatgtatgccccgtaccccactacccatatagacgtggacgtgaacactgtgaaacagatgcctccatgccatgagcacatctacaatcaaagacggtacatgcggagcgaactcacagcgttctggcgcgccacctctgaggaggacatggcccaagatacaatcatctataccgatgagtctttcaccccagacctgaatatctttcaggacgtattgcacagagataccctggtgaaggcctttctcgatcaggtgtttcagctcaagccaggcctgtccttgcggtctacattccttgcacagttcctgctcgtgttgcatagaaaggcgcttactctgattaagtatatcgaagacgacacgcagaagggcaagaaaccctttaagtccctgcgtaacttaaagattgacctggacctcaccgccgagggggacctgaacattatcatggccctggctgagaaaattaagcccgggcttcattctttcatcttcggccggccattctatacaagtgtgcaagagagagatgtgcttatgactttctag

SEQ ID NO: 183144 - DNA, 168 bp, synthetic construct
  misc_feature 1..168: note = Description of Artificial Sequence: Synthetic coding sequence
  source 1..168: mol_type = other DNA
atgcagaaccagagcagcaccaaccaccccggcgccagcatgctgatgcatatccacctggatacatcatccctgaagacactgcacctcggaacactattctttctgttctacttggcccttacccagaatgaagaaaatatctgtgatggtaaagtgactctgtag

SEQ ID NO: 183145 - DNA, 225 bp, synthetic construct
  misc_feature 1..225: note = Description of Artificial Sequence: Synthetic coding sequence
  source 1..225: mol_type = other DNA
atgcagaaccagagcagcaccaaccaccccggcgccagcatcgccttgtcccgcccgtcgctgaataaggatttccgcgaccacgcggagcagcaacatatagcagcccaacaaaaagctgccctccaacacgcacacgctcactcctccggctactttatcacacaggactctgcatttggtaacttgatccttcccgtgctgccccgcctggacccggagtag

SEQ ID NO: 183146 - DNA, 168 bp, synthetic construct
  misc_feature 1..168: note = Description of Artificial Sequence: Synthetic coding sequence
  source 1..168: mol_type = other DNA
atgcagaaccagagcagcaccaaccaccccggcgccagcatgctgatgcatattcacctggacacgtcaagtctgaaaacactgcacctgggcacactgttctttttgttctatttagcgctcacccagaatgaagagaatatttgcgacgggaaggtgactctgtag

SEQ ID NO: 183147 - DNA, 315 bp, synthetic construct
  misc_feature 1..315: note = Description of Artificial Sequence: Synthetic coding sequence
  source 1..315: mol_type = other DNA
atggccgccaacagcagcggccagggcttccagaacaagaaccgggtggctatactggctgaactggataaagaaaagcgtaagctgctcatgcaaaaccagtctagtacaaatcacccaggcgccagtatagcactcagtcgcccttccctcaacaaggactttagagatcacgctgagcagcagcacatagctgcacagcagaaggcagccctgcagcatgctcacgctcactcatcagggtacttcatcacccaggattctgctttcgggaacctgatcctccctgtattgccccgcctagacccagagtag

SEQ ID NO: 183148 - DNA, 2190 bp, synthetic construct
  misc_feature 1..2190: note = Description of Artificial Sequence: Synthetic coding sequence
  source 1..2190: mol_type = other DNA
atgttcagcgccctgaagaagctggtgggcagcgaccaggcccccgggcgtgacaagaatatcccagcaggcctccagtccatgaaccaagctctgcagagacgtttcgcaaaaggggtgcagtacaatatgaagattgtgattagaggcgaccgcaatacgggcaagactgcattatggcatagactgcagggccggccctttgtcgaggaatacattccaacacaggagatccaggtcactagcatccattggagctacaagactaccgacgacatcgtgaaggtggaagtgtgggacgttgtggacaagggtaaatgcaagaagcgaggagatggcctaaaaatggaaaatgacccacaggaagctgagagcgagatggcacttgatgccgagttcctagatgtatataagaactgtaatggggtggtgatgatgttcgacatcacaaaacagtggaccttcaattatatcttgagggagctgccaaaagtgcctacccatgtgcctgtgtgcgtcctcggcaactatagggacatgggcgaacaccgcgtgattctccctgacgatgtgcgggacttcatcgataatcttgatagacccccgggcagcagttacttccgctacgccgagagcagcatgaagaacagcttcggcctgaagtatctgcataagttttttaacatcccattcctacagctccagcgcgagactttgcttaggcagcttgagaccaaccagttagatatggatgctacattagaggagttgagcgtgcagcaagagaccgaggaccaaaactacggcattttcctggaaatgatggaggctaggtcgcgcgggcatgccagccctctggcggcaaacggtcagtctcccagtcctggtagccaatcaccagtggtgccagctggtgcggtgagcacaggctccagttccccaggcacgccccaacctgcgccacaattgcccctgaacgccgctcccccttcttccgtcccacccgtgccacctagtgaagccctgcccccccccgcctgcccatccgcccccgcacctcgccgtagcattatctcccgcctatttgggaccagccctgctacggaggccgcccctcccccccctgaaccagttccagcagccgaagggccagccacagtacagagcgtcgaggatttcgtccccgacgatcgtcttgataggtccttcctggaggacacaacgccagcccgggacgaaaaaaaagtgggtgcaaaggcagctcagcaggacagtgattccgatggcgaggccctcggcggaaaccctatggtcgctggctttcaggacgatgttgatctcgaggatcaacctaggggaagcccccctttgcctgcggggccagttccctcacaagatattacattatccagcgaagaggaggctgaagtcgctgctcctacaaaaggccctgcccccgctccacagcagtgcagtgagccggagacaaagtggtcttccataccggccagtaagcctcgcagaggcaccgcacccacaaggaccgccgctcccccctggcctggtggcgtgagcgtcagaacaggaccagagaagcgctcctctacccgccctcctgccgagatggagccgggtaaaggggagcaagcatcctcaagcgagtcagacccagagggccccatcgcggcccagatgttgagtttcgtgatggacgaccccgactttgagtctgagggctccgatactcagcggcgtgccgatgactttcccgtcagagacgacccatcagacgtgacggatgaagacgaaggtcctgccgagccaccgcctccgcccaagcttcctcttcctgctttcagactaaaaaacgattcagacttgtttggactcgggctggaggaagccgggcccaaagagtccagcgaagagggtaaagaaggcaagaccccctccaaggagaaaaaaaagaaaaagaaaaagggcaaagaggaggaagaaaaagccgcaaagaaaaaatctaagcacaagaagagtaaagacaaagaggaaggaaaagaagagcgacggagaagacagcaacgaccaccaagatcaagggaacgaacggccgcggacgaactagaagcctttcttgggggtggcgcccccgggggtagacaccccggcggcggcgactatgaagagctttag

SEQ ID NO: 183149 - DNA, 1563 bp, synthetic construct
  misc_feature 1..1563: note = Description of Artificial Sequence: Synthetic coding sequence
  source 1..1563: mol_type = other DNA
atgttcagcgccctgaagaagctggtgggcagcgaccaggcccccggaagagataagaacatcccagctgggctgcagagcatgaatcaggccttgcagaggcgcttcgctaagggggttcagtacaatatgaaaatcgtcatacgcggggatcgtaataccggaaaaacggcactgtggcatcgtctgcaagggcgtccattcgttgaggagtacatccccacacaggagatacaggtgacctcgatccattggagttataagactacggacgacatagtcaaagttgaagtctgggacgtggttgataagggcaaatgtaaaaagcggggcgatggtcttaagatggaaaatgatccccaggaggccgagtccgagatggccttagatgccgagttcctggacgtgtacaaaaattgcaacggggtggtaatgatgttcgacattacgaagcagtggacatttaattacattctaagggagctgccaaaagtgccaacacacgtacccgtgtgtgtcttggggaactaccgggatatgggggaacaccgcgtcatcctgcctgatgatgtgcgtgacttcatagacaacctggaccgtccacccgggtcgtcatatttcagatacgcagaaagtagcatgaaaaattcattcggcctgaagtacctgcacaagttctttaacatccctttcttgcagctgcagagggagacattgttacgccagctagagactaatcagctggatatggatgccacccttgaagaactgagcgtgcagcaagaaacagaagatcaaaactatgggatcttcctggagatgatggaggctcgcagccgcggacatgcctctccccttgcggctaacggccagtctccatcacccgggtctcagtctccagtggtgcccgctggggcagtctcaaccggctcaagctctcctggcactccgcaaccagcccctcagctgcccctcaatgctgcccccccgtccagtgtgcctccagttccgccatctgaggctctgcccccacccgcttgtccttccgcacccgcacctcgaagaagcatcatttccaggcctcccccctggggctggagactccggggagccctcggaagacgagggcaatggcccccatggggggggggaagggcttgtcactgtctgggtagacacctgcctctttatcaccggctttgtcgctgcccagtggccgcagtgtgtgcatccgaactcgaagaagccggccactggtggtctcccggctgggccctccaggtgctgggactccaggcccagtgtgagcctgccttgcaagaggggcgagggcagctggcttccgcccgcctaggagggcatcctgggcccctaggggccgagcccccagtgttcttgcgtgacgtcactgaagcccaagagggtccagttcgagtttgtttgcagcgtctagggagaggtagactggcggttggttgcgcacttccgcgtcacctgctggcactgcgggcacacttaggcccacagcatgcttacggctcggctagcggtcgcgaaccctag

SEQ ID NO: 183150 - DNA, 2193 bp, synthetic construct
  misc_feature 1..2193: note = Description of Artificial Sequence: Synthetic coding sequence
  source 1..2193: mol_type = other DNA
atgttcagcgccctgaagaagctggtgggcagcgaccaggcccccgggcgggataagaacatacctgccggtttgcaatcaatgaaccaggcccttcagaggagatttgctaagggagtacagtacaacatgaagatcgtcattaggggcgatagaaatacagggaagacagctctctggcacagactgcaaggtagacctttcgtagaggagtatattcccacacaggagatccaggtgacatcaattcattggagttacaagaccactgacgacatcgtgaaagtggaagtgtgggacgtggtggacaagggtaaatgcaagaaaaggggagacggtttgaaaatggagaacgatccccaggaggccgagtcagagatggctttagacgcagagttcctggatgtctataagaattgcaacggagtagtgatgatgttcgatattactaagcagtggacattcaactacattctcagggaacttccaaaggtgccaactcacgtgcccgtatgcgtgctaggaaactatcgggacatgggcgaacaccgcgtgatactcccagatgacgtcagggactttatcgacaacctggattcaaggccacccggcagcagttatttcaggtacgccgaaagttctatgaagaatagcttcggcctaaagtacttacacaagttcttcaacattcccttcctccagctgcagcgggaaactctgctgaggcagctggaaactaaccaactcgatatggatgccacactggaggagcttagcgtacaacaggaaactgaagatcagaactacggaatattcctcgaaatgatggaggcccggtctaggggccacgccagtccgttagccgcaaacggccagagcccatctcctggatcccagagcccggtggtccctgctggcgctgtcagcacgggcagctcttcccccggaactccccagccagccccccagcttcccctgaatgctgccccacctagttccgtgccgccagtacccccctccgaagccctccccccaccagcgtgccctagtgcaccggctcctcggcggtctattatctctaggttgttcgggacctcacccgcaaccgaagctgcacctccacctccagagcccgtgcccgccgcagagggtcccgcaaccgttcagagtgttgaagacttcgtgcctgacgaccgactggacaggagctttctagaagacactacacccgctcgggatgaaaaaaaggtgggggctaaagccgcgcagcaggacagcgattcagatggagaggccctcgggggcaaccccatggtggctggctttcaggatgatgttgacctggaggaccagcctagaggaagcccgcctctcccggctggcccagtcccaagtcaggacataactttgtctagtgaggaggaagccgaagtcgctgctcccaccaaaggccccgctcctgctccccagcaatgcagtgagcctgaaaccaaatggagcagcatcccagcctccaagccgcgcaggggcacagccccaacacgcacagcggcccctccgtggcccggcggggtctcggtaaggaccggaccagaaaaaagaagctctacaagaccccccgccgaaatggaacctggcaagggggagcaggcgtcttcttctgaatccgaccccgagggaccgatagctgctcagatgctgtccttcgtcatggatgaccctgatttcgagtccgaggggtccgatacgcagagacgggctgacgattttcccgtgagagatgaccccagcgacgtgactgatgaagacgagggacccgccgaaccgcccccacctcccaagctgccgttgccggcattccgcctgaaaaacgatagtgatctgtttggactcggactcgaagaggcaggccccaaggagtcctccgaggaaggtaaggaagggaaaactccttctaaagagaaaaagaaaaaaaagaagaagggtaaagaggaggaggaaaaagccgcaaaaaagaagtcaaaacacaaaaagagtaaggataaagaagagggaaaggaagagaggagaagacggcagcagcgcccacctagatcaagggagagaacagccgccgatgaattggaggcgttcctgggcggcggcgctcctggaggacgtcaccccggaggcggagactatgaagagctgtag

SEQ ID NO: 183151 - DNA, 945 bp, synthetic construct
  misc_feature 1..945: note = Description of Artificial Sequence: Synthetic coding sequence
  source 1..945: mol_type = other DNA
atgttcagcgccctgaagaagctggtgggcagcgaccaggcccccggcagggacaagaacatcccggctggattacagtctatgaaccaggctctgcagagaagatttgctaagggcgtgcagtacaacatgaaaatagtgattagaggcgatagaaataccggcaaaacggccttgtggcatcgcctccaaggccgacccttcgtcgaggagtatatcccaacacaggagatccaggttacttctatccactggagctacaagaccacggatgacatcgttaaggtggaggtttgggatgttgtggacaagggaaaatgcaaaaaacgaggcgatggactgaagatggaaaacgatccccaggaagcggagtctgagatggcactggatgctgaattcctagatgtttataaaaattgcaatggggttgtcatgatgttcgacatcaccaaacagtggacattcaattacattcttcgggaactgcccaaagtcccaacacacgtgcccgtctgcgtgttggggaactacagagatatgggcgaacaccgggtgatcctgcctgacgatgtccgcgattttatcgataaccttgaccgccctccggggtctagttattttcggtatgcagagtcttccatgaagaacagcttcggtttgaagtacttgcacaagttctttaatattcccttcctgcagcttcaaaaggatgtgagacttgctcaagaacgtgggtgtgccgtggtcctcgtctccgaggaggtcagaatgcccgccgggtgggactgttgttggggacgtctgggttggaaagagggtggaagccagacttgtccagttccagctttgctgggccggcctttgcttcctgccgaaccctctccacaccattgggtggattacagtttggagagctcccccctgttgagttgttcgatcccctag

SEQ ID NO: 183152 - DNA, 1566 bp, synthetic construct
  misc_feature 1..1566: note = Description of Artificial Sequence: Synthetic coding sequence
  source 1..1566: mol_type = other DNA
atgttcagcgccctgaagaagctggtgggcagcgaccaggcccccggccgcgacaaaaacatccctgcggggctacaatctatgaatcaagctcttcagagacgctttgctaaaggagtgcaatacaacatgaagatcgtcatcaggggggaccggaacactgggaaaaccgctctttggcatagacttcaggggcggccttttgtcgaggaatatattcccactcaggaaatccaggtgacatccatacactggtcctataagaccactgatgatatcgtgaaagtggaagtgtgggacgtggttgataaagggaagtgcaagaagagaggcgatggcctcaaaatggaaaacgatccgcaagaggcagagtcagagatggctctggatgccgagttcctagacgtctataagaattgcaacggcgtggttatgatgtttgatatcaccaagcagtggactttcaactacatcctcagagagctgccaaaagtgcccacgcatgttcctgtgtgcgtcctcggtaattaccgcgacatgggagaacatcgcgttatcttacctgacgacgtacgggactttatcgacaacctggactcgcgcccgccggggtcctcatatttccgctacgccgagagttctatgaagaattcatttgggctgaaataccttcacaagtttttcaacatccccttcttgcagctgcagagagaaaccctgctgcgacagctcgagacaaaccagctggatatggacgctaccttggaggaactgtctgtacagcaggagaccgaagatcaaaactacggtatctttctggagatgatggaggcgcgctcgagaggacacgctagccctctggccgctaatggtcagtcaccaagtcctggctcgcagtcccccgtggtgcccgctggcgcggtctctacggggtcaagcagcccagggaccccgcagccagctccccagctgccactcaacgctgccccccctagctctgttcctcctgtgccccctagcgaagctctgccacctcccgcctgtcctagcgctcctgcccctcggaggtccattatttccagaccacctccgtggggctggcgcctgcgcggtgccctcgggaggagagggcagtggcccccctggggcggcggccgggcgtgtcattgtctcggaaggcatctgccactgtaccacaggctgtgtcggtgccctgtagcggctgtgtgtgcctctgagttggaggaggccgggcactggtggagtcctgggtgggccctccaagtgctgggcttgcaggctcaatgcgaaccagcgctgcaggagggccgcgggcagttggccagtgccagactcgggggtcatcctgggccccttggggcagagccacctgttttcctgcgtgatgtgaccgaagctcaggagggccctgtgagagtgtgcctgcagaggctgggacgcggcaggctggctgtgggttgcgccttgccacgtcatcttctggcgcttcgcgctcatctggggcctcagcacgcgtacggcagtgccagtgggcgtgagccttag

SEQ ID NO: 183153 - DNA, 1845 bp, synthetic construct
  misc_feature 1..1845: note = Description of Artificial Sequence: Synthetic coding sequence
  source 1..1845: mol_type = other DNA
atggagaacgacccccaggaggccgagagcgagatggccctggacgcagaatttctagacgtttacaaaaactgtaacggagtcgtgatgatgttcgatatcacaaaacagtggacattcaactacatcttacgggaactgccaaaagtgcccactcacgtccctgtttgtgttctgggaaactatcgggatatgggcgagcatcgggtcatcctgccggatgacgtccgagattttattgacaatcttgacaggccacccgggtcaagctactttaggtacgctgagtcatctatgaagaactcctttgggctgaagtacctccacaagttcttcaatatcccctttctgcagcttcagcgggagaccctgctgcgccaattagagaccaaccagctggatatggatgcaacgctggaagaactcagcgtgcagcaagagactgaggatcagaactatgggatatttctggagatgatggaagcccgctcaaggggccacgcgtcaccactcgcggcgaacggacagagtcccagccccggcagtcagtcacccgtggtgcccgctggggcagtttccacaggtagctcttctcctgggacccctcagcccgcgccccagttgcccctgaatgccgcacctccttccagtgttccaccagttccccccagcgaagctcttcctcctcccgcctgccctagcgcccccgctcctaggcggagcatcatttcccgtctcttcggaactagccctgccactgaggctgcccctcctccaccagaaccggttcctgccgccgagggccccgccacagttcaaagcgtcgaggattttgtgcccgatgaccgccttgaccgatccttcctggaggatacaacgcccgccagagacgagaagaaggttggcgcgaaggccgcccagcaggactcggacagcgacggggaggctctggggggcaatccaatggtggcaggctttcaggatgatgtggacctcgaagaccaaccccgcgggtcgcctccattgcccgcaggacctgtgccttcacaggatataaccctcagtagcgaggaagaggccgaggtggccgccccaacaaagggtccagccccagcaccgcaacagtgctctgaaccggagacaaagtggagttcaatccctgcttcaaaacccagacgtgggacggcacccactcgtacggctgcacctccctggccgggcggagttagcgtcagaactggccccgagaagagatcttctactcgcccacccgctgagatggaacctgggaagggcgaacaggcgagtagttcagaatctgaccctgaaggaccaatcgcggctcaaatgctgtccttcgtcatggacgacccagatttcgagagcgaggggtctgatacccagagaagggctgatgattttccggttcgggatgacccttccgatgtaacagatgaagacgaaggaccggcggagccgcctcccccccccaagctcccgctgccagccttcaggctaaaaaatgacagtgatttgttcggactgggactggaggaagccggaccaaaagagtcgtcagaagaaggcaaggaaggcaagacgccatcgaaggagaagaaaaaaaaaaagaaaaaagggaaggaagaggaggaaaaagcagcaaagaagaaatccaaacacaagaagtctaaagataaggaagaaggcaaagaagagcgcagaagacgccagcagcggccaccacgctcacgcgagagaaccgcggcagatgaactggaagcattccttggtgggggcgctcccggcgggaggcaccctggcggcggggattatgaagagctgtag

SEQ ID NO: 183154 - DNA, 678 bp, synthetic construct
  misc_feature 1..678: note = Description of Artificial Sequence: Synthetic coding sequence
  source 1..678: mol_type = other DNA
tgagacgacatcgtgaaggtggaggtgtgggacgtggtggacaagggaaagtgtaaaaagaggggggacggcctcaagatggaaaacgatccgcaggaagcagagagtgaaatggctttagacgctgagttcctggacgtgtacaaaaattgcaatggagtcgtcatgatgttcgacattactaaacaatggactttcaattacattctccgcgagcttccaaaagtcccgactcatgtgccagtctgtgtactgggtaactaccgcgacatgggtgaacatcgcgttatcctgcccgacgacgtcagggactttatagataatttggacaggccacccggctcaagctacttccgctatgctgagtccagtatgaagaacagtttcggtctgaaatacctgcacaaattttttaatattccattcctccagctgcagaaagatgtgagactggcgcaggaaaggggttgtgcagtggttctcgtgtcggaagaggtgcgcatgcccgccgggtgggattgctgctggggtcggctgggctggaaggagggagggtcacagacatgcccagtcccagcacttctgggacggccgctgcttccagctgagcccagcccgcaccactgggttgattatagcttggaatcctccccgctcctttcatgctctattccctag

SEQ ID NO: 183155 - DNA, 1416 bp, synthetic construct
  misc_feature 1..1416: note = Description of Artificial Sequence: Synthetic coding sequence
  source 1..1416: mol_type = other DNA
atgaccgtgggcaccgtgaagatcgtgatccggggcgaccggaacacgggaaagaccgctctgtggcacagactccagggacgccccttcgttgaggagtatatccccactcaagagatacaggtcacgtccattcattggagctataaaactaccgatgacattgtaaaggtcgaggtatgggacgtggtggataaaggaaagtgcaagaaacgtggcgacggtcttaagatggaaaacgacccgcaagaggctgaaagcgagatggctcttgatgctgagtttctcgacgtgtataaaaattgcaatggagtagttatgatgtttgacattactaaacagtggacattcaactatattctgagagaactgcccaaggtacctacccatgttccggtatgtgtccttggaaattaccgcgacatgggcgagcacagggtcatactgcctgatgatgtgagagatttcatcgacaatcttgaccggccccccgggagttcttacttcagatatgccgagtcttcaatgaagaactcttttggactgaaatatttgcataaattttttaacataccttttttgcagctccagagggagaccctgttgcgtcagctggagacaaatcagttggacatggatgctactctcgaagaactatcagtacaacaggaaactgaagaccagaattatggtatatttctagagatgatggaagccaggtctagggggcatgcctctccactcgcggccaatggccagagtccttcaccggggtcccaaagtcccgtggtgcccgctggcgctgtgtcaacaggatccagctcacctgggacccctcaaccggctccgcaactgccacttaacgccgcccctcctagttctgtgcccccagtcccacctagcgaggccctgcccccccccgcatgccccagcgcaccagcacccaggcggtccataatttcacgcctctttggtacatctcctgccaccgaggcggctccaccacctcccgaaccggtcccagcagcggagggtcccgcgaccgtccaatccgtagaggattttgtcccagacgataggttagaccggtcatttcttgaagatacgacccctgcccgggacgagaagaaggttggagcgaaggcggcacaacaagacagtgattccgacggggaggctctaggcgggaacccaatggtggcaggcttccaggacgacgttgatctggaggaccagccgcgaggctctcctccgctgcccgctggccctgttccttcccaggatattaccctttcctccgaggaggaagccgaagtggccgcccctaccaaggggcccgccccggccccacagcagtgtagtgagcctgaaacaaaatggagcggagaagctcagcagcaccaggcgccttgttag

SEQ ID NO: 183156 - DNA, 1347 bp, synthetic construct
  misc_feature 1..1347: note = Description of Artificial Sequence: Synthetic coding sequence
  source 1..1347: mol_type = other DNA
atgagccaccgggcctggctggccctgctgcccctggaggtggacggggatgatggactgtgtggtgccggcggacctgagcattctggtagctctcagcctcagcagcagcagcagcgggccccgtgccatctgagggcctccggccgcggtaggggcgcccgcctgctgactcggctcctgccctttagttttcttgaaatgatggaggcccgatctagagggcatgcttctcctctggcagctaatgggcagtcacccagtcccggatctcagagcccagtcgtgcctgccggggcagtgtcaacaggtagctcgtctccaggcacccctcaacccgcacctcagttgcccctgaatgctgccccaccttcttccgtgccccctgtacctcctagtgaggccctcccacctccagcatgccctagtgcccctgcgccccgtcgctcaataatctcccgtcttttcggcacctctccggcgactgaagccgcaccacccccaccagaaccagtcccggctgcagaggggcctgccaccgtgcagagcgttgaggacttcgtcccagatgaccgtttggaccgttcttttctggaagacacaactcctgcccgggacgagaagaaggttggcgccaaagccgcacagcaggacagtgacagcgatggagaagctctgggggggaacccgatggtggccggttttcaggacgacgttgatttggaggatcagccccgtggctcccctcccctgccagctgggccggtcccaagccaagatattactctcagctcagaggaggaggccgaggtggcggcaccgactaaagggcccgcccctgcaccacagcagtgctcagaacctgaaacaaaatggagcagcatccctgcaagcaagccacggaggggcacagctcccacccggaccgctgctccaccatggcccggcggcgtgagtgtgcggacaggtccagagaaacgcagcagtacacgaccacccgctgaaatggagccaggcaaaggcgagcaggccagctcgagcgagagcgaccctgagggccccatagcagctcagatgctgtcctttgttatggatgaccctgacttcgagtccgaaggctcagacactcagcggcgagctgacgacttccccgtgagagatgacccatctgatgtaacagatgaagatgaggggccagcagaaccccctcctcctcccaagctgccccttcctgctttcagactaaagaacgactctgacctcttcggcctgggactggaggaagccggccctaaggagagcagcgaggaagggaaggagggcaaaacaccctctaaagagaaatag

SEQ ID NO: 183157 - DNA, 648 bp, synthetic construct
  misc_feature 1..648: note = Description of Artificial Sequence: Synthetic coding sequence
  source 1..648: mol_type = other DNA
tgaaagatcgtgatccggggcgaccggaacaccggcaagaccgccttatggcaccgcctgcagggcagaccctttgtggaagagtacatcccaacccaagaaatccaggtgaccagcatccactggagctataagactactgacgacatcgtcaaggtagaggtctgggacgtcgttgataagggaaagtgcaagaagcgcggcgacggattgaagatggaaaatgatcctcaagaggcggagtctgaaatggccctagatgctgagttcctcgacgtttacaagaactgcaatggggttgtcatgatgtttgatataaccaaacaatggacattcaattatattttgcgtgagctgcctaaagtgccaactcacgtacccgtgtgtgtgctaggaaattaccgcgatatgggcgagcacagggtgatcctgcctgacgacgtgagggactttatagacaatttggattcccgcccacccgggagctcttatttccgttatgccgaaagttctatgaagaactcctttgggctgaagtacctgcacaagttctttaacatcccatttcttcagctgcaggtgtcaacccatcacgtgggctggtctggttgttggtccctaacctcctttcaggtctcccccgtttag

SEQ ID NO: 183158 - DNA, 336 bp, synthetic construct
  misc_feature 1..336: note = Description of Artificial Sequence: Synthetic coding sequence
  source 1..336: mol_type = other DNA
atgtacagccggctgttctacctgaagagcagctacatcatctactttgaacccttgttttctaacgctataattaacatcctgagcttcattaattctcttgcgtcccccctaaccattttctgtttcgctctgtcggcccaggctctcagtactattttttacttcaggatcttcatctttatttttcactcttggattcttctttttcatttttattttacttgtagttttaaaacatatgaacaccagcactcgaaaatggtacccgcctaccggatgcaaagccctagggcactgccccgtacctacctgtacgtgtggccctacaagtag

SEQ ID NO: 183159 - DNA, 342 bp, synthetic construct
  misc_feature 1..342: note = Description of Artificial Sequence: Synthetic coding sequence
  source 1..342: mol_type = other DNA
atgaacttctacctgctgctggccagcagcatcctgtgcgccctgatcgtattctggaagtatcggagattccagcggaacacaggagagatgtcctcaaactccaccgccctcgccttagtgaggccatcgtcatctggccttattaactctaataccgataataacctggcagtgtatgacctgagccgcgacattttgaacaatttcccccattcgatcgcccgacaaaagcggatcctagtgaacctgtctatggtggaaaacaaacttgtggagttggagcacaccctgttaagcaagggtttccgaggcgccagcccccacaggaaatccacttag

SEQ ID NO: 183160 - DNA, 2853 bp, synthetic construct
  misc_feature 1..2853: note = Description of Artificial Sequence: Synthetic coding sequence
  source 1..2853: mol_type = other DNA
atgacctggcggatgggcccccggttcaccatgctgctggccatgtggctggtgtgtggctccgagcctcatccccacgccaccatccgtgggagccacggcggcagaaaagtgccactggtgtctcctgatagttctcgccccgcaagattcctgaggcacactgggagaagtaggggtatcgagagaagtacacttgaggaacccaacttgcagcctctgcagcgtaggagaagtgttccagtactgcgcttagcgagacctaccgaacctcctgcaaggtctgatatcaacggtgcagcagtgcggccagagcagcgtcccgccgctcggggttccccacgggaaatgatcagggatgagggcagttcggcccgcagcagaatgctgcgcttccccagtggaagcagttcccctaacatattggccagtttcgccggaaaaaaccgcgtatgggtcatttctgccccgcacgcatccgagggttactaccggctgatgatgagcttgctgaaggatgacgtatactgcgagctcgccgaaaggcacattcagcagatcgtgctgttccaccaggcaggagaagagggggggaaggtcagaaggatcaccagtgagggccaaattttagagcagcctctggatccttccctgatacctaaactcatgtccttcctcaagctcgagaagggtaagtttgggatggttctgttgaagaaaacattacaggtagaggaaagatatccctatcctgtgcgtctcgaagctatgtatgaagttatcgaccagggacccatccgccgcatagagaagatcaggcagaaggggttcgttcagaaatgcaaggctagtggagtggaagggcaggtcgtagcggagggcaacgacggtggggggggcgccggtcggccctcgcttggttcagagaagaagaaggaagaccccaggcgtgcacaggtgccccccacccgagagagtcgtgtgaaggtcctgagaaagcttgccgctacagctcccgcactcccacaaccaccctccacgccacgggccacgactttgcctcctgcgcccgctacgaccgtgaccagaagcacctcccgggctgtgaccgtcgccgccagacctatgaccaccacggctttcccaactactcaaaggccctggactccaagtccttcccaccggcctccaactactactgaggtcattacagctcgcaggccaagcgtgagtgaaaacctgtatcctccttcacgcaaggatcagcacagagaacgcccccagaccacccgccggccatcaaaggccacgagtctggagtccttcaccaacgctccaccgacaaccatctctgaaccatcaactagagccgccgggcctggtaggtttagagacaacaggatggacagaagagagcacggtcaccgcgacccaaatgtggttcccggaccccccaagcccgctaaggagaagccccctaaaaaaaaagcccaggacaagattctctcaaacgagtacgaagagaagtatgatttatctcgtcccactgcctcccagctcgaggacgaacttcaagttgggaatgtgccacttaagaaagctaaagagtctaaaaagcatgagaagctggagaaacccgagaaggagaagaagaaaaagatgaagaatgagaacgctgacaagctccttaaaagcgagaaacaaatgaagaagagcgaaaagaaaagtaagcaggaaaaagaaaagtccaagaagaagaagggagggaagacggaacaagacggataccagaagccgacgaataaacatttcactcagagcccaaaaaagagcgtggccgatctactcgggagttttgaggggaaacgccggctcctcctgatcaccgctcccaaggctgagaataatatgtacgtccagcagcgtgacgaatacttagaatccttttgcaaaatggctacccgcaaaatttccgtgattactatttttggaccggtcaacaattctacaatgaagattgatcattttcagctggacaatgagaagccaatgagagtggtagatgatgaggatttagttgaccagcgcctgatctctgaactaaggaaagagtacggcatgacctataacgacttttttatggtgctcaccgatgttgatcttcgtgtgaagcagtactacgaggtccctataaccatgaaaagtgtttttgatctcatcgacacttttcagagtcgcatcaaagacatggagaagcagaagaaagagggaatcgtttgtaaggaggataaaaagcagagtctggagaactttctctccagatttcgatggcggcgcaggctcctagtaattagtgcgcctaacgatgaggattgggcctactctcaacagctgtcggccttgagcggccaagcatgcaactttgggcttcggcacataacgatcctgaagctactgggcgtaggcgaggaggttgggggagttctggaactgttcccaattaatgggtcctctgtcgttgagagagaggatgttcccgctcatctggtgaaggatatcagaaattatttccaggtgtctccagagtattttagtatgctcctggtggggaaggatggcaatgttaaatcatggtacccgagccctatgtggtctatggtaatcgtgtatgacctgatagactctatgcagctcagacggcaggaaatggctatacagcaatcacttggcatgcgttgccccgaggatgaatacgcaggatatggatatcactcctaccatcagggctatcaggatggatatcaagatgattatcggcatcacgagagttaccatcatggctatccctactag

SEQ ID NO: 183161 - DNA, 744 bp, synthetic construct
  misc_feature 1..744: note = Description of Artificial Sequence: Synthetic coding sequence
  source 1..744: mol_type = other DNA
atgctgctgctgcccctgcccctgctgctgttcctgctgtgcagccgagcagaagctggtgagattatcggcgggacggaatgcaagccacattcccgcccatatatggcgtatctggaaatcgtcactagcaatggcccaagcaagttttgcggtggttttctaatacggcggaactttgttctcacagctgctcactgtgcaggcaggtccatcacggtcaccctcggagcccacaatataactgaggaggaagatacctggcaaaagttagaggtgatcaaacaattccggcaccctaaatacaacacgagtactctccaccatgatataatgctcctgaagttgaaagagaaagccagcctgaccctggccgttggaaccctccccttccctagccaattcaacttcgttccacccggacgtatgtgtcgggtggccggctggggcagaaccggagtgcttaaacccgggagtgacacactccaggaggtcaaattgcggctgatggacccccaagcctgttcccattttcgcgacttcgaccacaacttgcagctttgcgtcggcaatccccggaagaccaagagcgctttcaaaggcgatagcggaggcccattgctgtgcgccggcgtggcacaaggtattgtctcttatggacgctcagacgctaaaccacccgcagtgtttactcggatttcccattaccggccctggatcaaccaaattctccaggctaattag

SEQ ID NO: 183162 - DNA, 210 bp, synthetic construct
  misc_feature 1..210: note = Description of Artificial Sequence: Synthetic coding sequence
  source 1..210: mol_type = other DNA
atgctgggcatcaccgtgctggccgccctgctggcctgcgccaccccagggcccaccgtgtggccatgggagagaaccacatggagatggaaaaccaaaaaggacccttgtctctgggtgtggacaccatccacttctacccgggacgggatgcccagctgttgtgcaatgatcttaccttctagttcactgcagagcatgtggtcttag

SEQ ID NO: 183163 - DNA, 807 bp, synthetic construct
  misc_feature 1..807: note = Description of Artificial Sequence: Synthetic coding sequence
  source 1..807: mol_type = other DNA
atgctgggcatcaccgtgctggccgccctgctggcctgcgccagctcctgcggagtgccatcctttccgccaaatttgagcgcccgggtggtgggcggggaggacgcccgccctcattcttggccatggcaaatctccctacaatatctgaaaaacgatacatggcgtcatacctgcggcgggactctcatcgcttctaattttgttttgacagccgcccattgcatttccaacactcggacctacagggtcgctgtggggaaaaacaaccttgaagtagaggacgaagagggttctctcttcgtcggagtggacacaatccatgtgcacaagcggtggaacgcactcctgttgcggaatgatatagccctcatcaagctcgccgagcacgtcgagctgtctgacacaatccaggtggcatgtctgcccgagaaggactctcttctcccaaaggattacccttgctacgtcaccggatggggacggctctggactaatggaccaatcgcagacaagctgcagcaaggccttcagccggtcgtagaccacgctacctgttctaggatagattggtggggcttccgggtgaagaagaccatggtctgcgcaggaggcgacggcgttataagcgcgtgtaatggggactctggcggtccattgaactgccagctggaaaacggatcttgggaggtattcgggatcgttagttttggttctcgtagggggtgcaacacgaggaagaagccagtagtgtacactagagtctcagcttacattgactggattaacgagaagatgcagttatag

SEQ ID NO: 183164 - DNA, 795 bp, synthetic construct
  misc_feature 1..795: note = Description of Artificial Sequence: Synthetic coding sequence
  source 1..795: mol_type = other DNA
atgctgctgctgagcctgaccctgagcctggtgctgctgggcagctcatggggctgcggtattcctgctatcaagcccgctttgtcctttagccagcggatcgtgaatggtgagaacgccgtccttggatcttggccctggcaggtttccctccaagacagcagcggatttcatttctgtggtggtagcttaatcagtcagagctgggtggtgaccgctgcccactgtaacgtgtcacccgggcgccacttcgtggtgcttggtgaatacgataggtcaagcaacgccgagcctctgcaagtattgtcagtcagcagagctatcacacacccatcatggaatagcactaccatgaacaatgatgttaccctactgaagttggcctctcccgcccagtatactactcggattagccccgtctgcctcgctagttcgaacgaggcattaacagaaggtctcacctgcgtgactaccggatggggacgactctccggcgtgggcaacgtgactccggctcatttacagcaggttgccttgcccttggtgacggtcaaccaatgtcgccaatactggggatcgagcataactgatagcatgatctgtgcggggggagccggggcctccagttgccaaggtgactccggtggccccctggtctgtcagaaaggtaatacctgggtgctcattggcatcgtgtcttggggcactaaaaactgtaatgtgagggcccccgctgtgtacacccgggtgtctaagttctcaacttggattaatcaggttattgcttacaactag

SEQ ID NO: 183165 - DNA, 795 bp, synthetic construct
  misc_feature 1..795: note = Description of Artificial Sequence: Synthetic coding sequence
  source 1..795: mol_type = other DNA
atgctgctgctgagcctgaccctgagcctggtgctgctgggcagctcgtggggctgcgggattcccgctattaagcccgcactttccttttcacagagaattgtaaatggggagaatgccgtcctgggaagctggccgtggcaagtgagtttgcaggattcatctggcttccatttctgtggcgggtcccttataagccagtcctgggttgtcactgcggctcattgtaacgtgagcccagggcgccatttcgtggtcctgggagagtatgaccggtctagtaacgccgaaccacttcaagtgctctcagtgagtagggccatcacccatcccagctggaactcaacaacaatgaataacgatgtaacacttctgaagcttgcctcccctgcccagtataccacacgaattagcccagtgtgtttagcttctagcaatgaggcacttactgaagggttgacatgtgtaactactgggtggggccggctttctggggtcggaaatgtgacacctgcccaccttcaacaggtagccctccccctcgtgacagtgaatcaatgtagacagtattgggggagctcgattacagacagcatgatttgtgcagggggcgccggagcttcatcgtgccagggggattccggaggtcccctggtttgtcaaaagggcaacacctgggtgttgataggcattgtgtcatggggcacaaagaattgcaacgtccgcgcacctgctgtctatacaagagtgagcaaattcagcacttggatcaatcaggtaattgcctataactag

SEQ ID NO: 183166 - DNA, 792 bp, synthetic construct
  misc_feature 1..792: note = Description of Artificial Sequence: Synthetic coding sequence
  source 1..792: mol_type = other DNA
atggccagcctgtggctgctgagctgcttcagcctggtgggcgccgccttcgggtgcggagtgcctgccatccacccagtcctatcggggttaagccggatcgttaatggcgaagatgccgtgcccggttcctggccctggcaagtttcattacaagacaagacaggatttcacttctgcggcggctctcttatttcagaggattgggtagtaaccgcagcccactgtggcgtccgaacctctgacgtggtggttgcaggagagttcgaccaaggttcagacgaggaaaacatccaggttttgaaaattgccaaggtgtttaagaaccccaagttttctattctgaccgtgaacaatgacatcaccctactgaaactcgcaacaccggcgaggttctctcagacggtaagcgccgtatgcctccccagtgctgacgacgattttcctgccggcaccctctgcgcgacaaccggatggggaaagacgaagtataatgcaaataaaacccccgacaagctgcagcaggctgccctgcccctcctgtccaatgctgaatgcaaaaaaagctggggtagacgcatcacagatgtcatgatctgcgccggtgcatccggcgtgtctagctgtatgggagattctggtggacctttggtttgccagaaagacggagcctggactctcgtcggcatcgtgtcttggggcagcgatacctgtagcacctccagccccggagtgtacgcgcgagttacaaaattaatcccctgggtccagaagatcctcgccgctaattag

SEQ ID NO: 183167 - DNA, 1119 bp, synthetic construct
  misc_feature 1..1119: note = Description of Artificial Sequence: Synthetic coding sequence
  source 1..1119: mol_type = other DNA
atggccgcccccgtgccctgggcctgctgcgccgtgctggccgccgccgccgccgtggtctatgcacagcggcacagtccccaggaggcaccgcacgtgcagtatgaaaggctcggctctgatgtaacactcccttgcggcaccgctaactgggatgcggctgtgacctggagggtaaatggtaccgacctggcgcctgacctccttaacggcagccagctggtgctacacggccttgaactcggccattcgggactctatgcatgctttcaccgcgactcttggcatctcagacatcaggtgctgttgcacgtgggtctccccccccgcgagccggtgctgtcttgtaggtcaaacacctaccccaagggattctattgtagttggcatctcccgacccccacttacattcctaacacatttaatgtgactgtgttacatggctccaagataatggtgtgtgagaaggatccggccttgaaaaatcgctgccatattcggtacatgcacctctttagtacgattaaatataaagtaagcatatctgtgtccaatgccctcgggcataatgctaccgctataacctttgacgagttcaccattgtcaagcctgatcctcctgagaacgtggttgctaggccagttccctctaatccccggcgtctggaagtcacttggcagacaccctctacatggcctgatcctgaaagctttccactgaagttttttctgcggtaccgacctctgatcttagaccagtggcagcacgtggaattatcagatgggactgcacacacgataacagatgcctacgccgggaaagaatatatcatccaggtggctgccaaggataatgaaattggtacttggtctgattggtctgtggctgcccatgccactccctggacagaagaaccacggcacctcactactgaagctcaagcggcggagacgactacctcaacaacgagctcactcgcacccccacccacaactaagatttgtgacccaggtgagttaggtagtgggggggggccaagcgctccttttctggtgtcagtgccaattacccttgcattagctgccgctgctgccaccgcttctagcctacttatctag

SEQ ID NO: 183168 - DNA, 1119 bp, synthetic construct
  misc_feature 1..1119: note = Description of Artificial Sequence: Synthetic coding sequence
  source 1..1119: mol_type = other DNA
atggccgcccccgtgccctgggcctgctgcgccgtgctggccgccgctgcagcagtcgtgtacgcgcagcgccactctccacaagaagctccccacgtgcagtatgaacgcttaggttccgatgtgaccctgccatgtggcaccgccaactgggacgccgcagtgacttggagagtgaacggcactgacctggcgccagacctactcaacggatcccaacttgtacttcacggcctggaacttggtcattctggattatacgcctgctttcatcgcgattcctggcacttacgccatcaggttctgctccatgtaggactccctccccgggagcccgtgctgtcatgccgatctaatacctacccaaaaggcttttactgcagctggcacctgcccacccccacatatattccaaacacattcaatgtgacagtgctccatggaagtaagatcatggtctgcgagaaggacccagccctgaagaatcggtgtcacatccgctatatgcatctgttctctaccatcaagtacaaagtgtcaatatccgtttcaaatgcactgggacataatgccaccgccatcacattcgatgaattcactatcgttaagccagatccaccagagaacgtagtcgcccgccctgtgccctccaaccctaggagactggaggtcacatggcagacaccctcaacatggcccgaccccgaatcctttccgctcaagttttttcttagatacagaccgctgatcctcgaccagtggcagcatgtagagttgtctgacggaactgctcataccattacagatgcctatgcagggaaggagtacattatccaggtggccgcgaaggacaatgaaatcggcacctggagtgactggtccgtggctgcccacgccacaccatggacagaggaaccacgccacctgacgacagaggcacaagcagctgagacaaccacaagcacaacatcctccctggccccacctcccaccacgaagatctgtgatcctggggaactcggcagcggggggggaccaagcgccccctttcttgtcagtgtcccaattacactggccctcgccgcagcagcagcaactgcttcctctctcctgatctag

SEQ ID NO: 183169 - DNA, 771 bp, synthetic construct
  misc_feature 1..771: note = Description of Artificial Sequence: Synthetic coding sequence
  source 1..771: mol_type = other DNA
atggccgcccccgtgccctgggcctgctgcgccgtgctggccgccgccgccgccgtggtttacgcacagaggcactctccgcaggaggccccccacgtccaatatgaacggttaggtagcgacgttactctcccctgtgggaccgccaattgggacgctgccgttacgtggagggtgaatggaacagacctggcccctgatctccttaatggatcacaactcgtgctccacggactcgaactggggcactcagggttatatgcctgctttcaccgagacagttggcacctgcgccaccaagtgctgctgcacgtcggtcttccaccgcgtgagcccgtgttgtcctgtcgaagtaacacttatccgaagggattctactgctcctggcatctccctaccccgacgtacattccaaatacctttaacgtgaccgtgctccatggatctaagatcatggtttgtgaaaaagacccggccttgaaaaatagatgccacattcggtacatgcatctgtttagcaccatcaaatacaaggtgtccatttctgtgtcaaacgcacttggccataatgccaccgctatcacatttgatgagtttacaattgtgaaacccgatccccccgaaaacgtcgtggctcggccagttccttcaaaccccagaaggctggaggtgacctggcagactccgagtacctggccggatcctgagagttttccattgaagttcttcctgcgctatcgacccctcatcttagatcagtggcagcactag

SEQ ID NO: 183170 - DNA, 3909 bp, synthetic construct
  misc_feature 1..3909: note = Description of Artificial Sequence: Synthetic coding sequence
  source 1..3909: mol_type = other DNA
atggagctgtacttcggcgagtaccagcacgtgcagcaggagtacggtgtgcatcttcgtctggcctccgacgatactcagaagtctcgatcttctcaaaattcaaaggctggatcatatggggtcagcatccgggtccaggggatcgacggacacccttatatagtcttgaataataccgaaagatgtctggctggcaccagttttagcgagaacgggccacctttcccgccgcctgttataaataacttgccccttcatagctcgaacggatctgtccctaaagaaaactcagaagagttacaactgcccgaaaatccctatgctcagccttccccgattcggaaccttaaacaaccacttctccacgagggaaagaatggcgtgctggatcggaaggatgggagtgttaagccgagtcatttgcttaactttcagcggcaccccgagctgctgcagccctacgacccagagaaaaacgagctgaacctccagaatcaccagccctctgaaagcaattggctgaagacccttactgaagaggggattaacaacaagaaaccctggacttgcttccctaagccgagcaatagtcagcctaccagcccgtccctggaagacccggctaaatctggcgtcaccgcgatcaggctgtgcagctccgttgtgatcgaagacccaaaaaagcaaacatccgtgtgcgtgaatgtgcagtcttgcactaaagaacgagtcggcgaggaagccctcttcacgtctggaaggcctctgacagctcactcacctcacgcccacccggagactaagaaaacgcgccctgatgtgcttccctttagaagacaggactcagcaggccccgtgctggacggagctcggagtaggaggagttcatcgtcctcaaccacccccacaagcgcaaactcactgtatcgctttctgcttgatgaccaggagtgtgcaattcacgccgacaacgtgaatagacatgaaaaccgacgctatattccttttctgccaggcacagggcgagacatcgatacaggctctattcccggcgtcgaccagcttatcgaaaagttcgaccaaaagccaggtttgcagaggagaggaagatccggaaagaggaaccgaatcaataccgacgacagaaagcggtctaggtcagttgattcagccttccctttcgggcttcagggaaactcagaatacctcattgagtttagccggaacctcggaaaaagcagtgagcacctgctccggccgtctcaagtgtgtcctcagcgaccactatcgcaagaaaggaggggaaaacagtcagtgggccggacatttgccaagctccagggtgccgcccacggcgcgtcatgtgcacactcgagacctccccagccgaacatcgacggcaaagtcctggaaacggaaggctctcaggagagcacagtcattcgcgcgcctagcttaggggcgcagtccaagaaggaggaagaagtgaagaccgccaccgcaactcttatgcttcagaatagggctacagccacttcaccggacagcggagctaagaaaattagcgtgaagaccttcccctctgccagcaatacccaagctacgccagacttactgaagggacagcaggaactcacgcaacagaccaacgaggaaaccgccaagcagatcctctataattatctgaaagaagggtccacagacaacgacgacgccacaaagcgcaaggtgaatcttgttttcgagaagattcagaccttgaagtctagagctgcaggctctgcacaaggcaacaatcaagcctgtaactcaacgtctgaagtgaaggacttactggagcaaaagagtaaacttactatcgaagtcgctgagttacagcgtcagctgcagttggaagtcaagaaccaacagaatattaaagaagagagggaacgcatgagggctaatttggaggaattgagatctcaacataacgaaaaggtggaggagaacagtacgcttcagcagcgcctagaagagtcagagggggagctccgcaagaacctcgaagaactctttcaggtgaagatggaacgagagcagcaccaaacggaaatcagggaccttcaggatcaactaagtgagatgcacgatgaactagacagcgccaagcgtagtgaggatagagagaagggtgctctgatcgaggaactgctgcaggcgaagcaagacctgcaagatctgctaatcgccaaggaggagcaggaagacctcttgcgtaaaagggaacgcgagctcacagctctgaaaggcgcgcttaaggaagaggtttcgtcccacgatcaggagatggataagcttaaggagcaatatgacgcggagttacaggccctgcgcgaaagtgtggaggaggccacaaagaacgtggaggtgctggcctctcgatctaatacatccgagcaggaccaggccggaacagagatgagggtcaagctcctgcaggaggagaacgaaaagttgcagggccgatccgaagagcttgagcgccgcgtggcccagcttcagagacagatcgaagacctcaagggagacgaggccaaagctaaagaaacactgaaaaaatacgagggggagatcaggcagttggaagaagctctggtgcatgctaggaaggaagaaaaggaggctgtgagcgcacgccgggccctcgagaatgaactggaagctgcgcagggcaatttgtcgcagacaacccaggaacagaagcagctaagtgagaagctgaaggaggagagcgagcagaaggaacagctgcggagattaaaaaatgagatggaaaatgagaggtggcacctgggtaagacaatcgaaaaattacagaaggagatggctgacatcgtcgaggctagccgcaccagcacattagagttacagaaccagttggatgagtacaaagaaaagaataggagggaactcgcagagatgcagcgacaattgaaggaaaagaccctcgaagcagagaaatctagactaacagccatgaaaatgcaagacgaaatgcggcttatggaggaggagctgcgtgattaccagcgggctcaggatgaggccttaaccaaacggcaactgctagagcagacactgaaagatctggagtacgagcttgaggcaaaatcacacctgaaggacgatcgtagccggctggtaaaacagatggaagacaaggtgagccaactggaaatggagctcgaggaggaacggaacaacagtgatctcctgtcagaaagaatatcccggagcagagagcaaatggagcaactgcggaacgagctgctgcaagaacgagccgcccggcaggaccttgagtgcgataagatcagcctggagcgacagaataaagacttgaagtctaggatcatccacctcgaaggttcctatcgatcttccaaagagggcctggtggtacaaatggaggcaagaatcgccgagctagaagataggttagagagcgaggagagggatcgcgccaatttgcagttgagtaacagaagactggaacgaaaagtaaaggaactggttatgcaggtggacgatgagcacctttcccttacggaccagaaggatcagcttagcctccgccttaaggctatgaagcgccaggtggaggaggccgaggaggaaattgatcgcctggaaagttccaagaagaaactgcagagggagctggaggagcaaatggacatgaacgaacacctacagggacagctgaactcaatgaagaaggacctgaggttaaagaagctcccctccaaagtcctggatgacatggatgatgacgacgatcttagtacagacggcggaagcttgtacgaggcacctgtgagctatacattctctaaggatagtactgttgcttctcagatctag

SEQ ID NO: 183171 - DNA, 2061 bp, synthetic construct
  misc_feature 1..2061: note = Description of Artificial Sequence: Synthetic coding sequence
  source 1..2061: mol_type = other DNA
atgggcgagttcaaggtgcaccgggtgcggttcttcaactacgtgccgtctggaatccggtgtgttgcctacaataaccagagtaatagattggcggtgagcaggactgacggcacagtggaaatttacaatttgtccgccaactatttccaggaaaagttttttcctggacatgagagccgggctacggaggcactatgttgggccgaagggcagcgattgttttcagcagggctgaacggtgagattatggagtatgatcttcaggccctaaacatcaaatacgcaatggacgcctttggagggcccatctggtctatggctgcttctccgtccggctctcagttgttagtggggtgcgaagacggctccgttaaactttttcagataacacccgacaaaatccagtttgaaaggaactttgaccgccagaaatcccggattctgtcacttagctggcaccctagcgggactcacattgccgccgggagcattgattatatatcagtcttcgatgttaagagtgggtcggccgtgcataaaatgattgtcgaccgacagtacatgggcgtgtccaagaggaagtgcattgtgtggggcgtggcattcttgagtgacgggactattataagcgtcgactccgcggggaaggttcagttttgggacagtgctacgggtaccctggttaaatcacacctgattgccaatgctgacgtgcagagcatcgcagttgcagatcaggaggactcatttgtggttggtactgccgaagggaccgtgttccactttcaactggtgccagtgacaagcaattcaagcgagaaacagtgggtccgcacaaagcccttccaacatcacacacacgatgttcgaactgtggcacattcccctactgcactaatatcaggcggcactgacactcacctggtgttcaggccgttgatggaaaaagtggaggtgaagaactatgatgctgctcttcgaaagataacctttccccatcgttgcctcatttcctgtagtaaaaagcggcagctgctcctgtttcaattcgcacaccatctggaattatggagactcggtagtacggtggcaacaggcaaaaatggcgacactctgcctttatcgaagaatgcggatcacttgctacacctgaaaaccaaagggcctgagaacattatctgttcctgcatctccccttgtggatcctggattgcttacagcactgtcagtcggttcttcctctaccgcctgaactacgagcatgacaatattagtcttaaaagagtttcaaagatgcctgcattcctgaggtcagccctccagatccttttcagtgaggattctacgaagctgtttgtggcttctaatcagggggccctccacattgttcagctgtcaggcggatcctttaagcacctgcacgctttccaaccccagagtgggacggttgaggctatgtgcctgctggccgtcagtcccgacgggaactggctcgctgcctccggcacatctgctggggtgcacgtgtataacgtcaaacaactgaaactgcactgtacggtgccagcgtataattttcctgtcactgcaatggcaattgcccctaacaccaataacctggttatcgctcatagcgaccagcaggttttcgagtacagtatccctgacaagcagtatacagactggtctcggactgtccagaagcagggtttccaccatctgtggctccaaagggatactccaattacacatattagtttccatcctaagcggcctatgcacattctcttgcatgatgcttatatgttctgcatcatcgataagagcctgcctctgcctaatgacaagactctactttataacccttttcctcccaccaatgagagcgacgttattcgaaggcggaccgcccacgcattcaaaatttccaaaatctataaaccactgctgttcatggacctgctggatgaaaggaccctcgtagccgtggaacgacctctcgacgacatcattgcacaattgcctccgcctatcaagaagaagaagttcggtacatag

SEQ ID NO: 183172 - DNA, 1716 bp, synthetic construct
  misc_feature 1..1716: note = Description of Artificial Sequence: Synthetic coding sequence
  source 1..1716: mol_type = other DNA
atgggcgagttcaaggtgcaccgggtgcggttcttcaactacgtgccttccggcatccggtgcgtggcatataacaatcaatctaacagactcgctgtttccagaacggacgggactgttgagatatataatctatcagccaactactttcaggaaaaattttttcccggacatgagtcccgcgcgacagaggcactgtgttgggccgaaggacagagattgtttagtgctggcctcaatggagagatcatggagtacgatctgcaggccttgaatattaaatatgcaatggacgccttcggcgggccgatttggagtatggctgcatcacctagtggatcccagttactcgtcgggtgtgaagacggctctgtgaaattgttccagatcacccccgataagattcaattcgaacgtaacttcgacagacagaagagtcgaattctgtctctgtcatggcatccaagtggcacgcacatcgcagcgggcagcatagactacatttctgtgtttgatgtgaagtcaggctccgcagtgcacaaaatgattgtggaccggcaatatatgggggtctccaagcggaagtgcatcgtctggggagtggctttcctgtccgacggaaccatcataagcgtagactccgccgggaaagtacaattttgggactctgctacaggaacactcgtgaaaagccatctaattgctaatgcagatgttcagagtatcgccgtggccgaccaggaggatagcttcgtggtcgggactgccgaggggacggtgtttcactttcagctagtgcccgtgactagcaatagctctgaaaagcaatgggtaaggaccaagcctttccaacaccatacacatgatgttcgcacagtggcacactcgccaaccgccctgatatcgggcggtactgacactcatctggtcttcaggccattgatggagaaagttgaggttaaaaactacgacgcagcactgcgcaagattacttttcctcatcggtgcctgatttcttgttctaagaaaaggcagttgctgttgtttcagtttgctcatcatctggagctttggaggctcggtagtaccgtggccacaggaaccgtggaggcaatgtgtcttttagcagtgtcaccggatggaaactggctggctgcttccggaaccagtgctggtgtacatgtgtacaacgtgaagcagctgaagctccattgtacagtacctgcgtacaactttccagttacggccatggcgatcgctcccaacactaataacttggtgattgcccattcagatcagcaggtgtttgaatattccattcccgataaacaatatacagactggtcgagaaccgtccaaaaacagggcttccaccacctctggttgcagagggacacccctataacccacatttctttccaccccaagcggcccatgcatatcctcctacacgacgcttacatgttctgcatcatagacaaatccctgcctttacctaacgacaagacacttctttataaccctttccccccaaccaacgagtctgatgttatcagaagaagaaccgcacacgcctttaaaatatccaaaatttacaaacctctgctttttatggacctgttggatgaaagaaccctggtcgccgtcgagcgcccacttgacgatatcatcgcccagcttcccccaccgattaaaaagaagaagttcggcacctag

SEQ ID NO: 183173 - DNA, 1023 bp, synthetic construct
  misc_feature 1..1023: note = Description of Artificial Sequence: Synthetic coding sequence
  source 1..1023: mol_type = other DNA
atggccctgcggctgctgcggcgggccgcccggggcgccgccgccgccgccttactgcgcctgaaagcgtcccttgctgctgatattcctagattaggatacagctcctcttcccaccacaagtacatccctcgcagggccgtgctttacgtacccggaaacgacgagaaaaagatcaaaaagattccaagccttaacgtggattgcgcggtgctggactgcgaagacggagtcgctgccaataaaaagaatgaggctcgcttgaggatcgtcaagacgcttgaggacattgacctggggcctactgaaaagtgcgtcagggtgaactccgtgagctcaggactggccgaggaagacctagagacactgctgcagtcccgggtgttgccgtcaagccttatgctgccaaaagtggaaagtccagaggagatccaatggtttgctgacaaatttagctttcatttaaaaggtcgcaaactagagcagccaatgaacctcatcccattcgtcgaaacagccatggggctgctgaattttaaggccgtctgcgaagaaaccctgaaggtcggcccgcaggtaggtttgttcctggatgccgtggtctttggcggcgaggatttcagggccagcatcggggctacatcctcaaaggagacactggatattctctacgcgagacagaagattgtcgtcattgccaaggccttcgggttacaggctatagatctggtgtacatcgattttcgtgatggcgcaggcctgttaaggcagagccgggagggggcagctatgggatttacgggaaaacaggttatccatcccaatcagattgccgtagttcaggagcagttcagtccgagccctgaaaagatcaagtgggctgaggaactgattgccgcctttaaagagcatcagcagctgggtaaaggcgcctttactttccagggcagtatgatcgatatgcctctactgaagcaggctcaaaacacagttactctggcaacatctataaaagaaaagtag

SEQ ID NO: 183174 - DNA, 921 bp, synthetic construct
  misc_feature 1..921: note = Description of Artificial Sequence: Synthetic coding sequence
  source 1..921: mol_type = other DNA
atggccctgcggctgctgcggcgggccgcccggggcgccgccgccgccgcactgctgcgactgaaagctagcctggcggcagacatacctcgcctggggtatagcagctccagccaccacaaatacatcccccggcgcgccgtgctgtatgtaccagggaatgatgagaagaagatcaaaaagattccaagtctcaacgtggattgtgccgttctcgattgtgaggatggcgtcgccgcgaacaagaaaaatgaggcgcgcctacgaatcgtgaagactctcgaggacattgacttaggccctaccgagaaatgcgtgagggtaaattcagtcagtagtgggctagcagaggaggatctggagacactgctgcagagcagagtgctcccatcctcgttgatgttgcctaaggtggaatctcccgaggagattcagtgggcagtctgcgaagagactcttaaggtgggaccgcaggtgggattatttttagacgcagttgtgtttggtggcgaggactttcgtgcgtctatcggggccacctccagcaaggagaccctggatatcctctacgcaagacaaaaaatcgtggtgattgccaaagcctttgggctccaggctattgatctggtctacatagatttcagggacggggctggcctgttaagacagtccagagaaggcgctgctatggggtttacgggaaagcaggtaatccatccaaatcaaattgccgtagtccaggaacagttttcaccttctcctgaaaagataaagtgggctgaggagctcatcgcagccttcaaagaacaccagcagctgggcaaaggggcgttcaccttccaggggtctatgattgacatgcccctgttgaagcaagctcagaacaccgtaacactggcaacctccatcaaagaaaagtag

SEQ ID NO: 183175 - DNA, 921 bp, synthetic construct
  misc_feature 1..921: note = Description of Artificial Sequence: Synthetic coding sequence
  source 1..921: mol_type = other DNA
atggccctgcggctgctgcggcgggccgcccggggcgccgccgccgcagccctactgagactcaaagcttccttggctgccgacattcctcgactgggctatagttctagctcccatcataaatatatcccaaggagagccgtgctgtacgttcccggaaacgacgaaaagaagatcaagaagatcccatccttgaacgtggattgcgcggtgttggattgtgaggatggcgtggcagccaataaaaagaacgaagctagactcagaattgtcaaaacgctagaggacattgatctcgggcctacagaaaaatgtgttcgggtgaactctgtctcctctggcctggccgaggaggatttagagaccctcctgcagtcccgggtgttaccctcctctttgatgctccctaaagtagagagcccagaggagatccaatgggctgtctgcgaagaaacactcaaggtcgggccacaggtaggcctttttctggacgccgtggtcttcgggggagaagatttccgggcgtcaattggagctacgtccagcaaagagacactggacattctctatgcaaggcaaaaaatagtggttatcgccaaagccttcggactacaggcaatcgatctcgtttatatcgactttcgagacggcgccgggctcctgcggcagtccagagaaggcgccgccatgggcttcacgggaaaacaggtgatccatccaaatcaaatagccgtcgtgcaagaacagttctcaccgtcaccggaaaaaataaagtgggctgaagagctgattgccgccttcaaagaacatcaacagctgggcaagggtgcattcacgtttcagggttccatgatcgacatgcctctcttaaagcaggcacagaacaccgtgactctggcaacatcgataaaagagaaatag

SEQ ID NO: 183176 - DNA, 1023 bp, synthetic construct
  misc_feature 1..1023: note = Description of Artificial Sequence: Synthetic coding sequence
  source 1..1023: mol_type = other DNA
atggccctgcggctgctgcggcgggccgcccggggcgccgccgccgccgccttattgaggttaaaggcctctcttgcagctgatatccctagactcggctacagcagcagcagccaccataaatacatcccccgacgggcagtcctgtacgtgcctgggaacgacgagaaaaaaattaaaaaaatcccctcactgaacgtggactgtgctgtgctcgattgtgaggacggagttgcggctaacaaaaaaaacgaagccaggctacgaattgtaaaaacacttgaggatatcgatctcggacccaccgaaaagtgtgtaagagtgaacagtgtctccagtggtctcgcagaggaggacctggaaactctccttcagtcgagagtgttgccctccagtcttatgttgccaaaagtagagagccccgaagagatacaatggttcgcagataaattttctttccacctgaaggggcgaaaactcgaacaaccgatgaacctcatccctttcgttgagactgccatgggactgctaaactttaaggcagtctgcgaggaaacactcaaagtcgggccccaagtaggcctgttcctcgacgcagtggtgttcggtggggaggactttagggcgtccatcggcgccactagtagcaaggaaacactcgatatcctttatgcaaggcaaaaaattgtggtcatcgccaaggccttcgggttgcaggccatcgacctggtgtatatcgatttccgcgacggagcaggactgctccgccagagccgtgaaggggccgcaatgggattcacgggcaagcaggtaatccacccaaatcagatagccgtcgtgcaagagcagttcagcccgtctccagagaagattaagtgggccgaggagttaatcgccgcgttcaaggaacatcagcagctgggtaaaggtgcatttaccttccagggaagcatgattgacatgcctctgctcaaacaagcacagaataccgttaccctggccacatccatcaaggagaaatag

SEQ ID NO: 183177 - DNA, 546 bp, synthetic construct
  misc_feature 1..546: note = Description of Artificial Sequence: Synthetic coding sequence
  source 1..546: mol_type = other DNA
aacgaggcccggctgcggatcgtgaagaccctggaggacatcgacctgggcccaactgagaaatgtgtgcgcgtaaacagtgtctcatcagggctggctgaagaggacctcgagaccctgttgcagtctagagtcctgccatcaagtctgatgctgccaaaagtagagtccccggaagaaattcagtggtttgccgacaaattctcattccatttaaaaggccgtaagctggagcagcccatgaacctgatccccttcgtcgagaccgctatgggattgttaaacttcaaggcggtctgtgaagagaccctcaaggtagggccccaagtgggtttgtttctagatgccgtagtgtttggcggagaagattttcgtgcctccattggggtcaaagacatcagcctgagcctgttcctctgcgtgtgtgtatacatgtgtgtgtacattttcagcctccccctgaaagatgggcatctccacaataatgtgtatcttccaactatgaccatggtctttcatgataatggcatggatactacctcttag

SEQ ID NO: 183178 - DNA, 312 bp, synthetic construct
  misc_feature 1..312: note = Description of Artificial Sequence: Synthetic coding sequence
  source 1..312: mol_type = other DNA
ctgcaggccatcgacctggtgtacatcgacttccgggacggcgccgggctattgaggcagagccgggaaggcgccgcaatgggattcactggaaaacaggtgatccaccccaaccaaatcgctgtcgtccaagagcaattctctcccagtcctgaaaagataaagtgggctgaggaacttatcgccgctttcaaggagcatcaacagttgggcaagggggcattcaccttccaaggctccatgatcgacatgcctctgcttaaacaggcgcaaaacacagtgacacttgcaacttcaatcaaagagaagtag

SEQ ID NO: 183179 - DNA, 270 bp, synthetic construct
  misc_feature 1..270: note = Description of Artificial Sequence: Synthetic coding sequence
  source 1..270: mol_type = other DNA
gaggagctgatcgccgccttcaaggagcaccagcagctgggcaaggtgggaaggtattgttgcagctggctgtgcattcagccctttccatctagccccgggcagagatctcaaagtatctcccgggtgcccggaagatattgggtcttgggggcccggtcgtgggagtccaagggagcgtttacatttcagggatctatgatcgatatgccactgttgaaacaggcacagaataccgtgaccctcgcaacctcaatcaaggagaagtag

SEQ ID NO: 183180 - DNA, 444 bp, synthetic construct
  misc_feature 1..444: note = Description of Artificial Sequence: Synthetic coding sequence
  source 1..444: mol_type = other DNA
aacgaggcccggctgcggatcgtgaagaccctggaggacatcgaccttgggcctactgaaaagtgtgttcgcgtgaactctgtttcatctggacttgcagaagaggaccttgagacccttcttcagtctagggtgcttcctagctcactgatgctgccgaaggtggagtcccccgaggagatccagtgggccgtgtgtgaggagactctgaaggtgggacctcaggtgggtttgttcctggatgcagtggttttcggcggtgaagacttcagggctagcatcggagtgaaagatatttctttgtctctattcctgtgtgtttgcgtgtatatgtgcgtgtacatattttccctgcccctcaaggatgggcacctgcataataacgtatacctgcccactatgactatggtctttcacgataatggcatggatacaacctcctag

SEQ ID NO: 183181 - DNA, 909 bp, synthetic construct
  misc_feature 1..909: note = Description of Artificial Sequence: Synthetic coding sequence
  source 1..909: mol_type = other DNA
atggccctgcggctgctgcggcgggccgcccggggcgccgccgccgcggctctgcttagactgaaagcatcactggccgcagatatcccccggttgggctattcgtcgtcctcacaccataagtatattccacggcgtgcagttttgtatgtcccaggtaacgatgaaaagaagattaaaaaaataccatcactgaatgtggattgtgccgtgttggattgcgaggacggggtagcagccaataaaaagaatgaggctagacttcggatagtgaagaccctggaagatatagatcttggtccgaccgagaagtgtgtccgcgttaactcggtgtcaagcggcctggccgaggaggatctggagactcttctgcagtccagggtgctgccttcatcactcatgctccctaaagtggaaagtcctgaagaaatacaatgggccgtttgcgaggagactctgaaagtcgggccccaggtggggctgttcctagatgcggttgtgtttggaggcgaggattttagagcatctatcggcgcaacgtcgtctaaagaaactctcgatattctgtatgcacgccagaagatcgttgtaatcgcaaaagcattcgggcttcaggcgatcgacttagtgtatatcgactttcgcgacggggcaggactgctgaggcagtccagggagggagcagccatggggtttacaggcaaacaggtgattcacccaaaccaaatcgccgttgtgcaggagcagttcagcccgtcccctgaaaagatcaagtgggcggaggagctcatagcagcatttaaagagcatcagcagctcgggaaaacagttagctgttccgcaagccaggcgggcgttcagtggcgtgatctggggagcctccagcccccgccaccaggattcaaatag

SEQ ID NO: 183182 - DNA, 1401 bp, synthetic construct
  misc_feature 1..1401: note = Description of Artificial Sequence: Synthetic coding sequence
  source 1..1401: mol_type = other DNA
atggccctgctgaccgccgccgcccggctgctgggcaccaagaacgcgtcatgcctggtgttagccgcccgccacgcaagtgcaagtagcacgaaccttaaggacattctagctgatcttattcccaaagaacaagcacgcatcaagacctttcgccaacagcacggcaagaccgttgtaggtcagattaccgttgacatgatgtatggtggcatgcgcggaatgaagggattggtttatgaaacgtctgtcctggaccctgacgagggcatccgttttcgcgggttttccataccagaatgccagaagctgctcccaaaggccaagggcggtgaagaacctctgcccgaaggactattctggctccttgtcactggccacatccctacagaggagcaggtgagctggctctccaaggagtgggcgaagcgcgcagctctgccctcccacgtggtgactatgctggataattttccaacaaacctccatcctatgagtcagctgagcgccgcggtgaccgccctgaactctgagtccaactttgcgcgcgcatatgcccaaggcatcagcaggactaagtattgggaattgatctatgaggatagtatggatcttatagcgaaactgccttgcgtcgccgccaaaatttataggaacctttaccgtgagggctctggtattggggcaatcgatagcaaccttgactggtcacacaactttacaaatatgttgggttatacagaccaccaattcactgaactgacccggctatacctgactatccactccgaccacgagggaggtaacgtttccgctcatacttctcacctggtgggaagcgctctcagtgacccctacttaagtttcgctgccgcaatgaatgggctggcggggccactgcatggcctggctaaccaggaagtcctcgtctggttgacccaacttcagaaggaggtgggaaaggacgtcagtgatgaaaagctgagggattacatttggaacaccttaaattcgggtcgcgtggtgcctggatacggccacgccgttttgcgcaaaactgatccgcgctatacttgccagcgagagtttgccttaaagcatcttcccaatgatcctatgttcaagctcgttgcccagctctataaaattgtgccaaatgtgttgctggaacagggaaaagctaaaaacccttggcccaacgtcgacgcccactcaggcgttttactgcaatattacgggatgaccgagatgaactactatactgtgctattcggagtgtcgcgagccctaggggtgctggcccagcttatttggagtagggccctgggattccccttagagcggcccaagtccatgtccacagaagggttaatgaaattcgtggactctaaaagtggctag

SEQ ID NO: 183183 - DNA, 537 bp, synthetic construct
  misc_feature 1..537: note = Description of Artificial Sequence: Synthetic coding sequence
  source 1..537: mol_type = other DNA
atggccctgctgaccgccgccgcccggctgctgggcaccaagaacgcttcttgtctggttttggccgcccgccatgctagcgctagctcaacaaacctgaaggacatcctggctgacttgatacctaaagagcaagcccgaattaagacttttcgccagcaacatggtaaaacagtcgtcggtcagatcactgtggacatgatgtatggtgggatgcgggggatgaaaggattggtgtacgagacgtccgtcctggacccagacgaaggaattcgcttccgcggattttccatccctgaatgtcaaaaactactcccaaaggccaaaggaggtgaggaacctcttcccgaagggctattctggctcctggtaaccggtcatatccctaccgaggagcaggtctcttggttgagcaaggagtgggccaagcgtgctgctctgccatcccatgtcgtcacaatgcttgataactttccaaccaatttacaccccatgtcgcagctcagtgctgctgttacagcgcttaattctgagtag

SEQ ID NO: 183184 - DNA, 6084 bp, synthetic construct
  misc_feature 1..6084: note = Description of Artificial Sequence: Synthetic coding sequence
  source 1..6084: mol_type = other DNA
atgctgaagttcaagtacggcgcccggaaccccctggacgccggcgcggccgagccaatcgcgtctcgggcctccagactgaatctcttctttcagggcaagccacctttcatgacacaacagcagatgtctcctttatccagagagggtatcctggatgctctgttcgtcctgttcgaggagtgcagccagcccgcactcatgaagataaaacatgtttcaaatttcgtgagaaagtattcagacaccatagctgagcttcaggaattacagccatctgccaaagattttgaggtaaggagcttggtggggtgcggccatttcgccgaagtgcaggtagtgcgcgagaaggccaccggggatatttatgcaatgaaggtgatgaaaaagaaagctctcttggcccaggagcaggtgtcatttttcgaagaagagaggaacattttaagtcgcagtacaagtccctggataccccagctgcaatacgccttccaggataagaatcacctctacctcgtgatggagtatcagcccggaggggatttgctctcactcctgaataggtatgaagaccagctggatgaaaatctaatacagttttacttggcagaattgatactggcggtacacagcgtgcatcttatggggtacgtacatcgcgatattaaaccagagaacattttagtggaccggacgggccacatcaagctggtcgacttcggcagcgccgccaaaatgaatagtaacaaaatggtgaacgcaaagttgccaatcgggacccccgactacatggcgcccgaagtcctcactgtgatgaacggtgatggaaaagggacttacgggcttgactgcgactggtggagtgtgggcgttatcgcctacgagatgatctacggccgaagcccttttgccgaggggactagtgcacgaactttcaacaatattatgaacttccagagatttttgaagttccccgatgaccccaaggtgtcatctgacttcctagacttgatccagagcctgctgtgcgggcaaaaggaacggttgaaattcgagggcctgtgttgccacccattcttctcaaagatagactggaataacatccgcaacagtcctccaccgttcgtcccgaccttgaagtcagacgatgacactagcaacttcgacgagccagaaaagaacagctgggtcagctcgtcgccttgtcagttgagcccttctggcttctctggcgaggagctgcctttcgtcggcttcagctactctaaggctctcggtatccttggccggagcgaaagcgtggtgtcgggcctggactctccagctaagacaagtagtatggaaaagaaactgctgattaagagtaaagaactgcaggacagccaagataagtgccataagatggagcaggagatgacacgcctacacagaagggtgtcagaggtggaggccgtactatcacaaaaagaagttgagcttaaggcaagtgagacgcagcgtagcctcctagagcaggacctagccacatacatcactgagtgtagctcgctgaagaggagtctggaacaggcgcggatggaagtctcacaggaggatgacaaggcactccagctacttcacgacataagagaacagtctaggaagctgcaggaaattaaggaacaggagtatcaggcccaggtggaggagatgcggctgatgatgaatcagctggaggaggatctggtttctgcccgacgacgttctgatctttatgagagcgagctgcgtgagtcccggcttgcagcagaggagtttaagcggaaagcgactgaatgccagcacaagcttctgaaagcgaaagatcaagggaaacctgaggtcggtgagtacgctaaattggaaaaaattaacgctgagcagcaactcaagatccaagaactccaggaaaaactggagaaggccgtgaaggccagtactgaggccacagagctactgcagaatatcagacaggcgaaggaaagagccgaaagggagctggagaaactgcagaacagagaggactcttctgagggcatccgcaaaaaactggtagaggctgaggagttggaagagaagcaccgggaggctcaggtgagcgctcagcacctcgaagttcatctgaagcagaaggagcaacattacgaggaaaaaattaaggtgctggataatcagatcaaaaaagacttagcagacaaggagactctggagaatatgatgcagagacatgaggaggaagcccacgaaaaagggaagatcctgtccgaacagaaggcaatgattaacgcaatggattctaagatcagatctctagaacagagaatcgtcgaactttccgaggcgaataagctggctgctaactcttctctcttcacccagagaaatatgaaagcccaggaggaaatgatttccgagcttcggcagcaaaagttctatctagaaacccaggctggcaaactcgaagcccagaaccgcaagctagaggagcagttagagaagattagccaccaagaccacagtgataagaataggcttctagagttagagacacgcttgagggaggtgtcactggagcacgaggagcagaagttagagctaaaacggcagctgacggagcttcagctgtctctccaggaaagggagagccagttgaccgctctgcaggccgctcgcgcagctctggaaagccaattgcgacaagccaagacagaactggaggaaaccactgccgaggccgaggaggagattcaggccctgacagcccacagagatgagatacagcgaaagtttgatgctcttcggaactcatgcaccgtaataacagatctggaagagcaactcaaccagctgacagaggataacgcagagttgaacaaccagaatttctatctatccaagcaactggatgaagcctcgggtgcgaacgacgagatcgtccagcttaggtccgaggtggatcatctcagacgggaaattacggagagggagatgcagttgacctctcagaagcagacaatggaggctctgaagacgacctgcacgatgctggaggagcaggtgatggacttggaagcactgaacgatgaactgctggaaaaggaaaggcagtgggaagcatggcgcagtgtactgggcgacgaaaaatcccagttcgagtgccgggttcgagagcttcagaggatgctggatacagagaaacagagcagggcaagagctgaccaacgtataacggagagccgtcaggtagtcgagctcgctgtcaaggaacataaagcggaaatactcgcactgcaacaggccctgaaggagcaaaaactgaaagctgagtccttgagcgataaattgaatgacctggagaaaaaacacgcaatgctggaaatgaatgctagatccctgcagcaaaagctcgagactgaaagagagctaaaacagcggctgctggaggaacaagctaaactgcagcagcagatggacctgcagaaaaatcacatttttaggttgacacaggggcttcaggaagcgctggatagagccgatctgttgaaaaccgaacggagtgacctggaatatcagctcgaaaatattcaggtgctgtatagccatgagaaagtcaaaatggagggtacaatatcccagcagactaagctgattgattttctccaagctaaaatggaccaaccagcgaagaaaaaaaaggggcttttctcgaggcgaaaggaagatccagcgttgccgacccaggttccgctgcagtataacgagctgaaacttgctctcgaaaaggagaaagccagatgcgccgaactggaagaagcgttgcagaagacacgcatagaactgcgttcggcgagggaagaggctgcccatcggaaagcgacggatcatcctcacccgagcaccccagcaactgccaggcagcaaatagccatgagcgcaattgtgcggagtcctgaacatcagccgtctgccatgtctctactggctccaccatcaagccgtagaaaagagtcaagtacgcctgaagagttttcacgccgtctcaaagagcgaatgcaccacaacatcccccatagatttaatgtgggcctcaatatgagggcaacaaagtgcgccgtctgcctggacacagtccactttggacgtcaggcgagcaagtgcctggaatgccaggtgatgtgccatcccaaatgtagcacctgcctgcccgctacttgcgggcttccggcagagtacgcgactcatttcaccgaggcattttgcagagacaagatgaatagccctggattgcagaccaaagaaccttcttcgtctttacacttagagggctggatgaaggttccacgcaacaataaacgcggacagcaggggtgggatagaaagtacattgtgttggaggggtctaaagtgctaatctatgataatgaagcgcgcgaggcgggacaacgacctgtggaagaatttgagctgtgcctgccagacggcgatgtgtccatacacggcgccgtgggagcttctgagctagccaacacagctaaggctgatgtgccctatattcttaagatggagtctcatcctcacacaacctgctggccaggcaggaccctctatttactggctccctcctttccagataaacagagatgggttacagcccttgagtccgtcgtcgccggtgggcgggtttctcgtgaaaaagctgaggctgatgctaaactactaggcaacagtttgctgaaattagagggggacgatcgcctcgacatgaattgcactctgcctttcagcgaccaagtcgtactcgtgggcaccgaagaggggttgtacgcactgaacgtcctgaagaatagtctcacccacgtgcccggtattggcgccgtgttccagatttatatcatcaaagacctcgagaaattgctcatgatcgccggagaggaacgagcactgtgcctggtagatgtgaagaaagtaaaacagtccctcgctcagtctcacctacccgcccagccagatataagccctaatatcttcgaggcagtaaagggctgtcacctgttcggtgccggaaaaatcgaaaatggcctctgcatctgcgccgccatgccctcgaaagttgtgatcctccgctataacgagaacctgtccaaatactgcattaggaaggaaatcgagacatctgagccatgttcttgcatacacttcaccaattattctatactgattggcacaaacaagttctatgagatcgacatgaaacaatacacgctggaggagtttttggataagaatgatcattctctggctcccgcagttttcgccgcaagcagcaacagtttccctgtgtcaattgtccaagtgaacagcgctgggcagcgagaagagtatcttctgtgtttccacgagttcggggtctttgtcgacagttacgggcgccggtccaggacggacgatctaaaatggagccgtctacccctcgccttcgcataccgcgagccgtatttatttgttacccattttaactccttagaagtgatcgagatccaggctcggtcatcagctggtacacccgccagagcttaccttgatatcccaaatccaagatatctagggccagctatttcgagtggagcaatttaccttgctagctcctaccaggataagctccgggttatttgctgtaagggtaacctcgtcaaggagtctggtacagaacaccatcgcggtccctccacaagtaggtcctccccaaataaaagaggccctccaacgtataatgagcacatcacgaagcgagtggcttcctcacccgccccaccagaaggcccttctcacccccgtgagccctccaccccacaccggtaccgcgagggtcgcacggaactgcgccgggacaaaagccccggacggcccttggaacgggaaaaaagccccggtcgtatgctctctacaaggcgggaaagaagccccggaagactattcgaagacagcagtcgaggcagactgccagcaggcgccgtaagaacgcctttgtcccaagtgaataaagtttgggatcagtcctcagtttag

SEQ ID NO: 183185 - DNA, 6210 bp, synthetic construct
  misc_feature 1..6210: note = Description of Artificial Sequence: Synthetic coding sequence
  source 1..6210: mol_type = other DNA
atgctgaagttcaagtacggcgcccggaaccccctggacgccggcgcagccgaacccatcgcctctcgggcgtcaagattgaacctgtttttccagggtaagcccccgtttatgactcagcaacagatgagcccactgagtcgcgaaggtattctagacgcactgttcgtactgttcgaggaatgttcccagccagcgctgatgaagattaagcacgtttcaaactttgtcagaaaatactccgacacgatcgctgaacttcaagaactgcagcctagtgccaaggacttcgaggtcaggtcactggtgggttgcggccactttgccgaagtgcaagtggtgagagaaaaggctacaggtgacatctacgctatgaaggtgatgaagaaaaaggctctgctggctcaagaacaggtcagctttttcgaggaggaacgaaacattctgtctagatccactagcccatggatacctcaactccaatatgcatttcaggataagaatcacctgtatctggtcatggagtatcaacctggcggcgatctgctcagccttctgaacaggtatgaagatcagctcgacgagaacctgatccagttctacctcgctgagctgattcttgcagtgcattcagtgcatctgatggggtatgttcacagagacatcaagccggaaaacattcttgtagatcggaccggacacatcaaactggtcgacttcggaagtgccgcaaagatgaactcaaacaagatggttaacgcgaaactccccattgggacgccagactatatggcccctgaagtcctgacagtaatgaatggtgacgggaaggggacatacgggctcgactgtgattggtggtccgttggcgtgattgcatacgaaatgatttatggtcgttccccatttgctgaaggcacaagcgctcggacgtttaacaacattatgaacttccaacgatttttgaagtttccagacgaccccaaggtgagctccgacttccttgacctgattcaatctctactgtgtggacagaaggaacgcctaaagttcgaaggcctgtgttgccacccattcttctccaagattgattggaataatattcggaactccccaccacctttcgtccccacactgaagtccgatgacgatacatccaacttcgacgagccagagaagaattcatgggtgtcatcatctccttgccagctatccccatccgggttcagcggcgaagaattgcccttcgtcggcttctcctacagcaaagccctggggatcctgggaaggagcgagtcggtggtgagcgggctggatagtccggctaagacttcctccatggagaaaaagctgctcataaagtccaaagagctgcaggatagccaagataagtgccacaaaatggaacaggaaatgactagactgcaccgacgagtgtccgaggtcgaagcagttctctcccagaaagaagtggagcttaaggctagtgaaacacagcgaagcctgctcgaacaggacctggccacctatatcactgaatgctcctctttgaagaggtctctggagcaggcaagaatggaagtttcccaagaagatgacaaagcgttacagcttctccatgacattagggagcagtcccggaagctccaagagatcaaggagcaggagtatcaggctcaggtggaggaaatgagacttatgatgaaccagctagaagaggacttagtgagcgcacgtagacgctcagacctctacgagagcgaactacgggaatcccggctcgctgccgaagaatttaaacgtaaagctactgagtgccagcacaagctcttgaaagcaaaagaccagggtaaacctgaagtaggtgagtacgcgaagctggaaaagatcaacgctgaacagcaactcaagatccaagagctccaggagaaactggaaaaagccgtgaaggctagcaccgaggcaacagaattactgcagaacattaggcaggccaaggaaagggctgagcgagaacttgagaaactccagaatagagaggattcatccgaaggtatacgtaagaagctggtggaagccgaagagagacggcacagtctagaaaacaaggtcaaacgcctcgagacgatggagaggcgggaaaacagactcaaggatgacatacagacgaaatcacagcagattcagcaaatggccgacaaaattcttgagctcgaggagaagcaccgagaagcccaagtcagtgctcagcacctggaagtccacctcaagcagaaagagcagcactacgaagagaaaatcaaggtccttgataatcaaattaagaaggacctcgccgataaagagacacttgaaaatatgatgcagcggcacgaggaagaagctcacgagaaaggtaagattctgtctgagcagaaagccatgattaatgccatggatagcaagatccggtctttggagcagcgaattgtggagctgtcggaagcaaataagctcgccgcaaattcttcactgttcacacagcgaaacatgaaggctcaggaggagatgatctctgaactgcgccagcagaagttctatcttgagactcaggctggaaagcttgaagcccagaataggaaacttgaagagcagttggaaaaaattagccatcaagatcattccgacaagaaccggctcctggagcttgaaactagactcagggaggtctccctagaacatgaagaacagaagcttgagctcaaacggcagctgaccgagctgcagctcagcttgcaggagcgggagagccagctgaccgctttacaggccgcacgtgcagcactggaaagtcaactccggcaagctaagacagagctggaggagaccaccgccgaagcagaggaggagattcaagccctgactgcccatcgggatgagatccagcgcaagtttgatgccctcaggaactcctgcacagtcatcaccgacctggaggagcagctaaaccagctgaccgaggataacgccgagctcaataaccagaacttctacttgtcaaagcagcttgatgaagcatccggcgccaatgatgagatcgtccaattacgaagcgaggtagaccacctgcgaagggaaataacagaacgggaaatgcagttgacgagccagaagcagacaatggaggccctgaagaccacctgtacaatgctcgaggagcaagtgatggaccttgaggccctgaatgacgagcttttagagaaagagcgacagtgggaagcctggagatcagtcctgggggacgaaaaatcgcagtttgagtgccgagtgcgagagcttcaacgtatgctcgacactgaaaagcagagtagagctcgggccgatcagcggatcactgaaagcagacaggtcgtcgaacttgctgtcaaggaacacaaggccgagattctcgcgctgcagcaggcgctgaaggaacaaaagctgaaagcagaatcgctgagtgacaaacttaacgacttagagaagaaacacgccatgctcgaaatgaacgctcggagcctccagcaaaagctggaaaccgaacgggagttaaaacagagattgctagaagaacaggccaaactgcagcagcagatggacttgcagaagaaccatatattcagactcacccagggtctgcaggaagcactggacagagccgatctgctcaaaacggagaggtccgacctggagtaccagcttgaaaatattcaggtgctctactctcacgaaaaggtgaaaatggaggggacaatatctcagcaaaccaagctgatagattttctgcaggccaagatggatcaacccgccaagaaaaagaagggcctgttcagccgacgcaaagaagatcctgccctgccgacacaggtaccattacaatataacgagctgaaactggccctggagaaagaaaaagcgcgctgtgcagagctcgaagaagcactccagaaaacgcgtatcgaactgcggtccgcacgcgaagaggccgcccaccgaaaggcgactgatcatccccacccttctacccccgccactgccagacagcagattgctatgtccgccatcgtccgatctccggagcatcagcccagcgcaatgtctcttctggccccaccttcctcccgtagaaaggagtcaagcacccctgaagaattttctaggcgtctgaaggagcggatgcaccataacatcccgcaccgattcaatgtgggtctgaacatgcgagcgaccaaatgcgctgtctgcctggataccgtgcattttgggaggcaggcttctaaatgcctcgagtgccaggtgatgtgccacccaaagtgctctacatgcttgccagccacttgtggtttgccagccgagtacgccacccatttcaccgaagccttctgcagagacaagatgaactctcctggcctgcagacgaaggagcccagttctagtctgcacctggaaggatggatgaaggtgcctaggaataacaagcgaggacagcaaggatgggatagaaagtacatcgtcctagaaggctccaaggtcttaatatacgataatgaggcacgcgaagccgggcagcgaccagtggaagagtttgaactctgcctcccagatggcgatgtgtcaattcatggcgctgtaggggcaagcgagttggctaacaccgccaaggcagacgtgccttacattctgaaaatggaatcacatcctcatactacctgctggcctggtcgtactctttacttactggccccatcctttcctgacaaacagagatgggtgaccgccctggaatccgtggtggccggcggacgggtttcaagggaaaaagcagaggccgacgcaaagttattgggcaattcattgctgaagctcgaaggggatgaccgcttggacatgaactgtactctgccattctccgatcaagtggtgctagtcggaaccgaggagggattatatgccttaaacgtattaaagaatagcctaacccatgtccctggcatcggcgccgtgtttcagatttatattatcaaggatctggaaaagcttctcatgatcgcaggtgaggagcgtgcactgtgtctggttgacgtcaaaaaagtgaaacaaagcttggcccagtcacatctgcccgcgcagcctgatatctctcctaacattttcgaagctgtgaagggttgtcatctgttcggggcaggcaaaatcgaaaatggactttgcatctgtgctgccatgcctagtaaagtggtgatcttacgctacaatgagaacctttctaaatattgcattcgcaaggagatcgaaacttcagaaccttgttcctgcatacactttactaactacagcattctcatcggcacaaataagttttacgagatagatatgaagcaatacacattggaggaattcttggacaaaaacgatcatagtctcgcacctgcagtgttcgccgcaagttctaattccttccccgtatcaattgtgcaggtcaactcggcgggccagcgggaagaatatttactgtgcttccacgaattcggagtgtttgttgatagctatggaaggaggtctagaaccgatgacctgaaatggtcaaggttacctctcgcattcgcctacagagagccttacctgtttgtcacacacttcaacagcctggaagtgattgagatccaggcccgttcaagcgccggtacccccgctagagcatacttggatataccgaaccctcgatacttaggcccagcaatttcctccggagcaatatacctggcctctagctaccaggacaagctcagggtgatttgttgcaagggaaacctcgtgaaggagtcaggaaccgagcaccaccgcggcccttctaccagtcggtccagccctaataaaagaggcccccctacatataacgagcatatcacaaagagagttgccagctctcccgcccctccagaagggccttcacatccacgggagcctagcacaccccataggtatcgcgaaggcaggactgagctgcggcgcgacaaatctccaggccgtcctctggagcgtgagaaaagccctggcagaatgctgagcactcggagagagaggagcccagggcgtttatttgaggactcttcacggggaaggttgcccgctggcgctgtccgtaccccgctgagccaggttaacaaagtctgggaccagtcaagtgtgtag

SEQ ID NO: 183186 - DNA, 696 bp, synthetic construct
  misc_feature 1..696: note = Description of Artificial Sequence: Synthetic coding sequence
  source 1..696: mol_type = other DNA
atggaccccgagcacgccaagcccgagagcagcgaggcccccagcggcaatttaaagcagcctgagacggccgctgccctagccagctccggcagcgtcgtttcttccgtccctaaagcccagcgcaatatctctgccaagaccgccccacgaaagcaccctgccgtgagtatcaggagtgctcagtctgctgctgccgccaggcctcagggctccgaagggactgctccgtctaggaaggcaactacccgccccccacctaagcccacgttgccaccgccaactccttctgcccatactgagtccaaacttctcaatgagatggccattaaggaacgcgtcgagggaagggccaaggtgccctataagttccgcgatagcctgaagcgtttctccttttctcctactggtatgctgaagatcctgcggctttcactgattctaggagctttagcatgtttcatcataacccaggcaaacgagagcttcatcacaattaccagcctggagatctgcattgtcgtattctttatactgatatacgtgttaacactgcaccatctgctaacctatcttcattggcctttgttggacctcaccaactccatcataactgcggtgtttctctccgtggtggcaattctggcaatgcaggagaagaagcggcggcatctgctgtacgtggggggcaggtag

SEQ ID NO: 183187 - DNA, 369 bp, synthetic construct
  misc_feature 1..369: note = Description of Artificial Sequence: Synthetic coding sequence
  source 1..369: mol_type = other DNA
atggaccccgagcacgccaagcccgagagcagcgaggcccccagcgggaacctcaaacagcccgaaacagctgcagcactggcctcttccggaagcgtcgatttgacaaactctattatcacagctgtgttcttgagtgtggtcgccatcctggccatgcaggagaaaaagcgaaggcacttgctgtatgtgggtggatcgttgtgcttaaccgccgtcattgtgtgctgtattgatgccttcgtggtgactacgaaaatgagaacaaacttgaaaagatttctgggggtcgaggtcgagcgcaaactcagcccggccaaagacgcttaccctgaaacaggacctgatgcgccccagaggcctgcctag

SEQ ID NO: 183188 - DNA, 351 bp, synthetic construct
  misc_feature 1..351: note = Description of Artificial Sequence: Synthetic coding sequence
  source 1..351: mol_type = other DNA
atggaccccgagcacgccaagcccgagagcagcgaggcccccagcggcaacctcaagcagcctgagacagccgccgcccttgacctgacaaatagcattatcaccgccgtattcttgagtgtggtggctatcctggcaatgcaggagaaaaagcgtaggcacctgctctatgtcgggggctctctttgccttactgctgttatcgtttgttgtatcgacgcgtttgtcgtaactactaaaatgcgaactaatctgaagaggttcctaggggtcgaagtagaacgtaaactcagtccagccaaagacgcgtaccccgaaaccggacctgacgcccctcagcgccccgcctag

SEQ ID NO: 183189 - DNA, 279 bp, synthetic construct
  misc_feature 1..279: note = Description of Artificial Sequence: Synthetic coding sequence
  source 1..279: mol_type = other DNA
atggaccccgagcacgccaagcccgagagcagcgaggcccccagcggaaacctcaaacagccggaaacggcggctgctcttgccagcagtgggagcgtcgtctcctctgtccccaaggcccagagaaatatatctgccaaaaccgccccacgcaaacatcccgctgtctcaatcagatcagcccagtcagccgccgctgcccgccctcagggctccgaagggaccgccccctctaggattctgccaacggtgtcccttcagctgtgctccttccaatag

SEQ ID NO: 183190 - DNA, 861 bp, synthetic construct
  misc_feature 1..861: note = Description of Artificial Sequence: Synthetic coding sequence
  source 1..861: mol_type = other DNA
atggaccccgagcacgccaagcccgagagcagcgaggcccccagcggcaatctcaagcaaccggagaccgctgctgctctggctagctcaggcagtgtggtgtctagcgtgccaaaggctcagaggaacattagtgctaagaccgcccccagaaagcacccagcggtgtccattaggtcagcccagtccgcagccgccgcccgccctcagggtagtgaagggacagctccaagccgaaaggccactacaaggccaccccctaagcccacactgcccccacctacccccagcgcacatacagaatctaaattgttgaatgagatggccatcaaagagagagtcgagggcagagccaaggttccctataagttcagggattcactgaaacgcttctcttttagtccaactggcatgctcaagattcttagactcagcctgattctcggcgccttagcctgttttatcatcacccaagcaaacgagtcattcattacaattacatctctcgagatctgcatcgttgtattcttcattctcatctacgtgctcactctacaccatcttctgacttacttgcattggcccctgctggacttaacgaacagcattattacagctgtattcctcagtgttgtggctatcctagccatgcaggaaaagaagaggcgccatcttctgtacgtaggaggttccctgtgccttacggccgtcattgtttgttgtatcgatgccttcgtggtcacaacgaaaatgcggaccaacctgaaacggtttctcggtgtggaagtcgaacgaaaacttagccccgccaaggatgcctaccccgagaccggacctgatgcaccccagcgacccgcatag

SEQ ID NO: 183191 - DNA, 510 bp, synthetic construct
  misc_feature 1..510: note = Description of Artificial Sequence: Synthetic coding sequence
  source 1..510: mol_type = other DNA
atggaccccgagcacgccaagcccgagagcagcgaggcccccagcggcaacctgaagcagcccgaaaccgcagccgccctgtccctgattctgggggcgctcgcttgcttcatcatcactcaggcaaacgagagtttcataactattacgagtcttgagatatgtatcgtggttttttttatcctgatctatgttctgacacttcatcacctgctgacctatctgcactggcccctgcttgatctcactaactctatcattaccgccgttttcctctccgtggtggctattcttgcgatgcaagagaaaaaacggcgtcatctcctgtatgttgggggtagcctatgcttgaccgccgtgatcgtctgttgcattgacgcttttgtggtgactacaaaaatgaggacaaacctgaagagattccttggtgttgaggtggagaggaagctcagtcctgctaaagatgcctaccccgagactgggcccgacgcaccccagcggcccgcctag

SEQ ID NO: 183192 - DNA, 345 bp, synthetic construct
  misc_feature 1..345: note = Description of Artificial Sequence: Synthetic coding sequence
  source 1..345: mol_type = other DNA
atggaccccgagcacgccaagcccgagagcagcgaggcccccagcggcaatcttaagcagcccgagactgctgccgcgctgtcacttatactgggagcccttgcttgcttcatcatcactcaggcgaatgagtcattcatcacgatcaccagtcttgagatttgcattgtcgtgttttttatccttatatatgtgctgacactgcatcatcttctcacctacctccactggcccctcctcgacctgactaacagcatcatcaccgctgtctttttgtctgtggttgcaatcctggcaatgcaggagaagaaacgccgccatctgttatatgtcggggggcgctag

SEQ ID NO: 183193 - DNA, 117 bp, synthetic construct
  misc_feature 1..117: note = Description of Artificial Sequence: Synthetic coding sequence
  source 1..117: mol_type = other DNA
atggaccccgagcacgccaagcccgagagcagcgaggcccccagcgggaatcttaaacagcccgagactgcggctgcattggaagctgacaaggcgaacatgtccaacttcaactag

SEQ ID NO: 183194 - DNA, 87 bp, synthetic construct
  misc_feature 1..87: note = Description of Artificial Sequence: Synthetic coding sequence
  source 1..87: mol_type = other DNA
atggaccccgagcacgccaagcccgagagcagcgaggcccccagcggcaacttaaaacaacccgagaccgcagccgcgctgagatag

SEQ ID NO: 183195 - DNA, 747 bp, synthetic construct
  misc_feature 1..747: note = Description of Artificial Sequence: Synthetic coding sequence
  source 1..747: mol_type = other DNA
atggcccccaaggccgccaagggcgccaagcccgagcccgcccccgctccgcctcctcccggggccaagcccgaggaagataagaaggacgggaaggagccttctgataaaccccagaaagcagtccaggaccacaaggagccttcagataagcctcaaaaggctgtccaaccaaagcatgaagttgggacccgtcgcgggtgcaggcgatatcgatgggaactcaaagattctaataaggagttctggctgctcgggcatgctgagattaagattcgaagcctgggatgcttaatagccgcaatgatcctcttatcctccttaaccgtgcaccctattctgcgattaataattaccatggaaatctcgttcttttcattctttatcctcctgtactctttcgcgatacaccgctacattccctttatcttgtggcctatatctgatctcttcaatgatttaatcgcctgtgcctttctagttggcgctgtggtcttcgccgtgagaagtcgaagatccatgaatctgcactacctcctggctgttatcttgatcggggccgctggggtgttcgcattcattgacgtctgcctccagagaaatcatttcagggggaaaaaggccaagaaacatatgctggtgcccccacctgggaaggagaaagggccccagcaaggtaagggcccggaacccgccaaacctcccgagccaggcaagcctcccggacctgcgaaaggaaaaaaatag

SEQ ID NO: 183196 - DNA, 588 bp, synthetic construct
  misc_feature 1..588: note = Description of Artificial Sequence: Synthetic coding sequence
  source 1..588: mol_type = other DNA
atggcccccaaggccgccaagggcgccaagcccgagcccgcccccgccccacctcctcccggtgctaagcccgaggaggataagaaggatggcaaggaaccctcagacaaaccacagaaagcggtccaggatcacaaggagccctccgacaaacctcagaaggccgtccagcctaaacatgaggtagggacccgcagggggtgtaggaggtacaggtgggaattaaaggacagcaacaaagaattttggctcctaggtcatgcagagatcaagatacggagtctagatctattcaacgatctgatagcctgtgcttttctggtgggagcagtcgtgttcgccgtgagatctcgcagaagtatgaaccttcattatctgctggctgtcatccttattggcgctgccggcgtgttcgcgttcatagatgtatgcctccaaaggaatcactttagagggaaaaaagcaaagaagcatatgctcgttccacctcctggtaaagagaaaggtccgcagcagggaaaaggcccggaacccgctaaaccacccgagcctggcaagcccccagggcctgcgaaaggaaagaagtag

SEQ ID NO: 183197 - DNA, 180 bp, synthetic construct
  misc_feature 1..180: note = Description of Artificial Sequence: Synthetic coding sequence
  source 1..180: mol_type = other DNA
atgtggccccccgaccccgaccccgaccccgaccccgagcccgccggtggctctcgccctgggcccgccgtgccagggctgcgcgcacttcttcccgctcgagcttttttgtgttcgcttaaaggaccagggggatttgtgtgcacatggtgcagctgcccccaccaacccctgtggtag

SEQ ID NO: 183198 - DNA, 549 bp, synthetic construct
  misc_feature 1..549: note = Description of Artificial Sequence: Synthetic coding sequence
  source 1..549: mol_type = other DNA
atgtggccccccgaccccgaccccgaccccgaccccgagcccgccggcggcagtcggccagggcccgccgtccctggactcagagcacttctccccgccagagcttttctgtgttcccttaaggggcggctcctcctagctgaatcagggttgtcatttataacgtttatatgttacgtggcctcgtccgcctccgctttcttaacagcacctttgctcgagtttttgttggccctctattttctgtttgcagatgctatgcagttgaacgacaagtggcagggcctgtgttggccaatgatggacttcttgagatgtgttacagcggcactgatctattttgctatctccattactgcgatcgccaagtactccgatggagcgtccaaagctgccggggtttttggatttttcgcgacaattgtctttgcaacggatttctatctgatctttaacgatgtggccaaatttctgaaacaaggtgactccgcagacgagactaccgctcacaagaccgaagaggagaatagcgactctgacagcgactag

SEQ ID NO: 183199 - DNA, 549 bp, synthetic construct
  misc_feature 1..549: note = Description of Artificial Sequence: Synthetic coding sequence
  source 1..549: mol_type = other DNA
atgtggccccccgaccccgaccccgaccccgaccccgagcccgccggcggatccagaccaggaccagcagtgccagggttgagagcactcctgccagcaagagcatttctttgttccctcaagggcagactgctcctggcggagtccgggctgtcattcattaccttcatatgctacgtagcctcctcagcctcagctttcttgactgctcctttgctggagttcctcctcgccctttacttcctctttgccgacgccatgcagctgaacgataaatggcagggactgtgttggcctatgatggacttcctccgatgtgtaaccgcagcattgatatatttcgccatctcgattacagcaatcgcaaagtactcagacggggcatccaaagccgctggagtgttcggctttttcgcaactattgttttcgctaccgacttctaccttatctttaatgatgtcgctaagttccttaagcagggagacagcgccgacgaaaccaccgctcataaaaccgaggaagagaattcagattccgacagcgactag

SEQ ID NO: 183200 - DNA, 549 bp, synthetic construct
  misc_feature 1..549: note = Description of Artificial Sequence: Synthetic coding sequence
  source 1..549: mol_type = other DNA
atgtggccccccgaccccgaccccgaccccgaccccgagcccgccggaggcagtaggccgggaccagccgttccagggcttcgggcccttctccccgctagggccttcctctgttcgctcaaggggcgcctgctacttgcagagtctgggttgtctttcatcacttttatctgttacgtggccagttctgcctcagcgtttttgactgcccctctgcttgagttcttactcgctctgtacttcctgttcgcagacgcaatgcaacttaacgacaagtggcagggcctgtgctggcccatgatggactttctgcgatgtgtcacagcggctctgatctattttgctatatctataaccgccattgccaaatattccgatggcgcgtccaaggctgcaggggtgttcggcttcttcgccacaattgtattcgccactgacttttatctcatcttcaatgacgtggcaaaatttttgaagcagggagacagcgccgacgaaaccacagcccataagacagaagaagaaaattccgactctgattccgattag

SEQ ID NO: 183201 - DNA, 705 bp, synthetic construct
  misc_feature 1..705: note = Description of Artificial Sequence: Synthetic coding sequence
  source 1..705: mol_type = other DNA
atgcggagcggcgaggagctggacggcttcgagggcgaggccagcagtacttccatgatctctggagccagtagcccctaccagcctactactgagcctgtatcccaacggcgcggactcgcagggctcaggtgcgacccagattacctgagaggagcattgggcagactgaaggtagcacaagtgattctggctctaatcgccttcatctgcatcgaaaccatcatggcttgtagtccctgcgaagggctctatttcttcgaatttgtttcctgtagcgcattcgtagtgaccggggtgttgctgataatgttcagtctcaatctgcacatgcgcattcctcagatcaactggaacctgaccgatctggttaatacaggattatctgcttttctgtttttcattgcttccatcgttctagccgccctcaaccaccgggctggggctgaaattgccgcggttatattcggcttcctcgctacggccgcttacgctgtgaatacctttctggccgtccagaaatggagggtatcagtgcgtcaacagtccaccaacgactacattagagcgaggaccgaatctagagacgtggacagtagacccgagattcagcgactggacacattcagttacagtaccaacgtcactgtgaggaagaaaagcccaacaaatttgttgtctctcaatcactggcagctggcttag

SEQ ID NO: 183202 - DNA, 627 bp, synthetic construct
  misc_feature 1..627: note = Description of Artificial Sequence: Synthetic coding sequence
  source 1..627: mol_type = other DNA
atgcggagcggcgaggagctggacggcttcgagggcgaggccagctcaaccagcatgatctcaggagcatcctcgccgtaccagcctactactgagcccgtctctcaaaggagaggactagcagggctgcgctgtgacccagactatctcaggggagcccttggcaggctgaaggtggcacaggttatccttgctctaattgccttcatatgtattgagacaatcatggcctgcagtccctgcgaaggcctctactttttcgaatttgtgtcctgctctgcatttgttgtgacaggcgtgcttcttataatgttcagccttaatctacatatgaggattccgcagatcaactggaacctaacagacctggtgaacaccggactgagtgcttttctgttctttattgcctctatagtgcttgctgcattaaaccaccgggccggggccgaaatcgccgcagtgatttttggtttcctggcaaccgctgcctatgccgtcaacacattcctggccgtgcagaagtggcgagtgtcggttagacagcagtccactaatgactacattagagcacggaccgagagtcgcgacgtcgattcacgccctgaaatccagagactggacacttag

SEQ ID NO: 183203 - DNA, 672 bp, synthetic construct
  misc_feature 1..672: note = Description of Artificial Sequence: Synthetic coding sequence
  source 1..672: mol_type = other DNA
atgctgagcgcccgggaccggcgggaccggcaccccgaggagggcgtggtggcggagctacagggatttgctgtagacaaagcatttctaacctcacacaaaggcatcctgctagagacagaacttgctctgaccctgataatcttcatttgtttcacagcttccatttcagcttacatggctgcagctctgcttgagttttttattacccttgcatttctttttctgtatgcaacccagtactatcaaaggttcgaccgcatcaactggccttgtctgctccagggccacgggcagagcggcggcccacaccccctcgatctactgagtcactcagcgaaggtccaaccgcagccatggccaggattgacgccccctgggtggcacacaccagcggccgtgccatgggtgccagcacccgcccccggcttctggtcatggctgttgtggtttatctgcttccattccctgggaagttccgactttctgaggtgcgtgagtgccattatcattttcttggtggtttccttcgctgccgtgacaagcagagatggcgcagctatcgcagccttcgtctttggcatcatcctcgtgagcattttcgcttacgatgcgttcaagatatacagaacagagatggctcctggggcctcacagggagaccagcagtag

SEQ ID NO: 183204 - DNA, 225 bp, synthetic construct
  misc_feature 1..225: note = Description of Artificial Sequence: Synthetic coding sequence
  source 1..225: mol_type = other DNA
atgctgagcgcccgggaccggcgggaccggcaccccgaggagggcgtagtagccgagctccaggggtttgcagtggacaaggcatttcttacttcccataagggcatactcctcgagactgagcttgtgtttggtattatccttgtatcgattttcgcatatgacgcctttaaaatatatcgcacagaaatggcccccggcgcttcgcagggtgaccagcagtag

SEQ ID NO: 183205 - DNA, 471 bp, synthetic construct
  misc_feature 1..471: note = Description of Artificial Sequence: Synthetic coding sequence
  source 1..471: mol_type = other DNA
atgctgagcgcccgggaccggcgggaccggcaccccgaggagggcgtagtggctgagctacaagggttcgcagttgacaaagctttcttaacctctcataaaggaatccttctagaaaccgaattagccttgacactcataatttttatctgtttcacagcttctattagcgcatacatggcagcggccctgctggagttctttatcacactggccttcctgtttctgtacgccacccaatattatcagcgtttcgataggattaactggccgtgtctggatttcctgcggtgtgtgtctgcgattattattttcttagttgtaagtttcgcggcagttacttcaagggacggagccgcaattgctgcatttgtgttcggcatcattttggtctccatctttgcgtatgatgccttcaaaatctaccgcacagagatggcccccggggcttctcaaggcgatcagcagtag

SEQ ID NO: 183206 - DNA, 378 bp, synthetic construct
  misc_feature 1..378: note = Description of Artificial Sequence: Synthetic coding sequence
  source 1..378: mol_type = other DNA
atgctgagcgcccgggaccggcgggaccggcaccccgaggagggcgtcgtagccgagctgcagggtttcgctgttgacaaggccttcctcacttctcataaggggatcctgttagagacagagctggcactgacccttatcatctttatatgttttactgcgtctatctctgcttacatggcagctgccctgctggagtttttcattactttggccttcctattcctctatgcaacccagtattatcagcgctttgacagaattaattggccctgcctcgtgtttgggatcattttggtcagcatttttgcctacgatgctttcaaaatttaccggaccgaaatggcacccggtgcatctcagggggatcaacagtag

SEQ ID NO: 183207 - DNA, 318 bp, synthetic construct
  misc_feature 1..318: note = Description of Artificial Sequence: Synthetic coding sequence
  source 1..318: mol_type = other DNA
atgctgagcgcccgggaccggcgggaccggcaccccgaggagggcgtggtggccgagctccaaggttttgccgtcgacaaagcttttctcacttcccataagggtatcctactggagaccgagctggacttcctgaggtgtgtttctgccattattatatttctggtggtgagtttcgccgctgtcacttcacgcgacggagccgcaattgctgcctttgtgttcggtatcatcctggtaagcatctttgcctacgacgctttcaaaatatatcggaccgaaatggccccaggcgctagccagggtgaccagcagtag

SEQ ID NO: 183208 - DNA, 1326 bp, synthetic construct
  misc_feature 1..1326: note = Description of Artificial Sequence: Synthetic coding sequence
  source 1..1326: mol_type = other DNA
cccagccccgccatcggcctgttcgccagcatggccgccgtgctgttggggggcgcgagagctagtagattgctattccagcgtctcctctgggatgtagtgagatccccaataagttttttcgagagaacccccatcgggcatctgctaaaccgcttttctaaagagacagacacagtggatgttgacattccagacaagttgaggtctctgctgatgtacgcatttggactcctggaggtctctctcgtcgtcgccgttgctacacctcttcccctctggccgtcctgccactgtttctctagcacactgggttttcggtggctggcagccaatgtcgaacttctgggaaacggcctggtttttgcagccgccacttgtgccgtgctctccaaagcacacctgagcgccggtctagttggattctccgtgtcagcggcactgcaggtgactcaaacgctccagtgggtggtcagaaactggaccgacctcgaaaattctattgtatcagtggagcgaatgcaggattacgcctggacgcccaaggaggctccgtggagactccctacttgtgcagcccagccgccttggcctcagggtggtcagatcgaattccgagattttggcctgcggtatagacccgagctgcccttagcagtccagggtgtcagcttcaagatacacgccggcgagaaagtcgggattgtggggcgtactggagccggcaaatcctccctggccagcgggcttctacgtttgcaagaggccgccgagggcggcatctggatcgacggggtgcccattgcgcatgttggcctgcacactctcaggtcaagaatcagtatcatcccacaggaccccattttgttcccaggatccttaaggatgaatttggatttgctgcaggaacatagcgatgaggctatctgggcagctctggagacagtgcaattaaaggccctcgtggcaagcttaccggggcagcttcagtacaaatgtgccgatcgaggggaggacctaagtgtaggccaaaaacagctgctttgtctagcccgggcccttctgcgcaagacccagattctgatactcgacgaggccactgctgcggtagatccgggaacagaactgcagatgcaggccatgctggggagctggttcgcacaatgtacagttctgctgatcgcccataggctgcggtcagtcatggactgcgcacgtgtgctggtcatggacaagggacaggttgctgaatccggatctcccgcacaacttcttgcgcagaagggtctgttttacaggctcgctcaggaaagtggtctagtatag

SEQ ID NO: 183209 - DNA, 528 bp, synthetic construct
  misc_feature 1..528: note = Description of Artificial Sequence: Synthetic coding sequence
  source 1..528: mol_type = other DNA
atgagccacggcgccggcctggtgcggaccacctgcagcagcggctctgcattagggcctggcgccggagccgcccagccttcggcgtctccacttgaagggctgttggatctgtcgtaccccagaacccacgcggcactgttgaaagtcgcccagatggtaactcttctgatagcattcatttgcgtgcggtcaagtctctggacgaactacagtgcctacagttatttcgaagtcgtgaccatatgcgacctgataatgatcctggccttctacctggtgcatctgtttcgcttttatcgtgtacttacatgtatctcatggcctctctctgagctcttgcattacttgatcgggaccctcttactgctgatagcctccattgttgccgcatcaaagtcttacaatcagagcggcttggtggccggcgccatttttggctttatggcaacattcctgtgtatggcctcaatatggctgtcatacaagatttcatgcgtcacccagtctactgatgctgccgtgtag

SEQ ID NO: 183210 - DNA, 429 bp, synthetic construct
  misc_feature 1..429: note = Description of Artificial Sequence: Synthetic coding sequence
  source 1..429: mol_type = other DNA
atgagccacggcgccggcctggtgcggaccacctgcagcagcggctctgcattaggcccaggagccggagctgctcagcccagtgcttcacctttggaaggactactggacctctcatacccccggacgcacgcagctcttctaaaggtagcgcagatggtcaccctactgatcgcattcatctgcgtcaggtctagcctgtggacaaactactccgcctattcctattttgaggtcgtcacaatatgcgaccttatcatgatcttagccttctatctggtgcatctgttcagattctatagggtgctaacgtgcatctcttggcccctttctatcttcggctttatggccacctttctgtgtatggctagtatatggctttcctataagatcagttgcgtgacccaatccacggacgctgctgtctag

SEQ ID NO: 183211 - DNA, 522 bp, synthetic construct
  misc_feature 1..522: note = Description of Artificial Sequence: Synthetic coding sequence
  source 1..522: mol_type = other DNA
atggaggagccccagcgggcccggagccacaccgtgaccaccaccgcctccagcttcgctgaaaactttagtacatcttctagctctttcgcatacgaccgggaatttctacggaccttacccggatttctgatagtagccgaaattgttctggggctcttggtatggacgttgatcgccggaaccgaatactttcgtgtccccgccttcggatgggtaatgttcgtggccgttttttactgggtcctcacagtgttttttcttatcatctacatcacaatgacctatacacgcatcccccaagttccgtggacgactgtaggtctctgtttcaatggctccgctttcgtgctgtatctttccgctgctgtggtggacgcgtcttcagtctctccagagagggactcccacaatttcaatagttgggcagcttcatcattcttcgccttcctcgtgacgatatgctatgcaggcaatacatacttttcatttatcgcttggcggtcccgaacaatacagtag

SEQ ID NO: 183212 - DNA, 363 bp, synthetic construct
  misc_feature 1..363: note = Description of Artificial Sequence: Synthetic coding sequence
  source 1..363: mol_type = other DNA
atgcaggccctgcagcagcagcccgtgttccccgacctgctgaaggccattcctgtaagtatccacgttaacgtcatactctttagtgcaatcttaattgttttgaccatggtggggacagcctttttcatgtacaacgcattcggcaagcctttcgagactcttcatggacctctaggactatatttgctgtcttttatcagtggatcctgcggctgcctagttatgattttgttcgccagcgaagtgaagatccaccatctctctgagaagatcgccaattacaaagagggaacttacgtgtacaagacacagtcagaaaaatataccacgtcattttggctaactaaaggccattcctag

SEQ ID NO: 183213 - DNA, 699 bp, synthetic construct
  misc_feature 1..699: note = Description of Artificial Sequence: Synthetic coding sequence
  source 1..699: mol_type = other DNA
atgcccagccagcagaagaagatcatcttctgcatggccggcgtgttctccttcgcctgtgcacttggggtggtcacagcgctcggcacacctctctggatcaaggccacagtcctgtgcaagaccggtgccttgctcgtcaacgcttctgggcaggaactggataagtttatgggtgagatgcagtacggacttttccatggagagggcgtaagacaatgcgggctgggagcacggcccttcagattttctttcttcccagacttgctcaaggccatccctgtgagcatacatgtaaacgtgatcctctttagtgctatattaatcgtgctcactatggtcgggactgcttttttcatgtacaatgccttcggtaaaccatttgagaccctgcatggtcctctcggtttgtatctcctctccttcatatcaggctcctgcggatgcctggtcatgatactgtttgcttccgaggttaaaattcaccacctgtccgagaaaatagccaattataaggagggcacatatgtctacaagacgcagtccgagaagtacaccaccagcttttgggtaatcttcttctgcttcttcgtgcatttcctgaatggactgttgattagactggcaggcttccaattcccttttgcgaaatcaaaagacgccgaaaccacaaacgtggctgccgaccttatgtactag

SEQ ID NO: 183214 - DNA, 738 bp, synthetic construct
  misc_feature 1..738: note = Description of Artificial Sequence: Synthetic coding sequence
  source 1..738: mol_type = other DNA
atgcccagccagcagaagaagatcatcttctgcatggccggcgtgttctctttcgcatgtgctctcggcgtggttacagccctcggcactcccctgtggattaaagcaacagtcctctgcaaaaccggagccttgctagttaacgccagtggtcaggagttagacaaattcatgggtgaaatgcagtatggcctctttcacggcgaaggggtccgccagtgcggtctaggagcacgccctttcaggttttccttctttcccgacttgttaaaggcaattcctgtgagtattcacgttaatgttattttgttcagcgcaatcctgattgtcctgacaatggtgggcaccgcattcttcatgtataatgcctttgggaaacccttcgagaccctgcacgggcccctcgggctgtatctcctttctttcatatccgttgcactttggctgccggccacacgccaccaggcccagggatcatgtggatgtctcgtcatgattctcttcgcaagcgaagtgaagattcatcacctgagcgagaaaatcgctaattataaggagggaacttacgtctataagacccagagcgagaaatacaccacctcgttttgggtgatctttttttgtttctttgttcactttcttaatgggctcctgattcgcctcgccggatttcagtttccattcgctaagtccaaggatgccgaaacaacaaatgtggcggctgatctgatgtactag

SEQ ID NO: 183215 - DNA, 348 bp, synthetic construct
  misc_feature 1..348: note = Description of Artificial Sequence: Synthetic coding sequence
  source 1..348: mol_type = other DNA
atgcaggccctgcagcagcagcccgtgttccccgacctgctgaaggcaatccctgtgagtatacacgttaacgtgattctgttttcagctatcctcatcgtccttacaatggtggggactgcgttcttcatgtataatgccttcggcaagcctttcgaaactttgcatggcccgcttggtctgtacctgctcagtttcatatcaggcagctgtggctgtctggtgatgatcttattcgcaagcgaggtgaaaatccaccacctgtctgagaaaattgcaaactataaggaaggtacttacgtgtataaaacccaaagcgagaaatataccacctcattctgggtttag

SEQ ID NO: 183216 - DNA, 1878 bp, synthetic construct
  misc_feature 1..1878: note = Description of Artificial Sequence: Synthetic coding sequence
  source 1..1878: mol_type = other DNA
atgaactacagcgagatcgagagcaaggtgcgggaggccaccaacgatgacccttggggtccgtccggccaactgatgggtgagatcgctaaggccacattcatgtatgagcagtttcctgaactaatgaacatgttgtggtccaggatgctcaaggataacaaaaagaattggcgaagggtatataagagcctcctgcttctcgcttatctgatccgtaatggctcggaacgagtcgtgacttcagccagagagcacatctatgatctgcgctccttggagaactatcatttcgtagatgagcacggaaaggaccagggtataaatatcaggcagaaggtcaaggaactggtggagtttgcccaagacgatgacaggttgcgagaagagcggaaaaaagcaaaaaagaacaaggacaagtatgtgggcgtgtctagtgattcagtcggtggattccgttattcagaaaggtacgacccggaacccaagtcgaagtgggacgaagagtgggataagaataagagcgccttccctttcagtgacaaactgggggaactgtccgataaaattggcagtaccattgatgatacgatttctaaattccggagaaaggatcgagaggacagccctgagcggtgctcagattcggacgaggagaaaaaagccaggcgtggccggagccctaagggcgaattcaaagatgaagaggagactgtcacgaccaagcacattcatattacacaggcgaccgagacgactacgacccggcacaaacggacagccaaccctagtaaaacaattgatcttggcgccgcggcccactacaccggcgacaaggctagtccggaccaaaacgccagcactcatactccccaatccagtgtgaaaacttccgtgccgtcttccaaaagctctggagatctggtggatttgttcgacggcaccagccagtctaccggcggcagtgccgatctcttcggtgggttcgctgattttggctctgcagctgctagcggaagcttcccaagccaggtaactgccactagcgggaatggagactttggggactggagtgcttttaaccaggccccttcaggtcctgtggcttcctctggcgagttctttggcagcgcttcccagccggcagttgagctggtatccggatctcagtcggccctgggacccccgcccgctgcatcaaactcctcagacttatttgacctcatgggatctagccaggctaccatgaccagctcacagagcatgaacttctctatgatgtccactaacactgtcgggttgggcttaccgatgagcagaagccagcctttgcaaaacgtctcaactgtgttgcaaaagccaaacccgctgtataaccagaataccgacatggtgcagaagagtgtgtcaaaaactctgccaagcacttggagtgatccgtcggtcaatattagcctcgacaacctgttgcccgggatgcaaccctcaaaaccccagcaaccaagcctcaacacaatgatccagcaacaaaatatgcagcagcctatgaatgtaatgacacagtctttcggcgctgtaaatttgtcctcaccatctaacatgttgcctgtgagaccccagaccaatgcgttaataggcgggccaatgcccatgtctatgcccaatgtcatgacagggactatgggaatggcccccctggggaatacgccaatgatgaatcagagcatgatggggatgaacatgaatatcggaatgagtgccgctgggatggggctaacaggcacaatgggaatgggcatgccaaatattgccatgacaagcgggactgtccaaccgaagcaggacgctttcgctaatttcgccaacttctcgaaatag

SEQ ID NO: 183217 - DNA, 1878 bp, synthetic construct
  misc_feature 1..1878: note = Description of Artificial Sequence: Synthetic coding sequence
  source 1..1878: mol_type = other DNA
atgctgaacatgtggaaggtgcgggagctggtggacaaggccaccaacgtggtcatgaattatagtgaaattgagtccaaggtgagagaagcaacaaatgatgacccctggggaccaagcgggcagcttatgggggagatcgctaaggcaacctttatgtatgagcagttcccagagctcatgaatatgttatggtctagaatgttgaaggacaataagaagaattggaggagggtctataagtccctgctgctactagcctatctcatccgcaatggcagcgaaagggtcgtgacctcagcccgcgagcacatctacgacctccggtctctggagaactaccacttcgtggacgaacacgggaaagatcagggaatcaacattcgtcagaaagtgaaggagcttgtcgaatttgcacaggatgatgaccgcctaagagaagaacgcaagaaagccaaaaaaaataaagacaagtacgtaggcgtctcatctgactccgtgggtgggtttcgctattccgaacgttatgatcccgaacccaaaagcaagtgggacgaggagtgggataaaaataagagcgcctttcctttctccgacaaacttggggaattgtcagacaagattggcagtacgattgatgatactatcagcaagtttcgccgaaaagacagggaagattctcctgagagatgttcggatagtgacgaggaaaagaaggcaagacgcggacgcagcccgaaaggtgaattcaaggacgaggaggagacggtgacgactaagcatatacatataacgcaggcaaccgaaaccaccacgactcgccataagcgaacagccaacccttcaaagacaattgacctcggcgccgctgcacattatacaggagacaaggcaagtcccgatcaaaatgcctcaacccacacgccccagtcaagtgtgaagacgagcgttccttctagcaagtcttccggggacctggtcgaccttttcgacggcacgagccagtccacaggcggctccgcagacctgttcggtggattcgcagatttcggttctgctgcagcatctgggagctttcccagccaagtgaccgctacaagtggtaatggcgatttcggtgactggtccgcctttaaccaggctccctcggggcctgttgccagcagcggcgagtttttcggttctgctagccagccagcagttgagctggtgtctgggtctcaaagcgccttgggacccccaccggccgcatccaattccagcgatttgttcgacttgatggggtcatcccaggcgaccatgacatcctctcaatccatgaactttagcatgatgtccacaaacactgttggcctcggcctgcctatgtcccgaagtcaaaacacagacatggtccagaaatccgtcagcaaaactctgccatctacttggtccgacccctctgtgaatatctccctcgataacctcctgcctggcatgcagccaagcaaaccgcaacagccaagcctgaataccatgatacagcaacagaacatgcagcagccaatgaatgtcatgactcagtcatttggtgcagtaaacctgagttccccatctaatatgctcccagtcaggccacagacgaacgcgctaatcggcgggccaatgccaatgagcatgcctaatgtaatgaccggaaccatgggaatggcacccctagggaatacgcccatgatgaatcaaagtatgatgggcatgaatatgaatatcggtatgtctgccgccggaatgggtctgacaggtacgatgggcatgggaatgcctaacattgccatgaccagcggcacggtgcaaccgaagcaggacgcttttgccaacttcgcgaatttttcgaaatag

SEQ ID NO: 183218 - DNA, 1878 bp, synthetic construct
  misc_feature 1..1878: note = Description of Artificial Sequence: Synthetic coding sequence
  source 1..1878: mol_type = other DNA
atgaactacagcgagatcgagagcaaggtgcgggaggccaccaacgatgacccatgggggccgtcaggacagctgatgggggagatcgcaaaggccacattcatgtacgagcagttccccgaactcatgaatatgctgtggtcgcgcatgctgaaagacaataagaaaaactggcggagagtatataagagcctactgctgctcgcctacttgattcggaatgggtccgagcgggttgtaacttcggcccgagaacacatctacgatctgaggtccctggaaaactatcatttcgtcgatgaacacggcaaagatcaggggataaatatcaggcaaaaagtcaaagagctcgtggaattcgcccaggacgatgaccggcttagggaggagaggaaaaaggccaaaaaaaacaaggacaaatatgttggcgtgtcttcagactcggttggaggattccgatatagcgagcgttatgaccctgaaccgaagtccaagtgggacgaagaatgggataagaacaagagcgcctttccattttcagataagcttggcgaactgtctgacaaaattggatccacaatcgacgatacgattagcaagtttcggagaaaggacagagaagactcccccgaaaggtgtagcgatagtgatgaagaaaagaaggctcgccgcggtagatcccctaaaggtgagttcaaagacgaagaagaaaccgtcaccaccaagcacatccatatcactcaggcgacagaaacaactacaacgcggcataagcgtaccgcaaatccttctaaaacgatcgatctgggtgccgctgcccactacaccggtgacaaggcctcacccgaccagaacgcaagtacacatacaccacagagcagcgttaaaacatcagtgcctagcagtaagagtagcggggacctggttgatctgttcgatggtacttcccagtctaccgggggcagcgccgatttattcggtgggttcgctgacttcggctccgccgcagcctcagggtcgtttccaagccaggtgaccgctacatcaggtaacggtgacttcggtgactggtctgccttcaatcaggccccaagcgggcccgttgcgagttccggcgagttttttggtagcgcttcgcagcccgctgtcgagctggttagcggctcccagagtgcactggggcccccccccgctgcaagtaatagttccgacctctttgacctcatgggctcctcacaggctacaatgacttcctcccagtcaatgaatttcagcatgatgtctactaatactgtggggctgggacttccaatgtccagaagccagccgttgcaaaacgtgtctactgtgctccagaaaccaaatcccctgtacaatcagaacacggatatggtgcaaaagagcgtatctaagacactgccgtccacatggtctgatccttcggttaatatcagcctcgataatctgctgcccggtatgcagccttctaaacctcagcagcccagcctgaataccatgattcagcaacaaaacatgcaacaaccgatgaatgtcatgacacagtcttttggggcggtgaacctgtcctctccatccaacatgctacccgttcgaccccagaccaacgcactgatagggggccccatgcccatgagcatgcccaatgtgatgacagggacgatgggcatggcccctttgggcaatacaccaatgatgaaccaaagtatgatgggaatgaacatgaacattggcatgagcgctgccggtatgggcctgacaggcacaatggggatgggcatgcccaacattgccatgactagtggaactgtccagcctaaacaggacgctttcgccaactttgctaatttctctaagtag

SEQ ID NO: 183219 - DNA, 1878 bp, synthetic construct
  misc_feature 1..1878: note = Description of Artificial Sequence: Synthetic coding sequence
  source 1..1878: mol_type = other DNA
atgaactacagcgagatcgagagcaaggtgcgggaggccaccaacgatgacccctgggggccctccggacagctgatgggcgagatcgccaaggccacttttatgtacgagcaatttccagagttgatgaacatgctctggtccaggatgcttaaagacaataaaaagaattggcggagggtctacaaatctctgcttttactggcttatctgatccgcaacggctctgagagagtggtgacctccgcgagggaacacatttacgatctcagatctttggaaaactaccatttcgtcgacgaacatggcaaagaccaagggattaatataagacagaaggtgaaggagctggtggagttcgcccaagatgatgatcgactgcgggaggaacgaaagaaggcaaaaaaaaataaagataagtacgtgggcgtgagctctgactcagttgggggatttcgctattccgagcgctacgatccggagcctaaaagcaaatgggacgaggagtgggataagaacaaaagcgccttcccctttagcgataagctgggcgaattatccgataagatcggctctacaatcgacgacacaatttctaaattccgacgcaaagatagggaggactctcccgaaagatgtagtgattccgatgaggagaaaaaggctcgacgggggcgaagcccgaagggcgagttcaaagacgaggaggagactgtcacgacgaagcacattcatattacgcaggctacagaaaccacaacaaccagacacaaacgcacagccaaccccagcaagacaattgatcttggggctgcggctcattacactggggacaaggcaagcccagaccagaacgcatctacccacactcctcagtcttccgtgaagacaagcgttccgtcttccaagtcatcaggagatctggttgaccttttcgacggaacgtcacagagcacagggggatcagccgacttgttcggcggctttgctgactttggctctgctgccgcatcaggttctttccctagccaggtgacggcgacctctgggaatggcgacttcggcgattggagcgccttcaaccaggccccaagtgggccggtagctagttccggagagttcttcgggtctgcatcccagccggctgtcgagctggtcagcggctcacaatctgctctgggaccccctcctgccgccagcaacagctcagatctgttcgatctgatgggcagctctcaggcaacaatgacctcaagtcagtctatgaatttctcgatgatgtccacgaatacagtcggcctggggctccctatgtctcggtctcagcccctgcaaaacgtttctacagtactccagaagccaaatcccctgtataaccagaacacggacatggtacagaaatccgtgagtaaaacgctgcctagcacctggtctgatccttctgttaacatttccctggacaatctcttaccaggcatgcagcccagtaaacctcagcagcctagtctcaataccatgatccagcagcagaatatgcagcaaccaatgaacgttatgacccaatcatttggggctgtgaacttgagctctccatccaacatgctccccgtgagacctcagaccaacgcgctcatcggtggtcccatgcctatgagcatgccaaacgtgatgactgggactatggggatggcacctctgggcaacacacctatgatgaatcaatcaatgatgggaatgaatatgaacatcgggatgtcagccgctggcatgggtcttactggcacaatgggcatggggatgccgaatattgctatgacatcagggactgtgcagcccaaacaggatgcctttgcaaactttgctaatttctccaagtag

SEQ ID NO: 183220 - DNA, 1932 bp, synthetic construct
  misc_feature 1..1932: note = Description of Artificial Sequence: Synthetic coding sequence
  source 1..1932: mol_type = other DNA
atgctgaacatgtggaaggtgcgggagctggtggacaaggccaccaatgtggtgatgaattattcagagatcgaatccaaggtccgggaggccaccaatgatgacccctggggcccatccggacaattgatgggagagattgccaaggcaaccttcatgtacgaacagttcccagaactcatgaatatgctttggagcaggatgttgaaagataacaagaagaattggaggagggtgtataagtctctactcctactcgcttatctaatcaggaatggatccgagcgcgtagtgacctcggcacgagagcacatttacgacttaaggagtctggaaaattatcatttcgtggacgaacacggcaaagaccagggaatcaacattcggcagaaggtgaaggagcttgtggagtttgctcaggacgacgacaggttgcgcgaagaacgcaagaaggccaaaaaaaacaaagacaaatatgtaggggtcagttcggactccgtaggaggattcagatactccgagcgctacgatcccgaaccgaagagcaagtgggatgaagaatgggataagaacaaatctgccttccccttctccgacaaactcggcgagctgtcggacaagattgggagcaccatagacgacacaatttctaagtttagaagaaaagatcgcgaggactctcctgagcgttgtagcgactcggacgaagagaagaaggcgcggcggggccgcagccctaaaggggaattcaaggatgaggaggagacagtcaccaccaagcacatccacatcacccaggctactgaaaccaccactaccaggcacaaaaggacggctaacccctccaagaccattgacttgggcgcagccgctcactacacgggcgacaaagcttcacccgaccagaatgcctccacacacacgccccagtctagtgtgaaaacgagtgttcccagtagtaagagcagtggagacctcgtggacctgtttgatggcacttctcaaagtacgggaggatctgctgacctgttcgggggatttgcggacttcgggagcgcagcagcctcaggaagttttccctctcaggtgaccgccactagtggcaatggcgatttcggcgactggagtgcatttaaccaggctccatctggcccagtcgcttcttcaggcgagtttttcggatccgccagccaaccagcggttgaactggtctcagggtctcagagtgctctgggccctcccccagcagcttccaactctagcgatctgttcgacttgatggggtctagccaggcaacaatgactagctcgcagtccatgaacttctcgatgatgtctaccaacacggtaggcctcggacttcccatgtcacgatctcagcctttacaaaacgtgtctaccgtccttcaaaagcctaaccctctttataaccaaaacacggatatggttcaaaaaagcgtgtcaaaaacattgccctccacctggtctgacccttccgtcaacatatccctcgataatttactccccggtatgcagccatctaaaccccagcaaccctcacttaacacaatgattcagcagcagaatatgcagcaaccaatgaatgtcatgacgcagtctttcggagcggtgaatctgtccagccctagtaacatgctgccggtccgtcctcagacgaatgcgctgatagggggccctatgccaatgtccatgcccaacgtgatgacggggacaatggggatggctccactgggcaacacccctatgatgaatcagagtatgatgggaatgaacatgaacatcggtatgtcagctgccggtatgggactgactggaaccatgggcatgggaatgcctaatatcgcaatgacctccggcaccgtccagcccaaacaggacgccttcgcaaattttgcaaatttctcgaaatag

SEQ ID NO: 183221 - DNA, 5028 bp, synthetic construct
  misc_feature 1..5028: note = Description of Artificial Sequence: Synthetic coding sequence
  source 1..5028: mol_type = other DNA
atggcccagatcctgcccatccggttccaggagcacctgcagctgcagaatttgggcattaatcctgcaaacattggcttctctacactcactatggaatctgacaagttcatctgcattcgggagaaggtcggcgaacaggcccaagtcgtgattatcgacatgaacgaccccagtaatcccattcgcagaccaatatcagctgacagtgctatcatgaatccagcctccaaagtgatcgccttgaaagccgggaagaccctgcaaatttttaacattgagatgaaatcaaagatgaaagcacacactatgactgacgacgtgaccttttggaagtggatctcattaaacacagtcgcactcgtgacagataatgccgtctatcactggtctatggagggcgaaagtcagcctgtgaagatgttcgacaggcatagctcactcgcagggtgtcagattatcaattatagaactgacgccaaacagaagtggttgctgctgacaggcatctcagcgcagcagaatcgtgtggtgggagccatgcaactttatagtgtggatcgcaaagtttctcagccaatcgaaggccacgccgctagtttcgcacagttcaagatggaaggcaatgctgaagagtccactctattctgcttcgccgttagggggcaggcgggcggcaagctccacatcatcgaagtggggaccccacctacagggaatcaacccttccccaaaaaggccgtggatgtgttcttccctccagaagcacaaaatgacttccctgtggctatgcagatttccgaaaagcacgatgtagtgttcttgataaccaagtatgggtacattcatctctacgacctggaaaccggtacgtgtatctatatgaatagaatctcaggggaaaccatctttgtgactgctccacacgaagccaccgccggaatcattggggtcaacagaaaggggcaggtactgtccgtttgcgtggaggaagaaaacattattccatatattacaaatgtgttgcagaatcccgatcttgccctgcgaatggccgtgaggaataatctagccggggcagaggagttattcgccagaaagttcaatgccctcttcgcccaaggcaattacagcgaagctgccaaagttgccgccaatgcacccaagggtatcttgaggacccccgataccatcaggcgcttccaatcggtccccgcacagcccggtcaaacatctcccctcctgcagtattttggaatactgctagaccaaggacagctgaacaagtacgaatctctcgaattgtgtcgaccagtcctgcaacaaggaaggaagcaactccttgaaaagtggctgaaggaagacaagttggagtgctccgaagaactcggggatctcgtcaaaagcgtcgatccaacgttggccctttctgtgtatctaagagcgaatgtccctaataaagtgatccagtgttttgccgaaaccggccaggtccagaagatagtgctctatgcaaaaaaggtgggatacactcctgattggatattcctgctccgcaacgtaatgcgcatcagtccagaccagggtcagcaattcgcgcaaatgttggtgcaggatgaggaaccactcgccgatattacacagatcgtggacgtcttcatggagtacaacttaatccagcagtgcaccgcttttctcctggacgcccttaagaataataggccaagtgagggtcctttacagacacgtcttttagagatgaatctcatgcacgcaccccaggtggctgatgccatccttggtaaccaaatgttcactcattacgatcgagcccacattgcccagctttgtgaaaaggccggcctgctgcagcgcgccctcgagcattttaccgatctgtatgacataaagcgcgctgttgtacacacacacctgctcaatcctgagtggctggtgaactacttcgggtcactttctgtggaagatagtcttgaatgcttgcgcgcgatgctcagcgctaatattaggcaaaacctccaaatttgcgttcaagtggctagtaaatatcacgaacagctgtctacccagtcactgatcgaactgtttgagtcgtttaagtcattcgaagggctgttctactttctgggatctattgtaaattttagccaggacccagacgttcacttcaaatatatccaggccgcgtgtaagactggccagatcaaagaggttgagcgaatttgtcgcgaaagcaattgctatgatccagaaagggttaagaatttcctgaaagaggcaaagctcacagatcaattgcccctcattatcgtgtgtgataggtttgattttgttcatgacctggtgctgtacttgtacagaaataacctgcagaaatatatcgaaatttacgtgcagaaagtcaaccctagccggctgcccgtggtcatcgggggcctgttggatgtagattgcagcgaagatgttataaaaaacctgattctagtcgtgaggggacagtttagtacggacgagttggtggccgaagtagagaaacggaacagattgaaactcttactgccttggctcgaagcccggattcacgaagggtgcgaagaacctgctacccataacgcccttgcaaaaatatacattgacagcaacaataacccagagcgattcttaagagaaaatccttattatgatagcagagtggtgggcaagtactgcgaaaagcgagacccacatctggcctgtgttgcctacgaaagggggcaatgcgatctggagctgatcaatgtgtgcaatgagaacagcttattcaaatccctgtccagatatttggtgcgaagaaaggacccagaactttgggggagcgtactgctcgagagcaatccttacagaaggcctttaattgatcaagtcgttcaaactgcgctgagcgagacacaggaccctgaggaagtgagtgtcactgtgaaggccttcatgactgcggacctccctaacgagttgatagagcttctggagaagatcgtcctagataacagcgtcttcagtgaacaccggaatctgcaaaacttgctgattttgacagccattaaagccgaccgaacaagggtgatggagtacatcaataggcttgataattatgatgccccagatatcgccaacatagccatctcaaatgaattgttcgaggaagcatttgccatctttcggaagtttgacgtcaacacaagtgccgtacaggtccttattgagcacatcgggaatttggaccgtgcttacgaattcgcagaacggtgcaacgaacctgccgtatggtcccagctcgccaaagcccagttgcagaagggcatggttaaggaagcgattgactcttacataaaagcagacgacccctcgagttatatggaagttgtgcaggccgccaacacttccggaaactgggaggagctcgtcaagtatttgcaaatggccagaaagaaggccagggagagctacgtggagacagagctcatctttgctcttgcaaaaaccaataggctcgcagaattggaggagtttataaatggccccaataatgcccacatacagcaggtgggggacaggtgttatgatgagaagatgtacgatgcagccaagttactgtacaacaacgtctcaaatttcgggaggttagctagcacattggttcatttgggagagtaccaggccgccgttgatggggctcgtaaggccaattctacacgaacgtggaaagaggtgtgttttgcgtgtgtggatggcaaagagtttagattagctcagatgtgcggcttgcatatagttgtacacgctgacgagttggaggagttaattaattactaccaggaccgaggatacttcgaagagctgataacaatgctggaggctgcgctgggactcgagcgtgcacacatgggcatgttcaccgaactggctatcctctattcaaagttcaagccacagaagatgcgagaacacctggagctgttctggtcgcgcgtgaatatccccaaggtgttgagggcggccgaacaggctcatctgtgggctgaattggtattcttatatgacaagtacgaggaatacgataatgcaataataaccatgatgaaccatcccaccgatgcttggaaagaggggcagttcaaggatattattacaaaggtggcgaacgtggaactatattaccgcgcaattcagttctatctcgagtttaaacctctgttgctcaacgacctgctgatggttttgtcacccaggctagaccatactcgcgccgtgaattacttcagcaaagtgaaacagttgcctctagtgaagccctacctccgatccgtgcagaatcacaacaacaagagcgtgaacgagagtttgaacaatctttttatcacagaggaggattaccaggcgctgaggacctcaatcgacgcatatgacaatttcgataatatcagcttggcccagagactcgaaaaacatgagctgattgagtttcgacgcattgctgcctacctgtttaaagggaacaacagatggaagcagagcgtggagctatgcaaaaaagactctctctacaaagacgcgatgcagtatgcctccgaatccaaggataccgaactagccgaagaactgctgcagtggttcttgcaggaagagaagcgggaatgcttcggcgcttgtctatttacatgctacgacctgctgagacctgacgtcgtgctggaaacagcatggcgccacaatatcatggactttgccatgccatacttcatccaggttatgaaagagtacttaactaaagtcgataaactagatgcctcggagtccttacggaaggaagaagaacaggcgacggagactcagcccatcgtatatggccagccccagctgatgctcaccgcaggaccctctgttgctgtgccaccccaagctccctttggatatggatataccgcacctccttatggtcagccacagcccggatttggatactcaatgtag

SEQ ID NO: 183222 - DNA, 4923 bp, synthetic construct
  misc_feature 1..4923: note = Description of Artificial Sequence: Synthetic coding sequence
  source 1..4923: mol_type = other DNA
atggcccagatcctgcccgtgcggttccaggagcacttccagctgcagaatctaggcattaatcccgccaacatcggatttagcacactgacaatggaatcagacaaatttatttgtatccgggagaaggtaggcgaacaggcccaagttactattatagacatgagtgatcccatggcaccaatccgaagaccgatcagtgcagaatcagcaatcatgaatcccgcttctaaagtgattgcacttaaggccggcaagaccctccagatcttcaacatcgaaatgaaatctaaaatgaaagcgcatacaatggccgaggaggtcattttctggaaatgggtgtccgtcaacacagtggctcttgtgacagaaactgcagtgtaccactggtccatggagggcgactcccagccaatgaaaatgtttgatagacacacttccttagtaggctgccaggtcatccattaccggactgatgagtaccagaaatggctactcttagtcggaatctctgctcagcagaatagggtcgtgggagcaatgcagttatacagcgtggatagaaaggtgtcccagccaattgagggccatgctgccgctttcgccgagtttaaaatggaaggcaacgcaaagcctgctaccttattctgtttcgctgtcagaaatcctaccggcggaaagctgcatatcatcgaggtcggccagcctgccgcaggaaatcagcctttcgtcaagaaagctgtggatgtcttcttcccacctgaagcacagaacgacttcccagtcgccatgcaaatcggagccaaacatggagtgatataccttattacaaagtatgggtacctgcatttatatgatctcgagagcggagtttgcatttgcatgaacaggatttctgccgatactattttcgttaccgccccacataaaccaacgtctggaataatcggggtcaataaaaaaggccaggtgctgtcagtgtgcgtcgaggaggacaacatagtgaattatgctactaacgtgctccagaatccggacctgggcctccgacttgccgttcgctctaacttggcaggcgctgagaagttgttcgtgcgcaaattcaacacactgtttgcccagggatcctatgccgaagcggcaaaggttgcagcgagtgccccaaaaggaattctaaggacccgagagacagtccagaagtttcagtctattcccgcacaaagcggacaagcatccccattactgcaatactttggcatcttgctggaccagggccagcttaacaaactggaaagtctggagctgtgccaccttgtgctgcaacagggtcgaaaacagctgttggaaaaatggctgaaagaggacaagctcgagtgctcagaggaactgggtgacttagtgaagaccacagatcccatgctggccctttctgtctacctgcgcgcaaacgtgcccagcaaagttatccagtgcttcgccgagactggacagtttcagaaaatcgtgctgtacgccaagaaagtgggctacacccccgattggatttttcttctaaggggagtgatgaagatctccccagagcaggggctccagttttcacggatgctcgttcaggacgaagaaccattggccaatattagtcagattgtagacatctttatggagaatagcttaattcagcagtgcacatcctttttgctggacgcccttaagaacaacaggcctgctgagggccttctgcagacatggctgctagagatgaatctggtgcacgccccgcaggtcgccgatgccattttgggaaataagatgtttactcactacgatcgcgcacatattgctcagctctgcgagaaggccggcctgctgcagcaagctctcgagcactacacagacttatatgatatcaagagggccgtggtgcacactcatctcctcaacccagagtggcttgtcaatttctttgggtccctgtctgtggaggactccgtggagtgtctgcatgcaatgctttccgccaatataagacagaatttgcagctgtgcgtgcaggtggcgagtaagtatcacgaacagctcggcacacaggccctagtggaactgtttgagtcattcaaaagttataaaggtctcttctacttcctcgggtcaatcgtgaacttttctcaagatcctgatgtgcacctaaaatatatacaggcggcttgtaaaaccggccaaatcaaagaagtggagaggatttgcagggaatcttcttgctacaatcctgagcgggtgaagaatttccttaaagaggctaaactgactgaccagctgccactcattattgtatgtgacagattcggctttgtgcatgatctcgtcctctacctgtaccggaacaacttgcagagatatatcgagatttacgtgcagaaggtgaacccttccagaacccctgctgtgatcgggggactactcgatgtggactgttccgaggaagtgattaaacatctgattatggccgtgcgcggccaattttctaccgatgaactggttgcagaggtagaaaaacgcaaccgcctgaaactgctgctgccctggctcgagagtcagatccaggagggctgcgaggagccagctacccacaatgccctggcgaagatctacattgactctaacaattctcctgagtgtttcctgcgcgagaatgcctactatgatagctctgttgtgggaaggtactgtgaaaagcgggacccccatctggcttgcgttgcctacgaaaggggccagtgtgacctcgagttgattaaagtctgtaacgagaattccctttttaagagcgaggcccggtacctcgtatgccgcaaggatcccgagctctgggctcatgtgctagaggaaacaaacccttctcgacgccagctgatagatcaggttgtgcagactgccttatctgagaccagggaccccgaagagatctcagtgactgtcaaggcattcatgacagcagacttgcccaacgagctgattgagttgttggaaaagattgtgctcgataacagtgtcttctcagaacatcgcaatctccagaacctcttgattttaactgccattaaggcagaccggacgcgggtaatggagtacatctctcgccttgataactacgatgccctggacattgctagtatcgctgtaagcagtgccctctatgaggaagcattcacagtcttccataaattcgatatgaacgcctctgctatccaggtgttaattgaacatattggaaatctggaccgcgcatatgagttcgcagagagatgcaatgaaccagcagtgtggtctcagctcgctcaagcacagctgcagaaggacctggtcaaggaggccatcaactcctacatccgaggggatgatccctcctcctatttagaggtcgtacagtctgcgtctaggagcaacaattgggaggatctcgtcaaattcctccaaatggccagaaaaaagggccgagagtcctacatcgaaacggaattgatcttcgcattggcaaaaacctctcgagtgtccgagcttgaggactttatcaatgggccaaataacgcacatattcagcaagtgggagatcgctgttatgaggagggcatgtacgaagccgcaaaacttttgtacagcaacgtgtctaattttgcacgcctggctagtacactggtgcatctcggcgagtaccaggccgctgtagataacagtaggaaagcttccagcacaagaacctggaaagaggtgtgctttgcatgtatggatggtcaagaattcagatttgcacaactgtgcggcctgcatatcgtgatacacgccgacgaactggaagagcttatgtgctattaccaggatcgaggctattttgaggagctgatcttactcctagaagctgcccttgggcttgaacgggcccacatggggatgttcaccgagctagcaattctgtattccaaatttaaacctcagaagatgctcgaacacttggaactgttctggtctagagttaacattcctaaggtgctgagagcggccgagcaggcacatctgtgggctgagctggtcttcctgtacgacaagtacgaggaatacgacaacgctgtcctcaccatgatgagtcaccctaccgaagcatggaaagagggccagttcaaagatataatcaccaaggttgcaaacgttgagctatgttaccgggcgctccagttctacctagactacaaacccctgttaattaatgatttactcttggtactgagccctcggctcgaccacacttggaccgtcagctttttctctaaagctggacagttacccctggttaagccgtacttacgcagtgtgcaaagccacaataacaaatctgttaatgaagctttaaaccatctattgacggaggaggaggactaccagggtttgcgagcctctatcgatgcttacgataactttgataatatctccctggctcagcagctggagaaacaccagttgatggaatttcgatgcatagccgcctatctgtacaaggggaacaattggtgggctcagtctgtcgagctctgtaagaaagaccacctctacaaggacgcgatgcaacatgccgccgaaagtcgggacgcggaactggcccagaagctgctacagtggttcttggaagaagggaagagggaatgttttgctgcctgtctgtttacgtgctatgacctgttgcggcctgacatggttctcgagttagcctggaggcataacctagtggatttggccatgccctactttatacaggtgatgcgtgagtacctgagtaaagtcgacaaattggacgccttggagtctctgagaaaacaggaggagcacgtgaccgaacccgcaccactggtattcgacttcgacggccatgagtag

SEQ ID NO: 183223 - DNA, 4752 bp, synthetic construct
  misc_feature 1..4752: note = Description of Artificial Sequence: Synthetic coding sequence
  source 1..4752: mol_type = other DNA
atggcccagatcctgcccgtgcggttccaggagcacttccagctgcagaacttggggatcaatccagctaacattggtttcagcacactgaccatggagtcggataaattcatttgtattcgggagaaggtcggtgaacaagcccaggttactatcattgacatgtcagaccctatggctcccatccggagacctataagtgctgagagtgctataatgaaccccgcctccaaggtgatagcattaaaagccgggaaaacactgcagattttcaacattgaaatgaaaagtaaaatgaaagcccatacaatggctgaagaagtcatcttctggaaatgggttagcgtgaacaccgtggccttggtaacggagactgctgtctaccactggtccatggagggcgatagccagcccatgaagatgtttgacaggcacacaagcctggtgggctgtcaagtcatacattataggacagacgaataccagaagtggctgttactggttggtatttcggctcaacaaaatcgggtggtgggggctatgcagctctattccgtggacagaaaagtttcgcagcccattgagggccatgctgccgctttcgccgagtttaaaatggaggggaatgccaagcccgctactctgttctgcttcgcagtgcgaaatccaacaggcgggaagctccacataattgaggttggccaacccgccgcaggtaatcaaccttttgtaaaaaaagccgtagatgtgtttttcccaccagaagctcagaatgattttcctgtcgccatgcagattggagcaaagcatggtgtgatctacctcattacaaagtacgggtatctccatttgtacgacctggagtccggggtgtgtatctgtatgaatcgcatctcggccgatacgatcttcgtcacggcgccccacaagcctacctctggcataataggagtgaacaaaaagggtcaggtactgagcgtctgcgtcgaagaggacaatatcgtcaattacgccacgaacgtccttcaaaatcccgaccttggcctccggcttgctgtacgctctaatctggctggcgccgagaagctttttgtcagaaagtttaatacactctttgcccaggggagctacgccgaggctgctaaggtggctgcatctgcccctaagggaatcttaaggacacgcgaaacagtgcagaagtttcagtctatacctgctcagtctggacaggcctcgccattactccagtacttcgggatcctgctcgaccagggccaattgaataagctcgaaagccttgaactttgtcatttagtgctgcagcaaggaaggaaacaactgctggagaagtggctgaaggaggataaattagagtgcagtgaggaacttggagacctcgtgaaaactacagacccaatgcttgctctctctgtataccttagggccaacgtcccaagtaaagtcatacaatgcttcgcagagaccggtcagttccaaaagatcgtgctctacgctaaaaaagttgggtatactcccgattggatattcttactccggggggtgatgaagatatcacccgaacagggcctacagttttcgaggatgctggtccaggatgaagaacctttggccaatatctcccagatcgtagatatctttatggagaattctttaattcagcagtgcaccagttttctgctggatgccctgaagaataacaggcccgcggaggggttgctgcagacctggctgcttgaaatgaatctggtccacgctcctcaagtcgctgacgctattctcggcaacaagatgttcactcactatgatcgcgcacatatcgctcaactgtgcgagaaggccgggctgctccagcaggccctggagcactataccgacctctacgacatcaaacgagccgtagtgcacacgcacctcttaaatccagaatggcttgtgaatttttttgggagcctgtccgtggaggattcagttgagtgcctccatgccatgttaagcgcaaatattcgccagaacttgcaactctgcgtacaggtcgccagcaaataccacgaacagcttggaacccaggccttggtggagctgtttgaatcttttaaaagctataaaggcttattttactttttgggatctatcgttaacttttcccaggatcccgacgtccatctcaaatacatccaggcggcatgcaaaacaggacagattaaagaagtggagaggatctgcagagaaagtagctgctacaaccccgagcgagtcaagaacttcctgaaggaggccaagcttacggatcagctgccgttgataatcgtgtgtgacaggttcggctttgtacacgacttagtgttgtatttataccggaataacctgcagcgctatatcgagatatatgtgcagaaggtaaacccatcacggacacccgcagtgatcggaggcctattggatgtggactgctctgaggaggtcattaagcacctcatcatggctgttcgcggccagttcagtaccgacgagcttgttgccgaagtggaaaagcgtaaccggctgaagttactgctcccctggctggaatcacagattcaggagggatgcgaggaacccgccacacacaacgcgttggccaagatatacatcgattctaacaacagccctgagtgcttcctgagagagaatgcatattacgatagcagcgtcgtcgggcggtactgtgagaaaagggatccccatttggcttgtgttgcctacgagagaggtcagtgtgacttggagttaattaaagtgtgcaatgaaaatagtctgttcaaaagtgaggccagatatctcgtctgcaggaaagatcctgagctgtgggcgcatgttctagaagaaactaatcctagtcgaagacaactaattgaccaggtggtccagacagccctttcagaaactagggacccggaggaaatttcggtgacagtgaaggcttttatgactgccgatctgcctaacgagctgatcgaactactcgaaaagatcgtgttggacaatagcgttttcagcgaacaccggaatcttcagaatttactcattctgacagcaatcaaggccgataggactcgtgtgatggagtatatctcgcgtctggacaactacgatgcgttggacatcgcctctattgcagttagcagcgcgttatacgaagaggccttcactgttttccataagtttgacatgaatgcctctgctattcaagtgctgatcgaacatattggaaacctggatagggcctacgagtttgccgagaggtgtaacgagcccgctgtgtggtctcaactggcacaggcccagctacagaaggacctcgttaaggaagccataaactcatatatccggggtgacgatccatcctcttatctggaagtggttcagagtgcaagtcggagtaacaactgggaggacctggttaaattcctgcagatggcacgtaagaagggccgtgagtcgtacatagaaacggaactgatctttgccctcgcaaaaacttctcgggtaagtgaactagaggacttcatcaatggacccaataacgctcacatccaacaagtgggggacagatgttatgaggaaggtatgtatgaggcagctaaactgttgtactctaatgtctccaatttcgcacgccttgcaagcaccctggtgcacctgggcgagtaccaggcagctgtagataacagtcgaaaggcatcttctaccagaacctggaaggaggtttgttttgcttgtatggacgggcaggaattcagatttgctcagctctgcggcctacacattgtaatccacgccgacgagctggaggagctcatgtgctactaccaggacagaggatactttgaagagcttatattactcctggaagcggccctcggactcgaacgcgcacacatgggcatgttcaccgagctggccatactttatagtaagttcaagccccaaaagatgctcgagcatttggagctgttctggagccgcgtgaacatccctaaggtactccgggctgctgaacaggcccacttatgggccgaactagtatttctgtacgacaagtacgaggaatatgataatgccgtcctgactatgatgagccaccccaccgaggcctggaaagagggacagttcaaagacatcattacaaaagttgcaaatgtcgagctttgttacagagccctgcagttttacctagattataaacccctgctgatcaatgatctgctgctggtcttatccccccggctcgaccatacctggaccgtgagcttcttcagcaaggcaggccagctgccactggtgaagccatatctgaggtcagtacagtcccacaacaacaagagcgttaatgaggccctgaaccatctgttaaccgaggaggaagattaccaggatgccatgcagcacgctgcagaatcccgcgacgctgagctggctcaaaaactattacaatggtttctcgaagaaggcaaaagggaatgtttcgcagcatgtctgttcacgtgctatgatctgctgcgcccggatatggtcctggagttggcctggcgacacaacctcgtcgatctcgcgatgccttacttcattcaggtgatgagagaatatctgagtaaggtggacaagctcgacgcactggaaagcctcagaaagcaagaggaacatgtaaccgagcccgcacctctggtcttcgattttgatggccacgaatag

SEQ ID NO: 183224 - DNA, 4923 bp, synthetic construct
  misc_feature 1..4923: note = Description of Artificial Sequence: Synthetic coding sequence
  source 1..4923: mol_type = other DNA
atggcccagatcctgcccgtgcggttccaggagcacttccagctgcagaatcttggaatcaaccctgcgaacataggattctccaccctgaccatggagtcagacaagtttatttgcattagagagaaggtgggtgaacaggcccaggtgaccatcatcgacatgtctgatccaatggcccccatccggcgcccaatttccgcagagtccgcaattatgaatcctgcatccaaggtcatcgccttgaaagccggcaagaccctacagattttcaatatcgaaatgaagtctaagatgaaagctcacaccatggccgaagaggtcatcttttggaaatgggttagcgtaaacactgtcgctttagtaacagagactgccgtgtatcactggtctatggaaggtgactctcagcctatgaaaatgttcgatcgtcacacctcactcgtggggtgtcaggtcattcactaccgaacagatgaatatcagaaatggcttcttctggtaggcatatccgcacagcagaatagagtcgtcggcgccatgcaactctatagcgttgatagaaaggtgtcccagcctattgagggacacgccgccgcttttgcagaatttaaaatggaagggaacgccaagccagccacactgttttgttttgcagtgcggaatcctaccggagggaagttgcatattattgaagtaggtcaaccagctgctggcaaccaaccttttgtgaaaaaggccgtggatgttttcttccctcctgaggctcagaacgacttccccgtggccatgcagattggggccaaacacggggtaatatacctcattacaaagtacgggtatttgcatctgtacgatctggagagcggggtctgtatttgtatgaacaggattagtgcggacaccatcttcgtgacagccccacacaaacccacaagcggtatcatcggcgtgaataagaaaggacaggttctgtcggtgtgcgtcgaggaggacaatatcgttaactacgctacaaacgtgctgcagaacccagacttgggcttgaggctggccgtcagatcaaatctcgcgggcgccgaaaaactgttcgtgaggaagttcaacactttgtttgcccagggatcctacgcagaggctgccaaagtagctgcatctgcccccaaaggcattctgcgtacacgcgagactgtgcagaaatttcaatccatccccgcgcaaagtggccaagccagcccccttctgcagtatttcgggatactcctggatcagggtcagttaaataagcttgagagtctggaactctgccatctcgtgctgcagcagggtcgcaaacagctccttgagaaatggcttaaggaagataaactggagtgctccgaggagttgggcgatctggttaagactactgatcccatgctggctttgagcgtttacctgcgcgctaatgttccatcgaaggtcatacaatgttttgcagagactggacagtttcaaaagatcgtactttatgctaagaaagtgggatacacccccgattggatttttctgttaagaggggtgatgaaaatcagccccgagcagggcctacaattctccagaatgttagtgcaggacgaagagcctctggcaaatatctcacagattgtggacatttttatggagaactccctgattcagcaatgtacaagctttctcctggacgctctgaaaaataaccgacccgcagaggggcttttgcaaacgtggctgctcgaaatgaatctggtgcacgcaccccaggtggctgacgccatactcgggaacaaaatgtttactcactatgatcgcgcccacatcgcacagttgtgtgaaaaagctggcctcctccaacaggcactggagcactacactgatctttatgatatcaagagagccgtcgtacacacccacctcctcaatccggagtggctcgttaactttttcggatctctaagtgttgaagattctgtggagtgcttgcacgccatgctttccgccaatatccgacagaacctgcagctatgtgtgcaggtggctagtaagtaccatgagcagcttggaacacaggccctggtggaactatttgaatcttttaagagttataagggcctgttctactttctgggatccatagtgaactttagccaggaccccgatgttcacctgaagtacattcaagccgcctgtaaaaccggacaaataaaggaagtagagcggatatgcagagaatcatcctgttataatcccgagagagtgaagaacttcttgaaagaagcaaagctgacggaccaactgccgctgattatcgtttgtgacagatttggtttcgtgcacgaccttgtgctctatttatataggaacaatcttcagcggtacatcgaaatctatgttcagaaggtgaacccgtctagaacaccagcagtgattggggggctactagatgtggattgtagcgaggaggtcatcaagcatctcattatggcagtcagagggcagttcagcactgacgaattggttgccgaagtcgaaaagagaaataggctcaaattgctgctgccctggcttgagtcccagatccaggaaggatgcgaagagccagcaacccacaatgctttggccaaaatttatatcgattcaaataactcacccgaatgtttcctgagggagaacgcctactatgattcttctgtggttggaaggtattgcgaaaagcgggatccccacctggcctgtgtggcttacgagagagggcaatgtgatttggagcttataaaggtttgtaatgagaattcactttttaagagtgaagcacgctacctggtgtgcagaaaggacccagagctttgggcgcatgtacttgaagagacaaatccttctaggcgtcagttgattgaccaggtggtgcagacagcactttccgaaacccgtgatcccgaagagatttcggtcaccgtaaaggcctttatgactgctgatttgcctaacgaactgatcgagctcctggaaaagatcgtcctcgacaacagcgttttttctgaacaccgtaatctgcagaaccttctcatcctgactgcaataaaagcagataggacaagggtgatggagtacatttcccgccttgacaattatgacgcacttgatatcgcgagtatcgctgtgtccagcgctctttatgaggaagcattcacagtcttccacaagttcgacatgaacgcttccgcaatccaggtactcatcgaacacattggcaatctggatcgagcctacgagtttgctgaacggtgcaatgaaccggcggtctggtcacagctcgcacaggctcagttgcagaaagacctagttaaagaggcaattaattcatacatccgaggggatgacccttcttcctacttggaggtggttcaatccgcatctaggtctaacaattgggaggacctggtcaagttcttgcagatggcccgcaagaaaggacgcgagtcatacatcgagaccgaactcatttttgccctggccaagacatcccgggtttcggagctggaggacttcatcaacgggccaaataacgctcatattcagcaagtcggcgaccggtgttacgaagagggaatgtacgaggctgccaaactgttatacagtaacgtgagtaacttcgcccgcctcgcctctactctcgtgcatttgggtgaatatcaagcagccgtcgacaactctagaaaggcctcaagcacaagaacctggaaggaggtctgtttcgcctgcatggatggacaggagttccgctttgcccagctttgcggtctgcatattgtaatccatgccgatgagctggaggaactgatgtgctattatcaggatcgcgggtatttcgaagagctaattctgctcctggaggccgccctcggcctcgaaagggcccacatgggaatgtttacggaattagcaattctctacagcaaatttaaaccccagaaaatgctcgagcatctggagctgttctggagcagagttaacatacctaaggtcctccgagccgccgagcaggcccacctttgggctgaactggtcttcctgtatgacaagtacgaggagtatgataacgctgtgctgactatgatgtcacatcctacagaggcgtggaaggagggccagttcaaggacatcattactaaagtggccaacgtggaactgtgttaccgggcgctgcagttttatcttgattacaagcccttactgataaacgatttgctcttggtcctctcgccgcgtctggatcacacctggacagtcagctttttctcgaaggctggacagctgccgctggtaaagccctacttgcgctctgtgcagagtcacaacaacaagtctgtcaatgaagcattgaaccatctgcttacggaagaggaggactatcagggactcagagctagtattgacgcctatgataattttgacaatatctccttagcacagcaactcgaaaaacatcagcttatggagtttaggtgtattgccgcgtatctgtacaaaggcaataattggtgggcccagtctgtggaactgtgcaaaaaggatcacctctataaggacgccatgcagcatgctgctgagtcccgcgacgcggagctcgcccagaaactgctccagtggttcctagaagagggcaagcgggagtgttttgccgcctgcctgtttacctgttatgatctccttaggccggacatggtacttgaactggcctggcgtcacaatctggtggatctcgctatgccatattttattcaagttatgcgcgagtatctgtctaaggtcgataaactggacgcgcttgaatccttaagaaagcaggaggaacacgtgaccgaacctgcccccttggtcttcgactttgacggccacgagtag

SEQ ID NO: 183225 - DNA, 747 bp, synthetic construct
  misc_feature 1..747: note = Description of Artificial Sequence: Synthetic coding sequence
  source 1..747: mol_type = other DNA
atggccgagctggaccccttcggcgcccccgccggcgcccccggcggtccggccttgggtaacggagtggcaggtgcaggcgaagaggacccagccgcggccttcttagcccagcaggaatccgaaatagcaggcatagagaacgacgaagcctttgccatcctggatggcggggcaccagggcctcaaccacatggagaaccacctggtgggcccgatgctgttgacggggtgatgaacggggagtactaccaggagtccaatggtcccactgattcctatgcagccatctcccaggtcgaccgcttgcaatcagagcctgaaagcattcggaaatggcgcgaagagcagatggagagactggaggctctcgacgccaacagtaggaagcaggaagccgaatggaaagaaaaagcaattaaggagcttgaggaatggtacgctagacaggacgaacagctacagaaaacaaaggcgaataaccgcgtcgccgacgaggcgttctataagcaacctttcgctgacgtgatcggctacgtgaccaatatcaaccacccctgttattctctcgaacaggcggccgaggaagcatttgtgaacgatattgatgaatcttctcctggtaccgagtgggaacgagtggccaggctgtgcgatttcaatcctaagtcaagtaaacaggctaaggacgtgagccggatgagatctgtattaatttcactgaaacaggccccattggtgcactag

SEQ ID NO: 183226 - DNA, 657 bp, synthetic construct
  misc_feature 1..657: note = Description of Artificial Sequence: Synthetic coding sequence
  source 1..657: mol_type = other DNA
atggccgagctggaccccttcggcgcccccgccggcgcccccggcggtcccgcacttgggaatggggtcgccggtgctggggaagaggatccagcagcagcttttctggcacaacaggaatcggaaattgctggaattgagaatgatgaggcgttcgctatccttgacggtggagcacccgggccccagccacatggggagccgcccggcgggccggacgctgttgacggagtgatgaatggtgagtattatcaggaatctaatggcccaaccgatagttacgccgctatttctcaggttgatagactccagagcgaacccgagtctattaggaagtggagggaggaacagatggagagactggaggctttagacgctaatagtagaaagcaagaggcagaatggaaagagaaggcgattaaagaactagaagaatggtatgctcgccaggatgagcaactgcagaagaccaaggccaacaatagggccgctgaagaggccttcgttaatgacattgacgagtctagccctggaaccgaatgggaaagagtggcccggttatgcgatttcaaccccaagagttccaaacaggctaaggacgtgagccgaatgaggagtgtcctaatctcactgaaacaggcaccactggtgcactag

SEQ ID NO: 183227 - DNA, 711 bp, synthetic construct
  misc_feature 1..711: note = Description of Artificial Sequence: Synthetic coding sequence
  source 1..711: mol_type = other DNA
atggccgagctggaccccttcggcgcccccgccggcgcccccggcgggcccgcgctgggcaatggagtcgcaggagccggcgaggaggacccagctgcggcctttctggcccagcaagaaagcgagatcgcggggattgagaacgatgaggccttcgccattttggacggaggagccccgggtccacaacctcacggagagcctcccgggggacctgacgccgtagatggagtgatgaacggggagtactaccaggagtccaatggtccgacagattcatatgctgcaataagtcaagtcgatcggcttcagtccgagcctgaatcaattaggaagtggcgcgaagagcagatggagcggctcgaggcgcttgatgcgaacagcagaaaacaagaagccgagtggaaggaaaaagccataaaggagttggaggagtggtacgccagacaggacgaacagttgcagaagaccaaggcaaacaacagagttgcagatgaagccttctacaaacaaccctttgcagatgttattgggtacgtcgccgcagaggaggccttcgtgaacgatattgatgaatcttcacccggtactgaatgggagagagtggcccggctatgcgactttaatccaaagtcttcaaagcaggcaaaggacgtgtcgcgcatgcgtagtgtgttgattagtctgaagcaagcccctctggtgcactag

SEQ ID NO: 183228 - DNA, 747 bp, synthetic construct
  misc_feature 1..747: note = Description of Artificial Sequence: Synthetic coding sequence
  source 1..747: mol_type = other DNA
atggccgagctggaccccttcggcgcccccgccggcgcccccggcggccctgccctgggaaacggagttgctggggccggagaagaagatcctgctgctgccttcctcgcccagcaggaatccgagatagcaggaattgagaacgacgaggcttttgccatcctcgatggtggtgcgcccggaccacaaccccacggcgaaccaccaggagggccagatgcagtggacggtgttatgaacggagagtattaccaggaatctaacggccccaccgactcctatgccgctatcagccaagtggatagattgcaatcggaaccggagagtatcaggaagtggcgggaggagcaaatggagcgtctcgaggccctcgatgcaaattccaggaaacaggaagctgagtggaaggagaaggcaatcaaggagctcgaggaatggtatgctaggcaagacgagcagctccagaaaaccaaggcaaacaacagagtggctgatgaagcgttttacaagcagcctttcgccgacgtgatcgggtacgtgactaatattaatcacccctgctactcattagaacaagcggcagaggaggcattcgtgaatgatattgacgaaagttcaccagggactgagtgggaaagggttgctcggttgtgtgacttcaatcccaagagtagcaaacaggccaaggatgttagtaggatgaggtctgtccttatcagcctgaaacaggccccccttgttcactag

SEQ ID NO: 183229 - DNA, 693 bp, synthetic construct
  misc_feature 1..693: note = Description of Artificial Sequence: Synthetic coding sequence
  source 1..693: mol_type = other DNA
atggccgagctggaccccttcggcgcccccgccggcgcccccggcggcccggctcttggcaatggtgttgccggtgctggcgaggaagacccagccgccgcctttctcgcccagcaggagtccgaaatcgctggcatcgaaaacgatgaggcgttcgccatacttgacgggggcgcccccgggcctcagcctcacggagaaccccccgggggcccagacgccgtcgatggtgtcatgaatggtgaatattaccaggagtccaacggacccactgattcctatgccgcaattagccaggtcgaccgactacagtcggagcctgagtccatcaggaaatggcgggaggagcagatggaacggttagaagccctggacgcaaattctcgaaaacaggaagcagagtggaaagagaaggctattaaagagctggaggaatggtatgctcgccaggacgagcaactccaaaagacaaaggctaataattccactaatatcaatcacccttgttattccctcgagcaggcagccgaagaggcattcgttaatgatattgatgaaagcagcccaggcaccgaatgggaaagagtggctcggctttgtgatttcaaccctaagtcatccaagcaggcgaaggacgtatcaagaatgaggtccgttctcatttcactcaaacaagcacctctagttcattag

SEQ ID NO: 183230 - DNA, 693 bp, synthetic construct
  misc_feature 1..693: note = Description of Artificial Sequence: Synthetic coding sequence
  source 1..693: mol_type = other DNA
atggccgagctggaccccttcggcgcccccgccggcgcccccggcgggcccgcacttggcaatggcgttgctggtgcaggcgaggaggacccagccgccgccttcttggcccagcaggagtctgagattgctggaatcgagaatgacgaggcctttgcgatcctcgatgggggagctccaggccctcagccccacggcgagccccctggagggccggatgctgtggacggcgtaatgaatggggagtactatcaggagagcaacggtcccaccgactcctacgccgcaatctctcaagtggacaggctgcaatccgaacctgaaagcattaggaagtggcgtgaggagcagatggaaaggttggaggccctcgatgctaactcaaggaagcaggaggcagaatggaaagaaaaagccatcaaggagctggaggagtggtatgctcgccaggatgaacagctgcagaaaaccaaagccaataactcgactaacatcaatcatccttgctatagcctcgaacaagccgcagaggaggcttttgtcaatgacattgacgagagctcgcctggtacagaatgggagagagtggccaggctctgcgacttcaatccgaaaagcagtaaacaggcaaaggacgtgtctagaatgaggtctgttttgataagcctgaagcaggcccctctggtccattag

SEQ ID NO: 183231 - DNA, 501 bp, synthetic construct
  misc_feature 1..501: note = Description of Artificial Sequence: Synthetic coding sequence
  source 1..501: mol_type = other DNA
atggccgagctggaccccttcggcgcccccgccggcgcccccggcgggccagcactcgggaatggagttgccggggccggggaagaggacccagcagccgctttcttggcccagcaggaaagcgagattgcaggcatagagaacgacgaggccttcgccatcctggacggcggagctccaggacctcagccgcacggagagcctcctggaggacctgatgcgaattccagaaagcaggaggctgagtggaaggaaaaagcgatcaaagaactggaggaatggtatgcgcggcaggatgaacagttacaaaagacaaaagctaataaccgcgccgctgaagaggcttttgtgaatgatattgacgagtcatctcctggaactgaatgggaacgcgtagctagattatgtgattttaaccctaagagttcaaaacaggctaaggatgtttcccggatgaggagcgtactgatttcgctcaaacaggcaccgctcgtgcactag

SEQ ID NO: 183232 - DNA, 690 bp, synthetic construct
  misc_feature 1..690: note = Description of Artificial Sequence: Synthetic coding sequence
  source 1..690: mol_type = other DNA
atggccgacgacttcggcttcttcagcagcagcgagagcggcgccccggaagccgctgaggaggaccctgccgctgccttccttgcacagcaggagagtgaaattgctgggattgagaatgatgaggggtttggagcacctgcaggaagccatgctgctccggcacaacctggccctacgtcgggagctggcagtgaggatatgggcactactgtgaacggagacgttttccaagaggccaatggccccgctgatggctatgctgccatcgctcaagccgatagactgactcaggaacctgagagtatcagaaagtggagggaggaacaaagaaagcgcctccaggagctggacgccgcttccaaggtgaccgaacaggagtggagagagaaagccaagaaggacctcgaggaatggaatcaacggcagtctgagcaggtcgaaaaaaataaaatcaacaatcggattgcggacaaagctttctaccagcaacctgatgctgatataatagggtatgtggccagcgaggaagctttcgtgaaggagtcaaaagaggaaacacctgggacagaatgggaaaaggttgcccagctctgcgatttcaaccctaagagctctaagcagtgtaaggacgtaagcagactgcgctccgtactgatgtcactcaaacagacacccctgagccgatag

SEQ ID NO: 183233 - DNA, 636 bp, synthetic construct
  misc_feature 1..636: note = Description of Artificial Sequence: Synthetic coding sequence
  source 1..636: mol_type = other DNA
atggccgacgacttcggcttcttcagcagcagcgagagcggcgcccccgaagcagcggaagaggatccggccgccgcattcctcgcacaacaggagagcgagatagcggggatcgagaacgacgagggctttggagctcccgccggatcacatgctgcaccggctcaacctgggccaaccagcggcgccggttcagaggacatgggcacaaccgtaaacggcgacgtgttccaagaggctaatggaccggcagacggatatgctgctattgcccaggcagaccgcctgacccaagagcccgaaagcattagaaagtggcgcgaagagcagcggaaacgcctgcaggaattggatgccgcctccaaggtgacagagcaggagtggagagaaaaggcaaaaaaagacctggaggagtggaatcagcggcagagtgagcaggtcgaaaaaaataaaatcaataaccgggcctctgaggaagcctttgtgaaggagagcaaggaagaaacgcctggcacagagtgggaaaaggtggcgcagctttgtgactttaacccaaaatctagcaagcagtgcaaagacgtgtctcgactgcgaagcgtcctcatgtccttgaagcagacaccactctcaaggtag

SEQ ID NO: 183234 - DNA, 405 bp, synthetic construct
  misc_feature 1..405: note = Description of Artificial Sequence: Synthetic coding sequence
  source 1..405: mol_type = other DNA
atggccgacgacttcggcttcttcagcagcagcgagagcggcgcccctgaagctgccgaggaagatccggcggcagcttttcttgctcagcaagagagtgagattgctgggatcgaaaacgatgagggcttcggggcgcctgccggcagtcatgcagccccggcacaacccgggcccacctctggtgccggatcagaggacatgggaaccacagtgaacggggacgtgttccagccagtgcatcatcagcgagtccaactgcagacccagcttccaattcagcccaaagatgaacccgcccacaattactcaagcagtatatggcattcacaaggccaaggacagaaagggcccgcaggtctccgtcttcccacttccgcccaaattctctccccctttccctag

SEQ ID NO: 183235 - DNA, 636 bp, synthetic construct
  misc_feature 1..636: note = Description of Artificial Sequence: Synthetic coding sequence
  source 1..636: mol_type = other DNA
atggccaacgccggcctgcagctgctgggcttcatcctggccttcttgggatggattggggctatagtttcgaccgcccttccgcagtggaggatctattcttatgccggcgacaacattgtaactgcacaggcaatgtacgagggtttgtggatgtcctgtgtgagtcagtccaccgggcaaatccagtgtaaagtgtttgacagcctcctcaacctcagcagtacactgcaggcaactagagctctcatggttgtcggcattctgctgggggtgattgccattttcgtggccactgtgggcatgaagtgcatgaaatgtctggaggatgatgaagtgcaaaaaatgcggatggccgtaatcgggggcgccatcttcctactagcagggttggcaatattggtcgcaaccgcctggtatggaaacagaatcgtccaggaattctacgatccaatgacccctgtgaacgcccgctacgagtttggtcaagccttgtttactgggtgggccgcagctagcctgtgtctgctcggcggtgctcttctgtgctgttcttgcccccggaagactacgtcctatccaacgcctcgaccataccctaaacccgcgccttctagcggcaaggactatgtttag

SEQ ID NO: 183236 - DNA, 501 bp, synthetic construct
  misc_feature 1..501: note = Description of Artificial Sequence: Synthetic coding sequence
  source 1..501: mol_type = other DNA
atgtacgagggcctgtggatgagctgcgtgagccagagcaccggccaaatacaatgcaaggtgttcgactcactgctaaacctttcgtctaccctgcaagccactcgggcactgatggtcgtgggaatcctgcttggcgtcattgccatcttcgttgctacagtcggaatgaaatgtatgaagtgtctggaagacgatgaggtgcagaagatgcgaatggccgtaattggcggcgctatctttctgctggccggactcgctatcctcgttgcgactgcctggtacggaaaccgcattgtacaagagttctatgatcctatgacacccgtgaatgccaggtacgaattcggacaggcgttattcaccgggtgggcagccgcttccctctgtctgctcgggggggctctgctttgctgctcttgtccccgaaaaactacatcttaccccactccgcgcccctacccgaagcctgcaccgtcctctggcaaagactatgtgtag

SEQ ID NO: 183237 - DNA, 624 bp, synthetic construct
  misc_feature 1..624: note = Description of Artificial Sequence: Synthetic coding sequence
  source 1..624: mol_type = other DNA
atggtggccacctgcctgcaggtggtgggcttcgtgaccagcttcgtggggtggattggagttatcgtgaccacttccaccaatgactgggtagtgacctgcggctataccatcccaacctgtcgcaagctggatgagttgggaagcaagggactatgggctgactgcgtaatggccacagggctttatcactgtaagcccctggtggacattctgatccttcctggatacgtccaagcatgcagggccttaatgatcgcagcttcagtgctggggctgcccgccatcctgttgctgcttacagtactcccctgcatcaggatgggacaggagcccggggtcgccaaatatcgaagagcccaactggccggagtgctcctgattctgttagcattgtgcgctctggtggcaacgatttggtttccggtttgcgcccaccgggagaccaccatcgttagcttcggatacagcctgtatgcaggatggatcggagccgttctttgcctggtaggtggctgtgttatcttatgttgcgccggtgatgcacaagccttcggtgaaaacagattttattacacagccggttcctcttcacctacacatgctaaaagtgcccacgtgtag

SEQ ID NO: 183238 - DNA, 498 bp, synthetic construct
  misc_feature 1..498: note = Description of Artificial Sequence: Synthetic coding sequence
  source 1..498: mol_type = other DNA
atggtggccacctgcctgcaggtggtgggcttcgtgaccagcttcgttggctggatcggcgtcattgtgacaactagcacaaacgactgggtcgttacttgcggttacactatccccacttgccggaagctggatgaactaggctccaaaggactgtgggccgactgtgtgatggccacaggattgtaccattgtaagcccctggtcgacatacttatcttacccggctacgtccaagcctgtagggcattgatgatagcagccagcgtcctcggcctacctgcaattctgttacttttaaccgtccttccgtgtatccggatgggccaggaaccaggagtcgctaagtaccgcagagcccagctagcaggtgtacttctaatcctcctgggctgtcagctgctgtgggcgaaaactgagagctccctgcatagccagcacctcgtacagttcaaacagaagtatcttgaagattttagttatctgcagggagattag

SEQ ID NO: 183239 - DNA, 498 bp, synthetic construct
  misc_feature 1..498: note = Description of Artificial Sequence: Synthetic coding sequence
  source 1..498: mol_type = other DNA
atggtggccacctgcctgcaggtggtgggcttcgtgaccagcttcgtcggctggatcggcgtgattgtgaccaccagcaccaatgattgggtggttacatgcggatataccattcctacgtgccgcaaactggacgagttaggctccaagggactctgggccgattgcgtgatggcaaccgggctgtaccactgcaagcctcttgttgatattttgatcttgcccggatatgtgcaggcctgccgcgccctgatgatagcagcgtctgtcttgggactgcctgctattctgctgcttttaactgtgctgccttgtattagaatgggacaagaacctggggtggcgaagtaccgccgcgcacagttggcgggcgttctgcttatcctcctaggctgtcagctgttgtgggcaaaaaccgaatccagtctgcattctcagcaccttgtgcagttcaagcagaagtacctcgaggattttagctacctccagggcgattag

SEQ ID NO: 183240 - DNA, 720 bp, synthetic construct
  misc_feature 1..720: note = Description of Artificial Sequence: Synthetic coding sequence
  source 1..720: mol_type = other DNA
atggccagcaccgccgtgcagctgctgggcttcctgctgagcttcttgggaatggtcggaacactcatcaccaccattctccctcactggcgaagaacagcccacgttggcactaatattcttacagcggtgtcctatctgaagggattatggatggagtgcgtgtggcactccacgggaatctaccagtgccagatttacaggtcactgctggctctcccacaggaccttcaagccgccagagcactgatggttatctcctgtctgctgtctggcatcgcttgtgcctgcgccgtcattggcatgaaatgtaccaggtgcgccaaggggacacctgcaaagacaacattcgccattctgggcggcacactgtttattctggcggggctcctttgtatggtggcagtgtcctggacaaccaacgacgttgtgcaaaacttttataacccactactgccctcgggaatgaagtttgaaatcgggcaggcactttacctgggattcatttccagctcacttagtctgattgggggcacacttctttgtctgagttgtcaagatgaggctccatatcgcccttatcaggcaccccctcgcgccacaaccactacggcgaatactgcacctgcttaccagcccccggcagcctacaaagataaccgtgcaccctctgtcacctcagcgacccactctggttaccgactcaatgattatgtttag

SEQ ID NO: 183241 - DNA, 720 bp, synthetic construct
  misc_feature 1..720: note = Description of Artificial Sequence: Synthetic coding sequence
  source 1..720: mol_type = other DNA
atggccagcaccgccgtgcagctgctgggcttcctgctgagcttcttgggaatggttggaacactcataaccactatactgccccattggagacgtactgctcacgtgggcactaacattctgaccgctgtaagctatctgaaaggcctttggatggagtgtgtatggcacagtaccgggatctaccagtgccagatctacagaagccttctggccttgccacaggatcttcaggcggcccgcgccctgatggtcatctcttgtcttctgagcggcatagcctgtgcttgtgctgtgatcgggatgaaatgcaccagatgcgccaaaggaacgccagccaaaacaaccttcgctattcttggaggcaccttgttcattttggcgggcctgctgtgcatggtcgcggtttcatggactacaaacgacgttgttcagaatttttataatccactgctgccttcgggaatgaagttcgaaataggtcaagcactgtatctgggtttcataagctcctctctttccttaattggcggaactctcctctgtctcagctgccaggacgaggccccctacaggccgtaccaggcccctccaagagctaccaccacgaccgccaacaccgctcctgcataccagccaccagccgcatacaaagacaatcgtgctccatcagtaacctctgccactcactctggctaccgattgaacgattatgtttag

SEQ ID NO: 183242 - DNA, 720 bp, synthetic construct
  misc_feature 1..720: note = Description of Artificial Sequence: Synthetic coding sequence
  source 1..720: mol_type = other DNA
atggccagcaccgccgtgcagctgctgggcttcctgctgagcttcctgggcatggtgggcacattgatcaccacaattcttccacactggcgcaggacagcacacgtgggcacaaatatcctgaccgcggtgagttatctgaaaggactgtggatggagtgtgtgtggcacagcaccggcatctaccagtgccagatctacaggagtctgttggcactgccccaagacttacaggcggccagggccttgatggtgatcagttgcctgttgtcaggaattgcgtgcgcatgtgccgttattggcatgaaatgtacacgctgtgccaaaggcacccctgcaaagaccacttttgccatccttggtggcactctctttattttagccggattactttgcatggtcgccgtgagttggaccacgaacgatgtggtccaaaacttctacaaccctttgctgccctccggcatgaagtttgagatcggccaggcattatatctaggattcatatcctcctcgctgtccctcattgggggcacactgctgtgcctctcgtgccaggacgaagccccatacaggccctaccaggctcctcctcgcgcgacgaccactacagcaaacaccgccccagcctaccagccccctgccgcctacaaagacaatcgagccccctccgtcactagcgctacgcatagtggatacaggctgaacgattacgtgtag

SEQ ID NO: 183243 - DNA, 720 bp, synthetic construct
  misc_feature 1..720: note = Description of Artificial Sequence: Synthetic coding sequence
  source 1..720: mol_type = other DNA
atggccagcaccgccgtgcagctgctgggcttcctgctgagcttcctgggcatggtggggactttgattaccactattctgccacattggagacgaaccgcccacgtaggcacaaacattctgacggccgtgagttatctcaaaggactgtggatggaatgcgtttggcatagtaccgggatctaccagtgtcagatttatcgatccctgctggccttaccccaagatctacaggccgcacgcgccctcatggtgatctcatgtctcctctccggtatcgcttgtgcttgtgccgtcattggtatgaaatgcactcgctgcgccaaaggtacgcccgcaaagaccacctttgccatcctgggcggtaccctcttcattctggccgggttgctgtgcatggttgcagtgtcatggacaacgaacgatgtggttcagaatttttataaccctctgctacccagcggcatgaagttcgaaatcgggcaggccctgtacctgggcttcatctcatcctctctctcattgataggtggaacactgctttgtctcagctgtcaggacgaggcaccctatcgcccttatcaggcgccccctagggccacaaccacaacggcgaacacggcccccgcctaccagcctcccgcggcctataaggataaccgagccccctccgtgacgtccgcaacccatagcggatatagattaaatgactacgtgtag

SEQ ID NO: 183244 - DNA, 720 bp, synthetic construct
  misc_feature 1..720: note = Description of Artificial Sequence: Synthetic coding sequence
  source 1..720: mol_type = other DNA
atggccagcaccgccgtgcagctgctgggcttcctgctgagcttcttaggcatggtgggcaccctaatcaccacaattttgccccactggagacgaactgcccatgtgggaactaacattctgacagcagtttcgtatctgaaaggcctgtggatggaatgcgtgtggcactcgacaggcatataccagtgtcagatctaccggtccttgctggctctgcctcaggatctgcaggccgctagagctcttatggtgattagttgtctgctttctggaatcgcatgcgcctgcgctgtcatcggaatgaaatgcactcgttgtgccaaaggcactccagctaagactacctttgccatccttggaggaaccctgttcatccttgcagggctcctgtgtatggtggccgtcagttggacaaccaacgacgtggtacagaacttctataatccactcctgcccagcgggatgaagttcgagattgggcaggccttatatttgggattcatcagtagtagtttgtcactgattggcggcacactgctgtgtctgagctgccaagatgaagcaccctatcggccttaccaggcacccccccgcgccaccactaccacagcaaacacagcgcctgcctaccagccccctgcagcatacaaggataaccgggcacccagcgtgacctctgccactcacagcggctatcgtttgaatgactacgtatag

SEQ ID NO: 183245 - DNA, 918 bp, synthetic construct
  misc_feature 1..918: note = Description of Artificial Sequence: Synthetic coding sequence
  source 1..918: mol_type = other DNA
atgaccagccggacccccctgctggtgaccgcctgcctgtactactcatattgcaattctcgacatctacaacagggagtgcggaaatccaagaggccggtcttttctcactgccaggtgcctgaaacgcaaaagactgatactcgacatctcagcggcgctcgcgccggtgtttgcccctgctgccacccagatggtctgctggctaccatgcgggatttgttacagtacatcgcctgtttttttgctttcttttcagccgggtttctcattgttgccacctggaccgactgctggatggttaacgccgacgacagtctagaggtgtcgactaagtgtaggggcctttggtgggagtgtgttaccaacgcttttgacggaatccggacatgcgacgaatacgattcaatcctagctgaacatccactgaagctcgtggtgacccgcgcactcatgatcacggccgatattttggcagggtttgggttcttgacacttctgctgggcctcgactgtgtgaaatttctccctgacgaaccgtacattaaagttcggatctgcttcgtcgccggcgccacacttctgattgccgggaccccaggtattatagggagcgtctggtacgcggtggatgtatacgtggaacgctcaacgcttgtgcttcataacatcttcctgggcattcaatacaaattcgggtggagctgctggctgggcatggctgggagcctgggctgtttccttgcaggggccgtgctcacttgttgcttgtatctgttcaaggacgtgggacctgaaagaaactacccttatagtctcagaaaagcgtactccgctgctggggtttcaatggccaaaagttactcggctccacggaccgagaccgccaagatgtacgccgtcgacactcgagtatag

SEQ ID NO: 183246 - DNA, 360 bp, synthetic construct
  misc_feature 1..360: note = Description of Artificial Sequence: Synthetic coding sequence
  source 1..360: mol_type = other DNA
atgaccagccggacccccctgctggtgaccgcctgcctgtactactcttactgcaatagtcggcatctgcaacagggtgtgagaaaatcaaaacggccagtgttcagtcattgccaagtgcctgaaacccaaaagacagacacaaggcatctgagcggcgcccgcgcaggcgtatgtccttgttgtcatccagatgggttgctcgccaccatgcgcgaccttctccaatacatcgcgtgcttttttgctttctttagcgctgggttcctgattgtagccacttggacagattgttggatggtcaatgccgatgactccctggagatgctcgacctgagagaaacaatcttaatcccctag

SEQ ID NO: 183247 - DNA, 675 bp, synthetic construct
  misc_feature 1..675: note = Description of Artificial Sequence: Synthetic coding sequence
  source 1..675: mol_type = other DNA
atggccaacagcggcctgcagctgctgggctacttcctggccctgggaggatgggttgggattatcgcctcaactgccctaccgcagtggaaacagagtagttatgccggtgatgctattatcactgccgttggcctgtacgaaggcttgtggatgtcctgtgcttcacagtcaacaggacaggtgcagtgtaagctatacgactctctgctcgccttagatggtcacattcagtcggcccgcgcactgatggttgtcgcagtgctgctgggctttgtagccatggtgctgtccgtggtcggaatgaagtgcactagagttggggactcaaatcccattgctaagggcagagttgcaatcgcaggaggggctcttttcatcttggcaggactgtgcacgctgactgctgtgtcttggtatgcaactctggttacacaagaattctttaatccatccacccccgttaacgccagatatgagtttggccccgctctgttcgtaggttgggcaagcgccggacttgcagtcctcggaggcagtttcttgtgctgcacgtgcccagaaccagagaggcctaattcttcacctcagccctaccgccccggtccttctgccgcagccagggagcccgtggtcaaactgcccgcgagtgccaagggcccgctcggggtctag

SEQ ID NO: 183248 - DNA, 636 bp, synthetic construct
  misc_feature 1..636: note = Description of Artificial Sequence: Synthetic coding sequence
  source 1..636: mol_type = other DNA
atggccaacagcggcctgcagctgctgggctacttcctggccctgggaggctgggtgggcataattgcaagcaccgctttgccacaatggaagcagtcttcgtacgccggggatgccataatcaccgccgttggactatatgagggcctgtggatgtcttgtgcttctcagtccaccggccaggtccagtgtaagctgtacgatagcttacttgcactggacggtcacatccagagtgcccgggcacttatggtggttgcggtgctgcttgggttcgtggcaatggtgctgtctgtggtgggaatgaagtgcacgcgggttggggattcgaatcctattgccaaaggacgggtcgctatagctggtggggccctgttcatacttgctgggttgtgcaccctgacagctgtgtcttggtacgctacactggtgacccaagaattcttcaatccttctactcctgtgaacgcgaggtatgaattcggcccagctttgtttgttggatgggccagtgccggattagcagtgctgggaggttcgtttctctgttgcacatgtccagaaccagagcgacccaatagttctccccagccgtacaggccgggcccctccgccgcagccagggaatatgtgtag

SEQ ID NO: 183249 - DNA, 657 bp, synthetic construct
  misc_feature 1..657: note = Description of Artificial Sequence: Synthetic coding sequence
  source 1..657: mol_type = other DNA
atggccaacagcggcctgcagctgctgggctacttcctggccctgggtggatgggtggggatcattgcgagcactgcactcccccagtggaaacagtcctcttatgccggcgatgccattattacagcagtgggactgtatgaagggctgtggatgagttgtgcaagccagtccactgggcaggttcaatgcaagctgtatgatagtctcctggccctcgacggccatatacagtccgcccgggcgcttatggtcgtggcggttctgctcggttttgttgctatggtgctgagcgtggttggaatgaagtgcacaagggtgggggacagtaaccccattgcgaaaggccgtgtggctatagccggcggtgccctgtttatccttgccggcatgaacctcgcacagccatgcagttgggcagggccccaattagcctggccctgctgggccgccccctcatccgcggcccatgcaaggtcacagcgggatcctaccgccgctcactcccctatcggcctcgatccgcttttgctgcctgagtccacatcggagctcaggctgccttggccggcacctcatccagtcgcccctttgccctccatccagccggcttcccagcatcccggccagggccactggggcatcgggtgggcctag

SEQ ID NO: 183250 - DNA, 663 bp, synthetic construct
  misc_feature 1..663: note = Description of Artificial Sequence: Synthetic coding sequence
  source 1..663: mol_type = other DNA
atgagcatgggcctggagatcaccggcaccgccctggccgtgctgggctggttggggaccattgtttgttgtgccttaccgatgtggagggtctcagcgtttattggaagtaacattattaccagccaaaacatttgggagggactgtggatgaattgcgtggtccagtccacaggtcagatgcagtgcaaagtctacgattctctgcttgcccttccacaggacctacaggcggcacgtgctctaatcgtggtggcgatacttctggctgcatttggtctgcttgtggccctggttggtgctcagtgcacaaattgcgtgcaggacgacaccgcgaaggccaaaattaccatcgttgctggtgtgctttttctcctagccgcattgctgactttggtccccgtatcttggagtgcaaatacaatcattagggacttctataaccctgttgtgccagaagcccaaaagagagaaatgggggccggactctacgtgggctgggcggcagcagccctacagctgctgggaggggccctcctttgttgttcctgtccaccccgggagaaaaagtatacggccacgaaagtagtgtatagcgcccctaggtcgacaggacctggagccagcttgggcactggttacgataggaaagattacgtatag

SEQ ID NO: 183251 - DNA, 630 bp, synthetic construct
  misc_feature 1..630: note = Description of Artificial Sequence: Synthetic coding sequence
  source 1..630: mol_type = other DNA
atggccagcatgggcctgcaggtgatgggcatcgccctggccgtgctcggatggcttgcagtaatgctttgctgtgcgctccccatgtggcgcgtgaccgcatttataggttctaatatagtcacgtcccagaccatctgggaaggattgtggatgaactgtgtggttcagtccactgggcagatgcaatgcaaggtttatgacagtctgttagccctgcctcaggacctgcaggcagctagggccctagttatcatttccattatcgtagctgccctgggagtgcttctcagcgtggtgggcggaaagtgcacaaattgtctcgaagatgagtcagctaaggcaaagaccatgatcgttgctggagtggtcttcctcttagccggactgatggtgatcgtccccgtaagctggactgcacataacattatacaagacttctataatccgctcgtggcgtctgggcagaagcgggaaatgggggcttcgctgtatgtgggctgggccgcatcaggcctactgctgctcggaggcgggctgctgtgctgcaactgccctccacgcactgacaagccctactctgccaaatactctgctgctcgctccgcagctgcaagcaactatgtgtag

SEQ ID NO: 183252 - DNA, 630 bp, synthetic construct
  misc_feature 1..630: note = Description of Artificial Sequence: Synthetic coding sequence
  source 1..630: mol_type = other DNA
atggccagcatgggcctgcaggtgatgggcatcgccctggccgtgctgggctggctagctgtgatgctctgctgcgccctcccaatgtggcgggttacagcctttatcggctccaacattgtcaccagccagactatatgggaaggcctctggatgaattgtgtggtgcaatccaccggacaaatgcagtgcaaagtgtatgacagcctgttagccttgccccaggacctgcaggccgcccgggccctcgtcataatcagcatcatagtagctgcgctcggtgtgctgctctctgtagtaggcggcaagtgtaccaactgcctggaagatgagtccgccaaagcgaaaactatgatcgtggcgggcgtggtgttcctgctggccggcctgatggttatagtgcccgtgtcctggactgcccacaatattattcaggatttctacaatcccttagtggccagtggtcaaaaaagggaaatgggagccagtctttacgtcggctgggccgccagtggcttgctcctgctgggtggaggactgctctgctgcaattgcccccccaggaccgacaagccatattcagctaaatattcagccgcacggtcagccgccgcgagtaattacgtttag

SEQ ID NO: 183253 - DNA, 630 bp, synthetic construct
  misc_feature 1..630: note = Description of Artificial Sequence: Synthetic coding sequence
  source 1..630: mol_type = other DNA
atggccagcatgggcctgcaggtgatgggcatcgccctggccgtgctcggctggttagctgttatgctgtgttgtgcactgcccatgtggcgcgtgaccgcgtttatagggtccaacatagtgacatctcagaccatctgggagggactgtggatgaactgtgtggtccagagcactggtcagatgcagtgcaaagtgtatgattctttactggccctgccacaagatttgcaggcagctcgcgcccttgttattattagcataatcgtcgccgcattgggagttctactgtccgtcgtggggggtaaatgcaccaactgtctggaggatgaaagcgccaaagctaagaccatgattgttgccggagtagtctttttactagcaggactcatggttattgtcccggtgagttggaccgcacataatattatacaagacttttacaatccactagttgcaagcggacagaagagagaaatgggggccagcctctatgttgggtgggcagcatctggactgcttctgcttggaggaggactgctctgctgcaattgccctccgagaaccgacaaaccgtatagcgccaagtattcggcggcacggtctgcggccgcttcgaactacgtctag

SEQ ID NO: 183254 - DNA, 591 bp, synthetic construct
  misc_feature 1..591: note = Description of Artificial Sequence: Synthetic coding sequence
  source 1..591: mol_type = other DNA
atggccagcatgggcctgcaggtgatgggcatcgccctggccgtgttgggatggctggctgttatgctatgctgcgccctccccatgtggagagttactgccttcattgggtccaatatcgtgacttctcaaagcactggacagatgcagtgcaaagtttacgacagcctgctagcccttcctcaagacctgcaagctgccagggctctagtgatcatcagtattatagtggctgctctgggagtgttactctccgtggtgggcggtaaatgcactaactgcctggaagacgagtcagcaaaagcaaagacaatgatcgttgccggcgtagtgtttctgctggccgggttaatggtcatcgttcctgtaagttggaccgcccataacattattcaagatttctataacccgctcgtagcatctggacagaaacgggagatgggggcttccctctatgtaggttgggccgcttcagggcttctcctgctgggaggaggcttgctttgttgtaactgcccacctcggaccgacaagccgtactcagctaaatacagtgccgcaaggagcgccgcggcttccaactacgtgtag

SEQ ID NO: 183255 - DNA, 912 bp, synthetic construct
  misc_feature 1..912: note = Description of Artificial Sequence: Synthetic coding sequence
  source 1..912: mol_type = other DNA
atgacccgggcccggatcggctgcttcggccccggcggccgggcccgcgggacggaatcagctccggagccctctaagagggtgccacccggcagatcctggcagactcaggaggttcggcagacccggggcgccaacggactcggtcctagagctggctctgccggggctaaggcaccagggccagcccaaggcgctgcccagcatgggctgggcgggtccgctggcctgcgtgtccgcgtgtccccattagcaatgggttccgccgctctggagatcctggggttggtgctctgtttggtcgggtggggcggtcttatcctggcctgcggattgcccatgtggcaagtgacggcgtttctcgatcataatatagtcacggcacagactacttggaaaggtctgtggatgtcctgcgtggtgcagagcaccggacacatgcagtgcaaagtgtacgatagtgtcctcgctttgtctacagaggtgcaggctgctcgcgccctgacagtttccgctgtcttgctagcctttgtggccctgttcgtgaccctcgctggcgcacagtgcaccacatgcgtggcccctgggccagctaaagctagggttgcacttactggtggggtcctttacctgttctgtgggcttctggcactcgtaccgctgtgctggtttgccaatatcgtggttagggagttttatgacccctccgtgcctgtcagccagaagtatgaattaggtgccgccctgtatattggatgggccgccactgcgctcctgatggtcggcgggtgcctactctgctgtggcgcctgggtttgtacagggcgacccgacctttcgtttccggttaagtatagtgcgccacgacggccaaccgccacgggagattatgacaaaaagaactacgtgtag

SEQ ID NO: 183256 - DNA, 912 bp, synthetic construct
  misc_feature 1..912: note = Description of Artificial Sequence: Synthetic coding sequence
  source 1..912: mol_type = other DNA
atgacccgggcccggatcggctgcttcggccccggcggccgggccaggggcaccgaatcggctccggaaccttcaaaaagagtccctccaggcagatcatggcagacacaggaggttaggcaaacacgcggcgctaacggccttggacccagagccggctccgccggcgctaaggctcctggacccgctcagggcgctgcgcagcacggtttggggggttcggccggactgcgggtccgcgtgagcccgctggcaatggggtccgccgctcttgagatattggggttagttctatgcctcgttggatgggggggacttattctagcctgtggcctcccgatgtggcaggtgactgccttcctggatcataatatcgtaaccgctcagacaacctggaaaggcttatggatgtcttgcgtggtgcagtctacaggccatatgcagtgcaaagtgtatgatagcgtgcttgctctaagcactgaggtgcaggccgcccgggcattaacagtgtctgcggttctgctggctttcgtcgccttattcgtgaccttagctggggcccaatgtaccacatgcgtggctccggggcctgccaaagctagggttgcactaacgggcggggtcctgtatctattctgcggactgctcgcactggtgccgctttgttggttcgctaatatagtcgttcgcgaattttacgacccgtctgttcccgtcagccaaaagtacgagctgggcgcagccttgtatattggatgggccgctacagcccttctgatggtgggtgggtgcttactgtgctgtggcgcatgggtgtgtacagggagaccagatctcagttttccagtcaagtactcagcccccaggcggcccaccgcgacaggcgattatgacaagaaaaattacgtctag

SEQ ID NO: 183257 - DNA, 912 bp, synthetic construct
  misc_feature 1..912: note = Description of Artificial Sequence: Synthetic coding sequence
  source 1..912: mol_type = other DNA
atgacccgggcccggatcggctgcttcggccccggcggccgggcccgcgggaccgaaagcgcacctgagccttctaagagagtaccgcccgggagatcctggcagacgcaggaggtgcgtcagacccggggcgccaatgggctgggtccaagggcaggatctgctggtgccaaggcccccggtcccgctcagggggctgctcaacatgggctaggcggatcagcgggactaagggtccgggtttctccgctggcaatgggctctgccgcactggaaatcctgggactcgtactgtgcctggtcggatggggtggccttatcctggcgtgtggtctgccaatgtggcaggttacggcttttcttgaccataatatagtgaccgctcaaactacatggaagggactgtggatgtcgtgcgtggtgcaaagcaccggccatatgcagtgcaaagtgtatgatagtgtgttggctttgagcaccgaagtgcaggccgccagagccctcactgtgtctgctgtcctgcttgcattcgtggcgctcttcgttacattggccggggcccagtgtactacttgtgtcgccccgggaccggccaaagccagagtggccctcactggcggcgtgttgtacttgttttgtggtctgctggctctagtgcctctctgctggtttgccaatatcgtcgtgcgcgagttctatgaccccagtgtgcccgtcagccagaaatacgagctgggagctgcactctacattgggtgggcggctaccgctctcctgatggtagggggatgtcttttgtgctgcggggcctgggtctgtactggaaggcccgatctgtccttccccgtgaagtacagcgccccaaggaggccgaccgccaccggcgattacgataaaaaaaactacgtctag

SEQ ID NO: 183258 - DNA, 1086 bp, synthetic construct
  misc_feature 1..1086: note = Description of Artificial Sequence: Synthetic coding sequence
  source 1..1086: mol_type = other DNA
atgggcgaggaggccaacgacgacaagaagcccaccaccaagttcgagcttgagagagagacagagctaaggttcgaggtggaggcgtctcagtctgtgcaactggagttgcttaccggcatggccgagatcttcggtacagaactgacaagaaataagaaatttaccttcgatgcaggagccaaagtcgcagtcttcacatggcacgggtgtagcgtccaactgagtggtagaacagaggtggcttatgttagcaaagacacgcctatgctactgtatctgaacacacatacagcccttgaacagatgaggcgccaggccgagaaagaggaagagcgggggccccgtgtgatggtagtcggccctaccgacgtggggaagagcactgtttgcaggctgctcttaaattatgccattacttcccgcctggcagatgtgttcaaccaaagatgcgaggttaaccggcgcgccagcgtgtccgggtgcgtcataaacacctgcggttgggtcaagggcagcgggtaccaggccctggtccacgccgcctccgccttcgaggtcgacgtggtagtggtactggaccaagaaagactctacaacgagctgaaaagagatctgccccacttcgtgagaacagtcctgttacccaagtctggaggcgtcgtggaacggagcaaggacttcagacgcgaatgccgagacgaaaggatacgcgaatatttctacggttttagggggtgcttttacccccacgcatttaatgtaaaatttagcgatgttaagatatataaagtgggggcacctaccatccccgactcttgtctccccctggggatgagccaagaggacaatcagctgaagctggtaccagtgacccctggacgcgatatggtgcatcacctgctctcagtaagcacggccgaggggacagaggagaaccttagtgaaacctccgtcgccggattcatcgtcgtgactagcgtagatctcgagcaccaagtctttactgtgctgagtcccgcaccgagaccactcccaaaaaactttctcctcataatggatattaggtttatggacttaaaatag

SEQ ID NO: 183259 - DNA, 810 bp, synthetic construct
  misc_feature 1..810: note = Description of Artificial Sequence: Synthetic coding sequence
  source 1..810: mol_type = other DNA
atgcaggagatcatcgccagcgtggaccacatcaagttcgacctggaaatcgcagttgagcagcagctgggggcgcagccacttcccttccccggcatggacaaatctggggccgccgtgtgtgaattctttctaaaggccgcctgcgggaaaggaggaatgtgcccatttcgccatatttctggtgagaagactgtagtatgcaaacattggctccggggcttgtgcaagaagggagatcagtgcgagtttctgcatgagtatgacatgaccaagatgcctgagtgttacttctatagcaaatttggggaatgctccaacaaagaatgcccctttttgcacatagacccagagtcaaaaattaaagactgcccctggtatgatcgggggttctgtaaacacggaccactatgcagacatcgacacaccaggagggtcatctgcgtgaattatttggttggcttctgtcccgagggtccctcctgcaagtttatgcatcccagatttgagttgcccatgggtacgaccgaacagcccccattgccacagcagacgcagcctccagctaagcagagcaataacccgcccctgcagcgctcttcttcgctgattcaattgaccagccagaacagcagccccaatcaacagaggacacctcaagtgattggggtgatgcagtctcagaattcttccgcaggtaatagggggccaaggccccttgagcaggtaacctgctataaatgtggtgagaagggacattatgccaaccggtgtacgaaaggccatctggcctttttgagcggacagtag

SEQ ID NO: 183260 - DNA, 735 bp, synthetic construct
  misc_feature 1..735: note = Description of Artificial Sequence: Synthetic coding sequence
  source 1..735: mol_type = other DNA
atgcaggagatcatcgccagcgtggaccacatcaagttcgacctggagattgctgtcgaacaacagttaggcgctcagccactgccattcccgggtatggataagtccggggccgctgtctgtgaattttttctcaaggccgcctgtgggaagggcgggatgtgccctttcaggcacatcagtggcgaaaagaccgtggtctgcaaacattggttgcggggcctgtgcaagaaaggcgatcaatgtgaattcctgcatgaatacgacatgacaaagatgcccgagtgctacttttatagtaaattcggggaatgctctaacaaagagtgcccctttctccacatcgaccccgaatccaaaataaaggactgcccgtggtatgaccgagggttctgcaagcatggacccctgtgccggcatcgccacactcgcagagtgatatgtgtcaactacctggtcggcttctgccctgaggggcccagctgtaagtttatgcaccctcgctttgagcttccaatgggcacaactgagcaaccccctttaccccagcagacgcaacctcccgcaaaacaacgaacaccacaggttatcggagtgatgcaatcccagaactcgtctgcgggtaatcggggtccccgccccctggaacaggtgacttgctataagtgtggggagaagggccattacgcaaaccgctgcaccaaggggcacttggcttttctgtcgggacagtag

SEQ ID NO: 183261 - DNA, 636 bp, synthetic construct
  misc_feature 1..636: note = Description of Artificial Sequence: Synthetic coding sequence
  source 1..636: mol_type = other DNA
atgcaggagatcatcgccagcgtggaccacatcaagttcgacctggagattgctgttgaacagcaacttggcgcacaaccactcccattccctggcatggataagagtggagctgccgtgtgcgaattcttcctgaaagccgcatgtggcaaggggggaatgtgtccatttagacatatttccggagagaagaccgtggtgtgtaagcactggttacggggtttgtgcaaaaaaggggaccagtgtgagttcctccatgagtatgatatgaccaaaatgcctgagtgctatttctacagcaaattcgggcccttgtgccgccacagacacactcgccgcgttatttgcgtgaactacctcgtcgggttctgccctgagggcccctcgtgcaagttcatgcacccccggttcgagcttccaatggggactaccgaacaaccaccactgccgcaacagacccagccccctgccaaacggaccccgcaggtgatcggggtcatgcaaagtcaaaatagtagtgccggcaaccgtggaccccggcccttggaacaggtgacctgctacaaatgtggtgagaaaggccactacgcaaacaggtgtacaaaaggtcatctggccttcctgagcggacagtag

SEQ ID NO: 183262 - DNA, 1767 bp, synthetic construct
  misc_feature 1..1767: note = Description of Artificial Sequence: Synthetic coding sequence
  source 1..1767: mol_type = other DNA
atggccgacggcgtggaccacatcgacatctacgccgacgtgggcgaagaatttaaccaagaagctgaatatgggggccatgatcagatcgatctatacgatgatgtgatctcccccagtgccaacaatggtgatgcaccggaagaccgtgactatatggataccctccctcctaccgtgggagacgacgttggcaagggggccgcgcctaacgttgtctacacctataccggcaaacggattgctctgtacatcggtaacttaacatggtggaccaccgatgaggacctcacagaggcggtgcactccctcggagtcaacgacatcctggagatcaagttttttgaaaacagggccaacggccagtcaaaagggtttgctctggtaggtgttggctccgaagccagctccaaaaaactgatggatcttctacctaagcgagagctgcatgggcaaaacccggtcgtgaccccttgcaacaagcaattcctaagtcagtttgagatgcaatcacggaaaacgacacagagcggtcaaatgtccggcgaggggaaagcaggccccccgggcggcagttctagagctgcatttcctcagggagggagaggcagaggtagattccccggagcggttcccggaggagataggttcccgggccccgctggacccggaggccctcctcccccctttccgggaaatctgattaaacatctggtgaaaggcacaagacctctgtttctggagaccagaatcccttggcacatgggccacagtattgaggaaatcccaatctttggcctcaaggccggtcagacgccccccagaccaccgttggggccgcctggcccgcctggcccgcccggtccgccaccacctgggcaggtgctccccccgcccctggctggcccgccaaaccggggtgacaggccccccccaccagtgctcttccctgggcaaccttttggccagcccccgttgggtcctctgccgccagggcctccccctcctgtcccagggtatggtcctccaccagggcccccgccgccacagcagggccctccaccacctcccggccccttccctccccggccaccgggtcctctcggccctcctctgacactggctcctcctccccatctgccaggtccccccccaggcgcaccccctccagctccacacgtgaatcccgcctttttccctcctccaactaacagcgggatgcctaccagcgattccagagggccacctcctaccgatccttatgggcgacctccaccgtacgacaggggcgattatggcccgcctggacgcgagatggacaccgcgcggacgcccctgtccgaggcggagttcgaggaaatcatgaataggaatcgcgctatctcatcatctgccataagccgggctgtctctgacgcatctgcaggggattacggctccgccatcgagaccctcgtcacagctatatctttgatcaaacagtccaaggttagtgcagatgaccgttgtaaggttttgatttcgtccctacaggactgcctgcatggcatcgagtccaaatcgtacggatctggaagtcggcgcgagcgttcacgagaacgcgaccactcccgtagccgggaaaagtccagacggcacaaaagccgaagtcgggatcgacacgatgactattacagagagaggagcagggagcgtgagcggcaccgcgatagagaccgcgaccgtgatagagagcgagaccgagagagagagtaccgccaccgttag

SEQ ID NO: 183263 - DNA, 1656 bp, synthetic construct
  misc_feature 1..1656: note = Description of Artificial Sequence: Synthetic coding sequence
  source 1..1656: mol_type = other DNA
atggccgacggcgtggaccacatcgacatctacgccgacgtgggcgaggagtttaatcaggaagctgaatatggtgggcacgatcaaatcgacctgtacgatgacgtgatctcaccttctgctaataatggtgacgcacccgaggacagggattatatggataccttgcctcccactgttggagatgacgtgggaaaaggggcagcccctaatgtggtctacacgtacactggaaagagaatagccctctatattgggaacctcacatggtggaccacagacgaggaccttaccgaggccgttcactccctgggagtgaatgatatacttgagattaagtttttcgaaaaccgggccaatggacaaagcaagggctttgctcttgtgggtgtcggatccgaggcatccagtaaaaaacttatggacctgctgcctaagcgcgaacttcacggccaaaacccggtagtgacaccttgcaacaagcagttcctatctcagtttgagatgcagtcccgcaaaacaacacagagtggccaaatgagcggggagggtaaggcgggaccccccggaggatctagtcgagctgcctttccgcaggggggtaggggccgcggcagattcccaggagcagtccccgggggcgaccggtttccaggcccagctggtccaggtggccccccaccaccctttcccgccgggcagacccctcccaggccccctctgggaccgccaggcccccccggcccccctggccctcctcctccgggccaagtcctccccccaccacttgcaggacctccaaacagaggagatcggcctcccccacctgtcctgtttccaggtcagccttttggacaaccccccctcggaccccttcctcctggcccgccgcccccggtgcccggctacggccccccccccggtcccccccctcctcaacagggccctccccctcccccgggaccttttcctcctagacctccaggcccccttgggccgcccctgacattggctcctccaccacaccttcccggtccaccacccggggctcccccacccgcgccccatgtaaacccggcctttttccccccacccactaactctggaatgcctacttcagattctcggggcccacctcccactgatccttacgggcgcccacctccatatgatcgcggagattatggtccccctgggcgagagatggacacggcccgcactccactatcagaggctgaattcgaggaaattatgaatagaaacagagcaatatcaagtagcgccatcagtcgtgccgtgtccgatgcttctgccggtgattacgggagcgctattgagacattggttaccgcaatatccctgattaagcaatctaaagtatccgccgatgatcgctgcaaggtacttatttcatctctgcaggactgtctgcatggaattgagtcaaaaagttacggaagtggctcccggagagagcgttctcgtgaaagggatcattcccgaagtcgtgagaagagccgccggcataaaagccgttcacgcgatcgccacgatgactattacagggagaggagccgcgaaagagagcgacaccgtgatcgtgacagggaccgagatagagaacgcgaccgcgagcgggagtaccgacaccgctag

SEQ ID NO: 183264 - DNA, 1437 bp, synthetic construct
  misc_feature 1..1437: note = Description of Artificial Sequence: Synthetic coding sequence
  source 1..1437: mol_type = other DNA
atggccgacggcgtggaccacatcgacatctacgccgacgtgggcgaagaattcaatcaagaggccgagtatggggggcacgaccagatcgacctgtatgatgatgttattagcccaagcgctaacaatggcgacgcgcccgaagatcgcgattacatggacaccctgccacctaccgttggcgatgatgttggcaaaggcgcggcacccaacgttgtctacacctataccgggaagagaattgctctttatatcgggaatctgacatggtggacgactgatgaggacctaaccgaagccgtacacagtctaggtgtcaatgatatacttgagattaaattcttcgagaatagggcaaacggccagtctaagggcttcgccctcgtcggcgtcggctcagaagcctccagcaagaaactgatggacttactgcccaaacgtgagctgcacggccagaaccctgtggtgactccgtgcaataaacaattcctgagtcagtttgagatgcagagtaggaagactacgcagtcgggacagatgagtggggaaggcaaagcagggccccctggagccggccctccaaatcggggggataggccacccccccccgtgctgttccctggccagcccttcggacagccacccctgggccctttaccaccagggcctcctccaccggtgcccggttacgggcctccgccaggcccccccccaccacagcaggggcctccacctccgcccggtccattcccacccagacctccggggcccctgggccctcctctcacacttgcaccaccgccccacttgccaggcccaccacccggagccccgccccccgcgccacacgttaatccagcattctttccgccacccacaaatagcggaatgcccacatcagactcgcgtggcccacctcccactgacccttatggtcgacccccaccctacgatcggggggactacgggccgcccggccgagaaatggacaccgctcgcacaccactgtccgaagccgaatttgaggaaataatgaatcgcaaccgcgccatcagctcaagtgcgattagcagggcagtctccgatgcaagcgcaggggattatggatctgcgattgagaccctggtcactgccatttctctcataaagcagtctaaagtttctgcagacgatcggtgtaaggtcctgatttcgagccttcaggactgtcttcatggcatagagtcgaaatcctacgggtctggttctaggcgagagcgttccagggagcgtgaccattcaaggagccgcgaaaaaagcaggagacacaaatcccgaagccgcgatcgacacgacgattactatcgggagagatcacgcgagagagaaagacatagagatcgtgaccgcgatcgtgacagagaaagagatcgggagcgagagtaccggcatcgttag

SEQ ID NO: 183265 - DNA, 1851 bp, synthetic construct
  misc_feature 1..1851: note = Description of Artificial Sequence: Synthetic coding sequence
  source 1..1851: mol_type = other DNA
atgagcagcctggccgtgcgggaccccgccatggaccggagcctgagatccgtgtttgtgggaaatatcccttacgaagcaactgaggaacagctaaaagacatattcagtgaggtgggttctgtggttagcttcagattagtctatgatagggagaccggcaagcccaagggctacggattttgcgagtaccaggaccaggagaccgccttgtctgctatgcgaaatctaaatggccgggagttctccggaagagccttgagggtggacaacgctgcctctgagaagaataaagaagagctcaagtcacttggccccgccgcacctattattgactctccatatggcgaccctatcgaccctgaagacgcacctgaatccattacccgggccgttgccagtttgcctcctgagcagatgttcgaattaatgaagcagatgaaactatgtgtgcagaattctcaccaggaggcgcgcaacatgcttctgcagaaccctcagctggcctacgctctgctccaggctcaggtagtaatgagaattatggatcccgaaattgcactgaaaattttacaccgtaagatccacgttacaccactaatcccggggaagtctcagtctgtctccgtctctggccctggaccgggccccggtcctggactatgtccagggccgaacgtacttctgaatcaacagaatccacccgctccccaaccccagcatttagcacgccggcccgtgaaggatatcccgccactgatgcaaacccctatccaaggggggattccagccccgggccccataccagcagccgtacctggtgctggccctgggtccctgaccccaggaggcgctatgcaaccccaactgggaatgccaggagttgggcccgttcccctggaacgcggccaggtgcagatgtcagacccaagggcacctattcctcgggggccagtgacaccagggggcctgcccccaaggggtctgttgggagacgccccaaacgatccacgcggaggtacactgttgagcgtgacgggagaggtcgagccccgcggctatctcggcccgccccatcaaggaccaccaatgcaccacgcctctgggcacgatactcgtggaccaagttctcatgagatgagggggggacccctgggggacccacggcttctgatcggggagccgcgaggtcctatgattgatcagagagggcttccgatggacggtcggggcgggagggatagccgagccatggaaacaagggctatggagacagaagtcctcgagactagagtgatggaacgacgcggcatggagacatgcgcaatggaaacccgggggatggaggcccgcggcatggatgcgcgaggtctggagatgcgtggacccgtcccctcctcaaggggccccatgactgggggtatccagggaccagggcccatcaacataggggccggcggtcccccgcagggcccccgccaagtccccggcatttctggagttgggaatcctggcgctggaatgcagggtacaggaatccaagggaccgggatgcagggcgcaggaatccaaggcggcggaatgcagggcgcgggcattcagggggtgagcattcaaggcggcgggattcaaggaggcggcattcagggtgccagcaagcaaggcggttcccagcccagtagcttttctcccggacagagccaggtgacccctcaagaccaggagaaggccgccttgataatgcaggtccttcaattgactgctgaccaaatcgcaatgctgccgcctgaacagcggcagtccatactcattctgaaggaacaaattcagaaatctactggtgcttcttag

SEQ ID NO: 183266 - DNA, 2541 bp, synthetic construct
  misc_feature 1..2541: note = Description of Artificial Sequence: Synthetic coding sequence
  source 1..2541: mol_type = other DNA
atgctgttcaccgtgagctgcagcaagatgagcagcatcgtggaccgtgacgactcctccatctttgacgggctggtggaagaagacgacaaggataaagctaagagagtcagcagaaacaaatccgagaaaaaacgcagagaccagttcaacgtgttaataaaggaacttggctctatgctccccggcaatgcccgcaagatggacaagagcactgtcttgcagaagtccatcgactttcttaggaagcacaaagagatcactgctcagtcagacgcatccgagattagacaggattggaagcccacatttctgagcaacgaagagttcacgcagcttatgctggaggccctggacggattctttctcgccatcatgactgatggcagcatcatatacgtctctgaatcagtcacctccctgctagaacatctacctagtgatcttgtggatcagagcatattcaattttattccagagggcgaacattccgaagtttataagattctgtcaacacacttgctggaatctgactctctgactcccgaatatcttaagagcaagaatcagctggagttctgctgtcacatgctgcgaggaactatcgaccccaaggagcccagcacatatgagtatgttaagtttatcggaaactttaaatccctgaactcggtgtccagctccgcacacaatgggtttgagggaacaattcagcgaacgcacaggccaagttacgaggaccgggtctgcttcgtggctactgtgcgtctggccacaccacagtttatcaaagagatgtgcacagtggaagagcccaacgaagaattcacaagccgacactctctggaatggaagttccttttcttggaccaccgagctccccctataattgggtatctccctttcgaggttctgggcacaagtggatacgactattaccacgtagacgacctcgaaaatctggcgaaatgccacgagcatttaatgcagtatgggaagggtaagtcctgttattatcgcttccttacgaaaggccagcagtggatctggctccagacccattattacataacttaccatcaatggaattctcggcccgaatttatagtctgtacccacaccgtggtgtcttatgcagaagtgcgggccgagaggagacgggagctgggcatcgaggagtccctacccgagacagccgcagataagagccaggactccggctccgataaccgcattaacacagtgtctctcaaggaggcactggaacgctttgatcacagccctacaccatccgcatcttctcgatccagtcgcaagtcctctcacacagccgtgtcagatcccagctcgacccccaccaagatccctacagatacatctaccccaccaaggcaacatctccccgcccacgagaaaatggtgcagcggcgctcctctttcagttcccagtccatcaatagccagtccgtcggcagttctctgacccagcccgttatgtcgcaggcgacgaacctccctatcccacaggggatgtcacaatttcagttcagtgcccagcttggcgccatgcagcacctcaaggatcagcttgagcagcgaacgaggatgattgaggctaatattcacaggcagcaggaggagctgagaaaaatccaagagcagctccagatggttcatggacagggcctgcagatgttcctgcaacaaagcaatcctgggctgaattttggctctgtgcaattgtcctctgggaattcttccaatattcagcaactggccccaatcaacatgcaggggcaagtggttccaaccaatcaaattcaatctggcatgaataccggacatatcgggacaactcagcacatgatacagcagcaaactctgcaaagcacctccactcagtcacaacaaaatgttctgagcggccactcacagcagacatcactgcctagtcagacacagtcgacgctaaccgcccccctgtataacactatggtcatctcacagcccgccgccggatccatggttcagatcccgtcctcaatgcctcagaacagcactcagtcagccgccgtgactacgttcacacaggataggcaaataaggttcagccagggccagcaattggtaaccaagctggttacggcacctgtcgcctgtggagcagttatggtgcccagcaccatgctgatgggccaggttgtaactgcatatcccacttttgccactcagcagcaacagagccaaactctttcggtgacccagcaacagcagcaacagtccagccaggaacaacagttgacctcagtacaacagcctagccaagcgcagctcactcaacccccccagcaattcctccagacaagcaggctgctgcacggcaatccttctactcagctgattctgtccgcagccttccccctacagcagtctacattcccccagtcccatcaccaacagcatcagagccagcagcaacagcaactgtcccgccacagaactgattcactccccgacccctccaaagtccagccccagtag

SEQ ID NO: 183267 - DNA, 1278 bp, synthetic construct
  misc_feature 1..1278: note = Description of Artificial Sequence: Synthetic coding sequence
  source 1..1278: mol_type = other DNA
atgggcgaggaggccaacgacgacaagaagcccaccaccaagttcgaacttgaacgcgagacggagctccggtttgaggttgaggcttcacagagcgtgcagttagagctgttgaccggcatggccgagatctttggcaccgagctgacaaggaataagaaattcacgttcgatgccggcgctaaggtagccgtttttacatggcacggttgctcagtgcagctttctggccgaactgaagtggcatatgtctctaaggataccccgatgctcctatatctgaacacccataccgctctggaacagatgcggcgtcaggccgaaaaggaggaagagaggggaccccgcgtgatggtggtgggccccaccgatgtgggaaagtcgacggtgtgcaggctcctgttgaactacgcagtgcgcctcggaaggcgacctacttatgtggagttagatgttgggcagggctcagtgagtataccaggaacgatgggtgccctttatatcgagcgcccagccgacgtcgaggaagggttctctatccaggcgcccctggtttaccactttggtagcaccacacccggaaccaatataaaattgtataacaaaataaccagccggctcgctgatgtgttcaaccagcggtgcgaggtgaataggagagcctccgtatccggatgtgtgatcaatacatgtggatgggtgaaggggagtggataccaggcacttgtccacgcggcaagcgcatttgaggttgacgtggtcgtggtactcgatcaagagagattgtataatgagttgaagcgcgatctgccccattttgtcagaacagttttgctgcctaaatccgggggagtggttgaaaggtcaaaagactttcgccgcgagtgccgcgatgagcgcatcagggaatacttttacggctttcgcggatgcttctacccccacgcctttaatgtgaaattctctgacgtgaaaatttacaaggtcggcgccccaaccatcccagactcctgcttacctcttggcatgtcccaggaagataatcaacttaagctagtcccggttacgcctgggagggacatggtgcatcacttactgtcagtcagcaccgccgagggcaccgaggagaatctgagcgagacctctgtcgccggttttatcgtcgtaacttctgtggacctcgagcaccaggtttttacagtgctctctcctgcacctcgaccactccccaagaatttccttctgatcatggatattagatttatggatcttaaatag

SEQ ID NO: 183268 - DNA, 1311 bp, synthetic construct
  misc_feature 1..1311: note = Description of Artificial Sequence: Synthetic coding sequence
  source 1..1311: mol_type = other DNA
atgaccgacctgcacagcagctacaccgaggagatgggcgaggaggctaatgacgacaagaaaccaaccacgaagttcgagctggagcgagaaactgagttacgttttgaagttgaagcctcccaatcagtacagcttgaactcctgacaggaatggctgaaatttttggaactgagttaacccgcaataaaaaattcaccttcgacgcaggagccaaggttgctgtattcacctggcacggctgctctgtgcagctgtcaggccggaccgaagtggcttatgtgagcaaagatacacctatgctgttgtatctgaacacgcataccgccctagagcagatgcgtcggcaggctgagaaagaggaggaacgtggaccaagggtgatggtggtaggcccaaccgacgtcggtaaatctacggtgtgcagactcttactgaactatgccgtcagactgggacggcgacccacttatgtggagttagatgttggccaagggtcagtgtctatcccagggacgatgggggcgttgtacatcgagcgcccagctgatgtggaagaaggcttctcgatccaggccccgctggtgtaccatttcggatctacaacaccgggaactaatatcaaactctacaacaagatcactagccgactggccgacgtgttcaatcaaagatgcgaggttaatagacgtgcctctgtctcaggctgtgtgatcaacacctgtgggtgggttaaggggtcaggttaccaggccctagtccacgccgcatctgcttttgaggttgatgtcgtggtcgtgctggatcaggaacgcctatacaacgaacttaaaagggacctgccacattttgtgagaaccgtgctcctaccgaagagcggaggagtcgtggaacgctccaaggactttagacgggagtgcagagatgaaagaatcagggagtacttctacggcttccgtgggtgcttctacccccacgcattcaatgttaagttcagtgacgtgaagatctacaaggtgggcgccccgaccatcccagacagttgtctccccctgggaatgtcacaggaggataaccaactgaagctcgtgcccgtaacaccaggcagggacatggtccaccacctgctgtccgtcagcactgcagagggtaccgaagagaacttatctgagacctctgtggccgggtttatcgtggtcacatctgtggatctcgagcaccaggtgttcaccgtgttatcccccgcccctagaccactgccaaagaatttcctcctaatcatggacatcaggtttatggacctgaaatag

SEQ ID NO: 183269 - DNA, 279 bp, synthetic construct
  misc_feature 1..279: note = Description of Artificial Sequence: Synthetic coding sequence
  source 1..279: mol_type = other DNA
atgggcgaggaggccaacgacgacaagaagcccaccaccaagttcgagctggagcgggaaaccgagctgcgcttcgaggtggaagcatcccaatcagtacagctcgagctgctcacaggtatggcagaaatcttcggcactgagctaacccgtaacaagaagtttacatttgacgccggagcaaaagttgcagtgtttacatggcacggatgctcagttcaactgtccggcaggactgaggttgcctacgtcagtaaagacacacccatgttgctttag

SEQ ID NO: 183270 - DNA, 1278 bp, synthetic construct
  misc_feature 1..1278: note = Description of Artificial Sequence: Synthetic coding sequence
  source 1..1278: mol_type = other DNA
atgggcgaggaggccaacgacgacaagaagcccaccaccaagttcgagctcgagagagaaacagaactgcgctttgaggtggaagcatctcaaagtgtgcagctggaactgctgacaggcatggcagagatcttcggcacagagctcactcggaacaagaaattcacttttgatgctggggcgaaagtcgctgtgtttacctggcatggctgttccgtgcaactctccggccgtaccgaggtcgcctacgtgtcaaaggacacaccgatgctcctgtatctcaatacacatacggcactggagcagatgaggagacaggcggagaaagaagaggagcggggaccacgggttatggttgtgggcccaacggatgtcggcaagagtactgtctgccgactcctactgaactatgcggtgcgcctgggacggcggccgacctatgttgagctggacgtggggcaggggtctgtgtccatccccgggaccatgggcgcactgtatattgagagaccagccgacgtcgaggagggattctctatccaagccccgttagtgtaccactttggctctacaactcccgggaccaatattaagctgtataacaagattacctccagattggcggatgtttttaatcagagatgtgaagtcaaccgcagggcaagcgtttccgggtgcgtgattaatacctgcggctgggtgaaaggctctggctaccaggctctcgtgcacgccgcttccgccttcgaggtggatgtggtggtagtgttggaccaagaacgattatacaacgagctcaagcgagatctgccacacttcgttaggaccgtcttgctgcccaagagcgggggggtcgtcgagcgcagcaaagattttcgtcgggagtgtcgcgacgaaagaattcgcgagtacttctacggcttccgggggtgtttttacccccatgccttcaacgttaaattttctgatgtgaaaatctacaaggtcggcgcccccactatccctgacagttgcctcccactcggaatgtcgcaagaggacaatcagctaaaactggttccagttacaccaggcagggacatggtgcaccacctgctgagtgtatctacagccgagggtaccgaggagaatctgagcgaaacatccgtggctggttttatcgttgtcacaagcgtggatctggagcatcaggtgttcacagtccttagccctgccccgagacccctgcccaaaaacttcctgctgatcatggatataaggttcatggacctgaaatag

SEQ ID NO: 183271 - DNA, 399 bp, synthetic construct
  misc_feature 1..399: note = Description of Artificial Sequence: Synthetic coding sequence
  source 1..399: mol_type = other DNA
atgggcgaggaggccaacgacgacaagaagcccaccaccaagttcgagctggagagagaaaccgaattgcgattcgaggttgaagccagccaaagcgttcagcttgaactgctgaccggaatggcggagatcttcggaacagagctgaccagaaacaagaagtttacattcgacgccggggccaaggtggctgttttcacttggcacgggtgtagtgttcaactgtcggggcggaccgaagttgcttacgtctcaaaggatacaccaatgttgctctatttgaacacacacacagctctggagcaaatgcgaagacaagccgagaaggaagaagaaagaggtccgcgagtgatggtggtaggtcctaccgatgtgggcaaatctacagtgtgccggtag

SEQ ID NO: 183272 - DNA, 834 bp, synthetic construct
  misc_feature 1..834: note = Description of Artificial Sequence: Synthetic coding sequence
  source 1..834: mol_type = other DNA
atgtggcccggcatcctggtgggcggcgcccgggtggccagctgccgatatcctgcactgggacctaggctcgccgcacactttcccgcccagcggcctccgcagcggacactacaaaacggtttggctcttcagcgctgcctgcacgctaccgcaactagagcacttcccctcatccctatagttgtggagcagactggtcggggtgaacgggcatatgacatatacagtaggctgttacgggaacggatagtgtgtgtaatggggcctatcgacgactcagtggctagcttggtgatcgctcaactactgttcttacagtccgaatctaacaagaaacccattcacatgtacatcaactctccggggggcgtggtgacggccgggttggcaatttacgacaccatgcaatacatactgaatcccatttgcacctggtgcgtgggacaagccgcctcaatgggctccctgctcctcgcagctggtacccccggcatgcggcattcactgcctaactcccgtatcatgatccatcagccatccggaggggccagaggacaggccaccgacatcgccatccaggccgaagaaataatgaagttgaaaaagcagctgtacaacatctatgcgaaacatacgaagcaaagcctccaagttatagaatcagctatggagcgtgaccgatatatgagccccatggaggctcaggagtttggcatccttgacaaggtgctcgtccatccaccgcaagatggagaggacgagccaacgctcgtgcagaaggaacctgtggaggctgctccagctgcagagcccgtgcctgcctcgacctag

SEQ ID NO: 183273 - DNA, 1617 bp, synthetic construct
  misc_feature 1..1617: note = Description of Artificial Sequence: Synthetic coding sequence
  source 1..1617: mol_type = other DNA
atgtggagcggccggagcagcttcaccagcctggtggtgggcgtgtttgtggtgtacgtggtgcacacgtgttgggtgatgtacggtattgtgtacacccggccgtgtagcggcgatgcaaactgtattcaaccctatctggcacgtaggcctaagctgcagctctccgtgtatacgactacccgtagtcacttaggagccgaaaacaacatagacctggtgctgaatgtggaggacttcgacgtggaatctaagtttgaacggaccgtcaacgttagcgtgccaaagaaaacccgcaataatggaactctttacgcctacatattcctacatcatgccggggtcttgccgtggcatgatggcaaacaggtgcacctggtgagccctttaaccacgtatatggtcccgaaacctgaggaaattaatctccttacaggtgagtctgacactcagcaaattgaggcagaaaagaagcccacaagcgcactggatgagcccgtgtctcattggaggccgcggttggccctgaacgtgatggctgacaactttgtattcgacggaagcagtctccctgcagacgttcaccgatacatgaaaatgattcagttaggcaagacagtgcactatctgccaatcctgttcattgatcagttgtctaaccgtgtgaaagacctgatggtgatcaatcggtcaaccaccgagctcccactgacggtgtcctacgataaggtatctctaggcagactgaggttctggatccacatgcaggacgccgtttactcactccagcagttcggattcagcgaaaaggacgctgacgaggttaagggtatttttgttgacacaaatctgtacttcttagccttgacatttttcgttgccgcctttcacctgctgtttgactttctcgcatttaagaacgacatatcattctggaaaaagaagaagtctatgatcggcatgagcaccaaggcagtgttgtggaggtgctttagcactgttgtgatttttttatttctactggatgagcagacctctttgctggtgctcgtgccagcgggcgtcggtgccgctatcgagctatggaaggtcaagaaggcactgaagatgacaatcttctggaggggccttatgccagagtttcaattcggcacctattccgaatccgagaggaagaccgaagagtatgatacacaggccatgaagtacctatcctacctgctttacccactgtgtgtaggcggcgccgtttacagtctcctgaacataaagtacaaatcctggtacagttggttgatcaacagcttcgtgaatggtgtctatgctttcggcttcctctttatgctgccccagttatttgtcaattacaaactcaagtccgtggcccacttgccctggaaggcttttacctacaaggccttcaacactttcatagacgatgtgtttgcgttcattatcaccatgccgacaagccatagactggcgtgcttccgcgatgatgtggtattcctggtgtacctctatcagcgatggttgtatcccgttgacaagcggagggtcaatgaatttggggagtcctacgaagagaaggcaactcgggcaccacacaccgattag

SEQ ID NO: 183274 - DNA, 1509 bp, synthetic construct
  misc_feature 1..1509: note = Description of Artificial Sequence: Synthetic coding sequence
  source 1..1509: mol_type = other DNA
atgtggagcggccggagcagcttcaccagcctggtggtgggcgtgttcgtggtgtacgtggtgcacacttgttgggtgatgtacggaattgtctatacgagaccgtgtagcggcgacgccaactgtatccagccttacctcgcgcggaggcctaagctacagctaagtgtctacactaccacacgttctcatttgggagctgagaacaatattgacttggtgctgaatgtggaagatttcgatgtggaatctaagttcgaaaggaccgtaaacgtgtcggttccaaagaaaacaaggaataatgggaccctgtacgcctatatctttctgcaccatgctggcgtactgccatggcacgatggtaagcaggtccatctagtgagccctctcaccacgtacatggttccaaaaccagaggaaatcaatctgctcacaggtgaatcagacactcagcaaattgaggccgagaaaaaacctacaagcgcacttgacgagcccgtgagtcactggcggccccgattagctctgaatgtcatggcagataactttgtttttgatggtagcagcttacccgctgatgtgcaccgatacatgaaaatgatccagttgggaaagaccgttcactacctgcccatcctctttatcgaccagcttagtaatagggtgaaagacttgatggtgattaataggtcaaccaccgagctcccactgaccgtgagctacgacaaagtgtctctggggaggctccggttttggattcacatgcaggacgcagtctatagcctccaacaattcggcttctctgaaaaggatgctgatgaagtgaagggaattttcgtggatactaatctatactttcttgctctgacattcttcgtcgccgcgtttcacttactcttcgattttctggctttcaaaaacgacatcagcttctggaagaagaaaaagtctatgatcgggatgtcaacgaaactttggaaggtgaagaaagctctgaaaatgaccatcttttggcgaggacttatgccggaatttcagttcggtacatactccgaaagcgaacggaagacagaagagtatgatacgcaagctatgaaatacctcagttatcttttatatccattgtgcgttggaggtgccgtgtactctctccttaatataaagtataagtcctggtactcatggcttatcaactcattcgtgaacggggtgtatgcttttgggttcctctttatgctgccccaattatttgtgaactacaaactgaagagtgttgcccatctgccttggaaggcctttacctataaagccttcaatacctttatcgatgacgtctttgcgtttattatcactatgcctaccagtcacaggctcgcctgtttccgggacgatgtcgtattcctggtatacctctatcagaggtggctgtaccctgtagataagcgacgggtgaatgagtttggcgaaagttacgaagaaaaagccactagagcgccacacactgattag

SEQ ID NO: 183275 - DNA, 1350 bp, synthetic construct
  misc_feature 1..1350: note = Description of Artificial Sequence: Synthetic coding sequence
  source 1..1350: mol_type = other DNA
atgatgaagaccctgctgctgttcgtgggcctgctgctgacctgggagagcggccaagtgctgggggaccaaaccgttagtgataatgaactgcaagaaatgagtaaccagggctccaagtatgttaacaaagagattcaaaatgctgtgaacggtgtcaaacagatcaagaccctgattgagaaaactaatgaagagcgcaagactctcttaagcaatctcgaggaggcaaaaaagaagaaggaagatgctctgaacgaaacccgtgagagcgagaccaagctcaaggagttacccggcgtgtgcaatgaaactatgatggccttatgggaggaatgcaagccttgtttaaagcagacatgtatgaagttctatgcgcgggtctgcagatcagggtctggacttgtcggaaggcaattggaagagttcctgaaccagagtagccccttttacttttggatgaatggagaccggatcgacagtctcctggagaacgacagacagcagactcatatgcttgacgttatgcaggatcacttctcacgcgcctcctcaattatagacgagctcttccaggatagattttttacgcgtgagcctcaggacacttatcattacctcccattctctctgccccaccgaagaccacacttcttcttccctaagagccgtatcgttcggagtctcatgccattcagtccctacgagccactcaatttccacgccatgtttcaaccattcctcgagatgatccatgaggcacaacaggctatggatatccattttcacagccctgcctttcagcatccgcccacagaatttattcgcgaaggggacgacgatcgcacagtatgcagagagatcaggcacaacagcactggctgtctgcgcatgaaagatcagtgtgacaagtgtcgcgaaattttaagtgtggactgcagtacaaataacccaagtcaggccaaattgagacgggaacttgacgaatccctgcaagtcgccgaacggctaacgcggaagtacaatgaactgctcaagtcttatcagtggaaaatgctgaatacctcctctctcctggaacagctgaatgagcagttcaactgggtctcacggttggcgaatcttacacagggcgaggatcagtactatctcagagtcacaaccgtagcctcgcacacctcggattccgatgtgccctctggcgtgactgaggtggttgtcaaattgtttgattcggaccccattaccgtgaccgtcccggtggaggtatctagaaagaaccctaaattcatggaaacggtcgccgagaaagctttgcaagagtatcgcaagaaacatcgcgaggagtag

SEQ ID NO: 183276 - DNA, 825 bp, synthetic construct
  misc_feature 1..825: note = Description of Artificial Sequence: Synthetic coding sequence
  source 1..825: mol_type = other DNA
atgcaggaccacttcagccgggccagcagcatcatcgacgagctgttccaagaccgtttcttcacaagggagcctcaggacacttatcactacttacccttcagtctgccccaccgtagacctcactttttcttcccgaagagccgcatcgtgcgtagcctgatgcccttcagcccatacgagccgcttaacttccacgcaatgttccagcccttcctggaaatgattcacgaagcacaacaggccatggacatccatttccattcaccggcatttcagcatcctccaaccgagtttataagagaaggggatgacgacagaacagtgtgtcgagagatcagacataactcaacgggctgccttaggatgaaggatcaatgtgacaagtgccgtgagatcctgagtgtcgattgcagcacaaataatcctagtcaggcaaaactccggagggaattggatgagtcactgcaggtcgcagaaaggctgaccagaaagtataacgagctgttgaagagttaccaatggaagatgctcaacacctcctcactactcgagcaactgaatgagcaattcaactgggtgtcgaggctggcaaatcttactcagggcgaggaccaatattaccttcgagtaaccaccgtagcatcccacacgagtgatagcgacgtgccaagtggagtgaccgaagttgtagtgaaattgtttgatagcgatcccataacggtgacggtcccagtcgaagtttcaagaaaaaatccgaaattcatggaaactgtcgctgagaaagctctccaggagtaccgcaagaagcacagagaggaatag

SEQ ID NO: 183277 - DNA, 1350 bp, synthetic construct
  misc_feature 1..1350: note = Description of Artificial Sequence: Synthetic coding sequence
  source 1..1350: mol_type = other DNA
atgatgaagaccctgctgctgttcgtgggcctgctgctgacctgggagagcggtcaggttttaggcgaccaaactgtttccgataacgaactccaagaaatgtctaatcagggatcgaagtacgtgaataaagagatacagaacgccgtaaatggcgtaaaacagattaaaaccctcatcgaaaagacgaacgaagaacggaaaacactgctatcaaatctagaagaggcaaaaaagaagaaggaagacgccctgaatgaaacacgcgagtcagaaacaaaattgaaagaactcccaggggtttgtaatgaaactatgatggcactttgggaggaatgcaagccctgcctcaaacagacttgtatgaaattctacgcaagggtgtgcaggtccggctcagggttggtgggaagacagctggaggagtttctcaaccaatctagtccattttatttttggatgaatggcgaccgcattgacagccttctagagaatgacaggcagcaaacccatatgttggatgtaatgcaggaccattttagccgcgcatcttcaatcatcgacgaactcttccaggaccgtttttttacccgggaaccccaggatacgtaccattatctccccttttcattaccccaccgccggccacatttttttttcccaaagtcccggattgtcaggtcattgatgccgttttccccatacgagccgctcaattttcacgccatgttccagcccttcctggagatgattcacgaggcacagcaggctatggacattcacttccacagtccggcatttcaacatcccccgactgaatttatacgggagggggacgacgaccggactgtttgccgagaaattcgtcataatagcactggatgcctcaggatgaaggatcagtgcgataaatgtcgcgagatcttaagtgtggactgttctacaaacaatcctagccaagctaagctcagacgtgagcttgatgaatctctgcaggttgctgagcgccttacaaggaagtataacgagctcctcaagagttatcagtggaaaatgcttaacacctcatccctgctggaacagctgaacgaacagttcaactgggtgtccagactggctaacctgactcaaggcgaggaccaatactatctcagagtgaccaccgtggccagtcacacttctgattccgatgtgccctcgggggtgacggaggtggttgtgaagctgtttgactcagatcccataacagtgaccgtgcccgtcgaagtgagcagaaaaaacccaaagttcatggaaacagtagccgaaaaggccctccaggagtatagaaaaaagcatcgggaagagtag

SEQ ID NO: 183278 - DNA, 615 bp, synthetic construct
  misc_feature 1..615: note = Description of Artificial Sequence: Synthetic coding sequence
  source 1..615: mol_type = other DNA
atgatgaagaccctgctgctgttcgtgggcctgctgctgacctgggaatcggggcaggttctgggtgaccaaactgtgtccgacaacgagctccaggaaatgtccaaccagggttctaaatatgtcaacaaagaaatccagaacgccgttaacggtgtgaagcaaataaagaccctgattgaaaagaccaacgaagaacggaaaactttgctgagcaatctcgaagaagcgaagaaaaaaaaggaagatgcacttaacgagacccgagagtccgagacgaagctcaaagagctgccaggagtgtgcaatgagacgatgatggcgctctgggaagaatgcaaaccatgcctaaagcaaacatgtatgaagttttacgcccgggtctgcaggtctggctcagggctggtagggagacagttagaggagtttctcaaccaatcctcaccgttttacttctggatgaatggtgatagaattgattcattgcttgagaacgaccgtcagcagacccacatgcttgatgtcatgcaggatcacttcagtcgagcttccagcattatagatgagttgtttcaggacaggttcttcactagagaaccccaggacacatactag

SEQ ID NO: 183279 - DNA, 1350 bp, synthetic construct
  misc_feature 1..1350: note = Description of Artificial Sequence: Synthetic coding sequence
  source 1..1350: mol_type = other DNA
atgatgaagaccctgctgctgttcgtgggcctgctgctgacctgggaaagcggtcaggtcctaggagaccagactgtgtcagataatgagctacaggagatgagcaatcagggttcgaagtatgttaataaggagatccagaatgccgtcaacggtgttaaacaaatcaaaactctgattgagaagacaaatgaggagcgaaagacattgctctcaaatcttgaggaagcaaagaagaaaaaagaggacgcactcaatgagactcgagagtctgaaacaaaactgaaggaattgcccggtgtatgcaatgaaacgatgatggcattgtgggaggaatgcaagccatgtctcaagcaaacgtgtatgaaattttacgcccgtgtttgccggagtgggtctggcctggtgggcagacagctcgaagaattccttaatcaatcgtctcctttctacttttggatgaacggggatcggatcgacagtctgctggaaaacgacaggcagcaaacacatatgctagacgttatgcaggatcacttttcgcgtgcatctagtatcattgacgagctcttccaggacaggttcttcacccgggagccgcaggacacctatcactatctgccttttagcctgcctcatcgtcgcccacactttttctttcccaagtccaggattgtgcggtctctgatgcccttctctccatacgaacccctgaatttccatgctatgtttcagccttttttggaaatgattcatgaggctcagcaggccatggatatccacttccactccccagcatttcagcatccacccactgaatttattagagagggggacgacgaccgcaccgtctgccgggaaatcagacataattcaactgggtgtctgcggatgaaagatcaatgcgacaagtgccgtgaaatcctctctgtcgactgcagcacaaacaaccccagccaggctaagctgaggagggagctggatgagagccttcaggtggccgagcgcctgactcgcaaatataacgagttactgaagtcttaccagtggaagatgctgaatacgagctctttgctggaacagcttaatgaacagtttaactgggtctcccgcctggcaaatcttactcaaggggaggatcagtattacttaagagtgaccactgtggcaagccacacaagtgactctgatgtaccttcaggcgtgactgaggtagtggtcaaactgttcgattccgaccctatcacagtgacagtcccagtggaggtctctaggaagaatcccaaattcatggaaaccgtggcagagaaagcactgcaggaataccgcaagaagcacagggaagagtag

SEQ ID NO: 183280 - DNA, 816 bp, synthetic construct
  misc_feature 1..816: note = Description of Artificial Sequence: Synthetic coding sequence
  source 1..816: mol_type = other DNA
atgatgaagaccctgctgctgttcgtgggcctgctgctgacctgggaaagcggtcaggtgctgggcgatcagaccgtgagtgataacgagctgcaagaaatgagtaatcagggaagtaagtacgtgaacaaagagattcagaatgccgttaacggggtcaaacagataaaaaccctcatcgaaaaaactaatgaggagcgtaaaacactattgagtaatttggaggaggcaaagaaaaagaaggaagacgctctgaatgagactcgggaatccgagaccaagctgaaggaactgccaggggtatgcaacgaaactatgatggccttatgggaggaatgcaaaccatgtctaaagcagacatgcatgaaattttacgcccgggtatgtcgctccggcagcggcctagtggggagacagcttgaagagtttctgaatcagtcttcaccgttttacttctggatgaacggagatcgtatcgattccctgcttgagaacgataggcaacagacccacatgctggatgtgatgcaggaccactttagtcgagcgtctagtattatcgacgagctgttccaagactccctcatgcctttctctccatacgagccactgaatttccacgccatgttccagccattccttgagatgatccatgaagctcaacaggcaatggatatccacttccacagtcccgcgttccagcatccaccaaccgagtttatacgcgagggagatgacgatcggaccgtttgtcgggagataagacataattctaccgggtgcctgcggatgaaggatcaatgtgacaaatgctag

SEQ ID NO: 183281 - DNA, 1383 bp, synthetic construct
  misc_feature 1..1383: note = Description of Artificial Sequence: Synthetic coding sequence
  source 1..1383: mol_type = other DNA
atggaggcctgcaaggacagccggatcggcggcatgatgaagaccctattactctttgtgggtttgctgctaacctgggagagtggtcaggtccttggagaccagacagtgtccgataacgagctacaagagatgtctaatcagggaagcaaatatgtcaacaaggaaattcagaatgcagttaatggagtcaaacagatcaaaactctgatcgagaaaactaacgaggagaggaagaccctgctctctaaccttgaggaagccaaaaaaaagaaagaggatgccctgaacgaaacaagggaatccgagaccaagctgaaggagctgccaggggtgtgtaatgaaacgatgatggccctttgggaggagtgcaaaccctgtttaaagcagacatgcatgaagttctatgcacgagtgtgtcggtctgggagcggcttggttgggaggcagctggaagaatttctgaaccaatcctccccattttacttttggatgaatggtgataggatcgatagtttgcttgagaatgaccgtcagcaaacgcatatgctggacgtgatgcaagatcatttttctcgggcctctagcatcatcgacgaactgtttcaagatagattcttcaccagagagccacaggacacctatcactacctgcctttcagtttgccgcatagacgtccccacttttttttccccaagtcccgaattgtaaggtcccttatgccattttccccgtacgaacctctaaactttcacgcaatgttccagccttttctggaaatgattcatgaagcccagcaggccatggatattcatttccatagtcctgcctttcaacatccgcccacagagttcattagagaaggagatgacgacaggaccgtctgtcgggaaatccgccacaactccacaggatgcctgcgtatgaaggatcagtgcgataaatgccgggaaatcctgtccgtggactgctccaccaataaccccagccaagccaagctgaggcgagagctggatgagtcgctgcaggtggcagagcgcctcactcgcaaatataacgagctcctcaagtcctatcagtggaaaatgctgaacacctctagcctcttagagcagcttaacgagcagtttaactgggtgtctaggctggccaaccttacccagggggaagaccagtactatctccgggtgaccacagttgcatcgcacacatccgacagcgacgtaccttccggagtgacggaggtggtcgtgaaactattcgatagcgacccaatcacagtcaccgtgcctgtggaggtaagccggaaaaatcccaaattcatggaaactgttgcagaaaaggccctgcaagaatatagaaagaagcatagggaggaatag

SEQ ID NO: 183282 - DNA, 1506 bp, synthetic construct
  misc_feature 1..1506: note = Description of Artificial Sequence: Synthetic coding sequence
  source 1..1506: mol_type = other DNA
atgcaggtgtgcagccagccccagcggggctgcgtgcgggagcagtccgccattaatacggcgcccccctctgctcataacgctgcttcgccaggaggcgcccgcgggcatcgagttcccttgactgaagcatgcaaggatagccggatcggtgggatgatgaagacactcttgctttttgtgggtctgctgctgacatgggagtccgggcaggttttgggggatcagacagtatctgacaacgagttacaggaaatgagtaaccaggggagcaagtacgtgaataaagagatccagaacgccgttaacggggtgaaacagataaaaactctgatcgagaaaaccaacgaagaacgcaaaacactgctcagtaatcttgaggaagccaagaagaagaaagaggatgctcttaatgagacccgagagtcagagacaaaactcaaggagctgcctggagtgtgcaatgaaacgatgatggcactgtgggaagaatgtaagccttgcctcaaacaaacttgcatgaagttctacgctagagtttgcagatctgggtcgggcctggtaggccgtcaactcgaggagtttctgaatcagtcttctcctttctatttttggatgaacggcgaccgcattgactccttgctggagaacgaccgtcaacagacacacatgctggacgtgatgcaggaccacttctctcgcgcgagctctatcattgacgagttgttccaagaccgcttctttaccagggagccccaggatacatatcactatcttcctttctcacttccccataggagaccccattttttcttcccaaaatcccgcattgtgagatcgttaatgcccttttcaccctacgagcctctcaactttcatgcaatgttccagccctttctggaaatgatccacgaagcacagcaagctatggacattcactttcatagtcccgcctttcagcatccgccgaccgagttcatacgagagggtgacgacgacagaaccgtgtgccgggagatcagacataattctacaggctgcctgaggatgaaggaccaatgcgacaaatgccgagagatcctgtccgtcgactgttcaaccaacaacccttcacaggccaagctgagacgggagctggacgaaagtctgcaagtggctgagcgattaacccgaaagtacaatgagttactgaaatcctaccaatggaaaatgctcaacacctctagtctgctggagcagctgaatgagcagtttaattgggtgtcccggcttgccaaccttacccagggcgaagatcagtactacttgcgcgtcacaacagtcgcaagtcatacgagtgactccgatgtgccttcaggggtcaccgaggtagtggtgaaactgttcgattcagatcccataacagtaacggttcctgtggaggtgtcccgcaagaaccctaaattcatggaaaccgtcgcagagaaggcgttacaggagtaccgcaagaagcaccgggaggagtag

SEQ ID NO: 183283 - DNA, 894 bp, synthetic construct
  misc_feature 1..894: note = Description of Artificial Sequence: Synthetic coding sequence
  source 1..894: mol_type = other DNA
atggaggcctgcaaggacagccggatcggcggcatgatgaagaccctgctgttgtttgtcggtctccttcttacctgggagtcaggacaagtgctcggcgatcaaacagtcagtgacaacgagctgcaggagatgagcaatcagggctctaagtatgtgaacaaagaaattcagaacgccgtgaatggcgttaagcagattaagaccctgattgaaaagaccaacgaggagagaaagacattgctgtctaacttagaagaagccaagaagaagaaggaagacgcgctgaacgagacacgggagtccgagactaagttgaaggaattaccgggggtatgcaatgagactatgatggcactttgggaagaatgtaagccatgtctgaaacagacctgcatgaaattttacgcaagagtctgcaggagtggctcaggtctcgtgggacggcagctggaggaattcctcaaccagtccagccctttttatttctggatgaatggtgacaggattgatagcctccttgagaacgatcggcagcagacgcatatgcttgacgttatgcaggaccacttttcacgtgcttcatcgatcatcgacgaattgttccaggacagattttttacccgcgaaccccaggatacatatcactacttgcctttttccctcccacacagacgtccacatttttttttccccaaaagtagaattgttaggtccctgatgcctttttctccatatgagcctttgaacttccatgctatgtttcaacctttcttggagatgattcacgaagcgcaacaggccatggacatccactttcactcccccgcatttcagcaccccccaactgagtttattcgggaaggtgatgatgaccgaacggtgtgccgctag

SEQ ID NO: 183284 - DNA, 2040 bp, synthetic construct
  misc_feature 1..2040: note = Description of Artificial Sequence: Synthetic coding sequence
  source 1..2040: mol_type = other DNA
ctgggccagttcgagcagcccaccggctacatggagaacagcgtgagttattccgccatcgaggatgtacaactcctgtcttgggaaaacgcaccaaaatattgtctgcagcttactattcccggaggtacagtgctgctacaggccgctaatagctacctgcgggaccaatggtttcattcactgcagtggaagaaaaagatatataagtacaagaaagtgctgtctaacccaagcaggtgggaagtggtcctgaaggaaatccgtacactcgtggatatggctttaacatcgcctctccaagatgacagcatcaaccaagccccgttggaaatcgtgagcaagctgctgtctgaaaacacaaacttgacaacgcaagaacatgaaaacattattgtggctatcgcgcccttactcgagaataaccatcccccacctgatctttgcgagtttttctgcaaacactgtcgtgagagaccacgttccatggtcgttatcgaagtcttcactccggtagtgcagcggattctgaagcacaacatggattttggtaagtgtcccagactccggctgttcacccaggagtacatattggccctgaatgaactgaatgccggcatggaagtggttaaaaagttcatccagtcgatgcatggacccactggtcactgtcctcaccctcgggtactccccaaccttgtggctgtctgtctcgcagcaatatactcctgttatgaggagttcatcaacagtcgggataactctccatccctcaaggaaattcgaaacggatgtcaacaaccatgtgaccgcaaacctacgctcccactcaggctcctgcaccccagccctgacctcgtgagtcaggaggcaacgctcagtgaagccagacttaaaagcgtcgtagtggcatctagcgagatccatgtcgaggtggagagaaccagtaccgccaagccggccctgactgcctccgccggcaatgactcggaacctaacctgatagactgcttgatggtttcccccgcgtgttctacaatgtcaatcgagttagggccgcaggcagacagaacattgggttgttacgtggagatcctcaaactgttatctgattatgacgattggaggccgtctttggctagtctgcttcagccaatcccatttcccaaggaggccctcgcacatgaaaagtttactaaggaactgaaatacgtaattcagcggttcgctgaggacccccggcaagaggtgcatagctgtctgctaagtgtgagagcaggcaaagacgggtggttccaattatattccccaggcggcgtggcatgcgatgacgacggggagctgtttgcctctatggtgcatatcctgatgggaagctgctataagactaaaaagttcctgctgtctttggctgagaataagctggggccctgtatgttactggcactgcggggtaatcaaaccatggtggaaatcctgtgtctgatgttggaatataacataatcgataacaacgatacacaactgcagatcatatcaacgctggaaagcactgacgtgggcaagagaatgtatgagcagctgtgtgatcgacaacgcgaattaaaggagctgcaaagaaaaggcggacctacacgcctgacacttcccagcaagtcaaccgatgcagacttagcgcgcttgttgtcttcgggatcatttggtaaccttgaaaatctttctcttgctttcactaatgtgactagcgcgtgcgctgagcatctgatcaaactgccaagcctgaaacagttaaatctgtggtctacacagtttggggatgcgggcctaagattacttagtgaacatctaaccatgcttcaggtactcaatctttgcgaaacccctgttactgatgctggactcctggccctttccagcatgaaaagcctgtgctccttgaacatgaacagtaccaaactctcagccgacacgtacgaggatcttaaggctaagttgccaaaccttaaggaggtagatgtccgctacacggaagcatggtag

SEQ ID NO: 183285 - DNA, 2322 bp, synthetic construct
  misc_feature 1..2322: note = Description of Artificial Sequence: Synthetic coding sequence
  source 1..2322: mol_type = other DNA
atggacgtgaccagcagcagcggcggcggcggcgacccccggcagattgaagaaacgaaaccactactggggggggacgtgagtgcgccagaagggacaaaaatgggtgccgtgccatgccgccgagccctgctcctgtgcaacggaatgcgttacaagctgcttcaggaaggagatatccaggtgtgcgtcatccggcacccacggacatttctgagtaaaatcctcacatccaaattcctgagaagatgggaaccgcatcacctgacactggccgataatagcttagcctcagcaactcccaccgggtatatggagaactccgtctcatatagcgctattgaggacgtccaactcctatcatgggaaaacgcccccaaatactgcttacaactaacaatacccggggggactgtcctgctccaggctgccaactcttatcttagggatcagtggttccactcactgcaatggaaaaagaaaatctacaagtataagaaggtgctgtccaacccttccaggtgggaggtggtactgaaagagatccgaacactggttgacatggcacttacatctcccctccaggacgactcaatcaaccaggcccccctcgagattgtgtctaagctgctatctgaaaatactaacctcaccacacaggaacacgaaaacattatcgtggccattgcgccattactggagaacaaccacccccctcccgatctgtgcgaatttttctgcaaacactgtagagagcgtcccaggagtatggtggtgattgaggtgtttacgccggtagtgcagcggatccttaagcataacatggactttggcaagtgccctaggctaaggcttttcacacaggagtatattttggcactaaatgagctcaatgctgggatggaggtggttaagaagttcatccagtctatgcatggaccaaccggccactgtccgcatccccgcgtcttacccaatctggtggcagtctgtcttgccgcgatttactcttgctacgaggagtttataaatagccgagacaactctcccagcttaaaggagattcgcaacggatgtcagcagccctgtgaccgtaagcctactctgcctctgaggctgctgcacccctctcccgacctcgttagccaggaggccacgctgagtgaggcccggttgaagtctgtcgtggtggcctcctccgaaatccacgtggaagttgaaagaacaagcactgcaaaaccggctctgactgcttccgctggcaatgactcagagcccaatctgatcgattgtcttatggtgagtcctgcatgttctactatgtctatagagctggggccccaggcagatcgaacacttgggtgttacgtagaaatccttaaactgctttctgactatgacgattggcggccctcgcttgcctctctcctgcagcccatcccctttcccaaagaggcattagcccacgagaagttcactaaggagcttaagtacgtgattcagaggtttgccgaagatcccagacaggaggttcacagttgtcttctgagcgtgagagctggcaaggacggttggttccagctgtacagccccggcggggtcgcgtgtgatgatgacggggaattgtttgcatccatggtccatatacttatgggttcatgctacaagactaagaagttccttttgagtcttgccgagaataaattgggcccctgtatgctgctggctctccggggcaatcagacaatggtcgagatactttgtctgatgctggaatataacattatagataataatgacacccagctccagatcatcagcactctcgaaagcacagacgtgggcaaaaggatgtatgaacagctctgtgacaggcagcgcgagctgaaggagcttcagcggaagggaggacctaccaggctaaccctgccctccaaatccactgatgcggatctggccagattattgagctctgggtcttttggtaacctcgagaatctctcgctggcctttactaacgtcacttcagcttgcgccgagcacttaattaagctaccatccctgaagcagttgaacctctggtctacgcagttcggcgacgccgggcttcgattgctcagtgagcacctaaccatgttgcaggtgctgaatctgtgtgaaaccccagttacagacgcaggactgttagcactaagttctatgaaatctttgtgttccctgaacatgaatagcaccaaactgtcagccgacacttacgaagatctgaaggcaaagctccctaatctcaaggaggttgacgttaggtataccgaggcttggtag

SEQ ID NO: 183286 - DNA, 2040 bp, synthetic construct
  misc_feature 1..2040: note = Description of Artificial Sequence: Synthetic coding sequence
  source 1..2040: mol_type = other DNA
atgggccaggccgccgagcccaccggctacatggagaacagcgtgtcatatagtgcaattgaagacgtccagttactctcttgggagaatgctcctaaatattgccttcagcttactatcccaggagggaccgtgctgttacaggccgccaactcttacctgagggatcagtggttccactcattacagtggaaaaaaaaaatctacaaatataaaaaggttctctctaacccttcccgctgggaagtggtgttaaaggaaatcaggaccctggtagacatggctcttaccagcccacttcaggatgattctattaaccaggctcccctagaaatagtttccaagcttctctccgaaaacaccaatctcactacccaggaacacgagaatattatcgttgctatcgcccccctgctggagaataaccatccgcctcccgacttgtgcgagtttttctgtaaacattgccgtgaaaggccccgttcgatggtagtgatagaggtgttcaccccggtggtgcagcggatcctcaaacataacatggacttcggcaaatgtccaagactgcgacttttcacccaggagtatattctcgccctcaatgagttgaacgccggcatggaggtagtcaagaagttcatccagtccatgcacggccccactgggcattgtccgcacccacgtgttttgccgaacctagtcgccgtctgcttggcggctatctactcatgctacgaggagtttatcaatagtagggacaattctcccagcctgaaggagatccgtaatggatgccagcagccttgcgacaggaaacccactctccccttacgccttctccatcctagccccgacctggttagccaagaggctactctctctgaggctcgccttaagagtgttgtggtggcaagcagtgagatccacgtggaggtggagagaacatcaaccgccaagccagctctgaccgcctcagctggaaacgatagtgagcccaacctgatcgactgtctgatggtatccccagcatgctctacaatgagcatcgaactgggaccccaggccgaccgcacgctaggatgttacgtggagatcctgaaattgctgagcgactacgatgactggaggccgtctctcgcctcgctccttcaaccaatcccgtttccaaaggaggctctggcccatgagaagttcactaaagagctcaagtatgtcattcagcggtttgccgaggatcctagacaggaggtgcactcatgcctcctctccgtgcgcgcaggcaaggatggttggttccagctctactcccctggtggagtcgcttgtgacgacgacggcgagctgttcgcttctatggttcacatcctaatgggtagctgctacaaaaccaagaaattcttactgtctcttgctgaaaataagcttggtccctgcatgctgttggctttacgaggaaaccaaacaatggtcgagatcttatgtttgatgctggaatataacattatcgataacaatgacacgcagttacagataatttcaactctggagtctacggatgtcggcaagagaatgtatgagcaattgtgtgacaggcagagagagttgaaggagctgcagaggaaagggggtcccactcggcttaccctgccctctaaatctaccgatgccgaccttgctagactccttagtagcgggtccttcgggaacctcgagaacttgtcattggcctttacaaacgtgacatccgcgtgtgccgaacacttaattaaactcccctctctcaaacaactcaacctgtggtcaacacagtttggagatgctgggctgcggttgttgtctgagcacttaacaatgctgcaggtgctgaatctgtgtgaaacccctgtaacggatgccggcttactagcactcagttcgatgaaaagtttgtgctcgctgaatatgaactctaccaagcttagcgcagacacctacgaggacttaaaagccaagttacctaacctgaaggaagtggacgtccgctataccgaagcttggtag

SEQ ID NO: 183287 - DNA, 1761 bp, synthetic construct
  misc_feature 1..1761: note = Description of Artificial Sequence: Synthetic coding sequence
  source 1..1761: mol_type = other DNA
atggccctgaccagccccctgcaggacgacagcatcaaccaggccccgctggaaatcgtttctaaattgctgtctgagaataccaatctcaccactcaggagcacgaaaacattatcgttgctatagcccctctgctggagaataatcatcctccacctgacctgtgtgaatttttttgtaaacactgccgggagcgccctcggtctatggtggtgatcgaggtgtttaccccagttgttcagcgaattctaaaacacaacatggactttggtaagtgcccccgattacgcctgtttacccaggagtatatcctcgccctcaatgagctgaatgccgggatggaagtagttaagaagtttatccagtctatgcatgggcctaccggacattgtccccatccaagagtgctgcccaatttggtggcagtctgcctagccgccatctactcctgctatgaagaattcatcaattctcgcgataacagcccttccctgaaagagatcaggaacggctgccagcagccctgcgaccgtaaaccaacgcttcctctaagattgctgcatcctagcccggacctagtcagccaggaggcaaccctgagcgaggcaaggttgaagagtgttgtggtagcttcatccgagatccatgtggaggtggagagaacctcaaccgcaaagcctgcactgaccgccagcgctggtaacgacagcgagcccaacttgatcgactgtttgatggtcagccctgcctgtagcaccatgtccattgaactgggaccccaggctgaccggacactgggctgttacgtcgaaattctgaaactgctgtccgactatgacgattggcgcccatctctggcttcactccttcagcccattccctttcccaaggaagcactggcacatgagaaatttaccaaggaactcaagtatgtaattcagaggtttgcagaggacccaagacaagaggtgcatagctgcttactgagtgtgcgggccgggaaggatgggtggtttcagttgtacagcccaggaggggttgcctgcgatgatgacggcgagctgtttgcgtctatggtgcacatcttgatgggctcctgctacaagactaaaaaatttcttctctcccttgcggagaataagttaggaccctgtatgctactggctcttcgggggaaccaaacaatggtggagatcttgtgtttgatgctagaatataacataatcgataacaacgacacccagttgcagattatctcaacactggagtctacagacgtggggaaacgtatgtacgaacagttgtgtgatagacagagagagctgaaagagttacagcgaaaggggggaccgacccggcttacactgccctccaaatctacggatgccgatctggcccggttgctatcttcagggtcctttggcaatctagagaatctgtcactcgctttcacaaacgtgacgtcggcgtgtgctgaacatttaattaaattaccaagtctgaaacagcttaacctgtggtcaacccagtttggcgatgcgggcctgcggcttctgtcagaacacctgacgatgctacaggtgctcaatttgtgcgagactccagtcacagacgcgggattgcttgcactgtcttccatgaagtccctgtgttcactgaatatgaatagcactaaactgtcagccgatacgtacgaggacctgaaggcaaagctgccaaacctgaaggaggtagatgtacgctatacagaagcttggtag

SEQ ID NO: 183288 - DNA, 312 bp, synthetic construct
  misc_feature 1..312: note = Description of Artificial Sequence: Synthetic coding sequence
  source 1..312: mol_type = other DNA
atggcccactacaaggccgccgacagcaagcgggagcagttccggcgttacctcgagaagtcaggagtgctggatactctcactaaggtcctggtggcactctacgaggagccggagaagcccaatagtgcattggatttcctgaagcatcaccttggcgcagccaccccagaaaaccccgagattgaactgctgagacttgagctggcagaaatgaaggaaaagtatgaagccatcgtggaggaaaacaaaaagctgaaagcaaagctcgctcagtatgagcccccccaggaagagaagcgcgcggagtag

SEQ ID NO: 183289 - DNA, 1695 bp, synthetic construct
  misc_feature 1..1695: note = Description of Artificial Sequence: Synthetic coding sequence
  source 1..1695: mol_type = other DNA
atggccgtgttccggagcggcctgctggtgctgaccacccccctggcttccctagccccacgccttgcctctattctgacctcagcagccaggctggtgaaccacaccttgtatgtgcacttgcagcccggcatgtctctagagggccctgctcaaccccagagcagtcctgtgcaggccacattcgaggttcttgactttattacacatctgtacgcaggagcagatgttcatcggcatctggacgtccgcattctcctcacgaatattaggaccaaatccacattcttgcctcccctgcccaccagcgtacagaacttggcacatccaccggaggtagtcctgaccgattttcagaccctggacggctcgcagtataatccagtaaagcaacaattggtacggtacgctacctcctgctattcatgctgcccccgactcgcttctgttctgctgtatagtgactacggaataggagaggtgccagtcgagccgctcgacgtgccgcttccaagcacaatccgacctgcttcccctgtagccggctccccaaaacagcccgtccggggatactacagaggcgccgtgggaggaacctttgacaggctgcataacgcacacaaggtcctgctgagcgtcgcatgtatactggcgcaggaacagctggttgtcggcgtcgcagacaaggatctgttgaagagtaagttgctgcctgagctgttacaaccttacaccgaacgagtcgaacatttgtctgaattcctggtggacatcaagccctccctgacttttgatgtcatccctcttttggacccttacggaccagctggatcagacccctcgctggaatttttggtggtgagtgaggaaacctatcgtggtggaatggccatcaatcgattccgccttgaaaatgacttggaggagctggcattgtaccagatacagttattaaaagacctgcggcacacagaaaatgaagaagataaggtttcttcttccagtttccgacaaaggatgctgggaaacctattgagacccccgtatgagagaccagagctccccacatgtctctacgtgatcggcctcacagggatctccggatcaggaaagtccagcatagcacagcggctcaagggtctcggagcattcgtgatagattctgaccacttgggacacagggcctatgccccaggtggtccggcttatcagccagtagtcgaggccttcggtacggacattctgcataaggacggtataattaatcgcaaagtgcttggcagcagggtgtttggaaacaagaaacagctgaaaattctcaccgacatcatgtggccaatcattgccaagctagcgagagaggaaatggatagggcagtggccgagggcaaaagggtgtgcgtgatcgacgccgcagtcctgctcgaggcgggatggcagaatctcgtccatgaagtgtggactgccgtgatacctgagacggaggcagtaagacggatcgtggaaagagacggcttgtccgaggccgccgcgcaaagccgcctgcagagtcaaatgtccggtcagcagctagtcgaacagtcccacgtggttctaagcaccctctgggagccacatataacacagcgacaggtggagaaagcatgggccctgctccagaagagaatacccaagactcatcaagcactggactag

SEQ ID NO: 183290 - DNA, 1695 bp, synthetic construct
  misc_feature 1..1695: note = Description of Artificial Sequence: Synthetic coding sequence
  source 1..1695: mol_type = other DNA
atggccgtgttccggagcggcctgctggtgctgaccacccccctggcctcactcgccccaaggttggctagcatcctgacctcggccgcgaggctggtgaatcacacgctgtacgttcatctccaaccaggtatgtctcttgagggccctgcacagccccagtcatctccagtgcaggccacattcgaggtgctcgacttcatcacgcatctctatgccggtgctgacgttcatcggcatctcgatgttcggattcttctgactaatattaggaccaagagtacctttcttcctccactgccgacctctgtacagaacctcgcacaccctcccgaggtggtgctgaccgatttccaaactttggatggaagccaatacaatccagtaaagcagcaactggtccgctacgccacctcttgttactcctgttgtccacgcctcgccagtgtcctgctgtatagcgattatggaataggagaggtgcctgttgaacctctcgatgtgcctctcccatccactattagaccagcttctccagtggctggctctccgaagcagcccgtgagaggctactacaggggagctgtagggggaactttcgatcgcctccataatgcacacaaagtgctactgtctgtcgcatgtattctggcacaggagcagcttgtcgttggtgtggccgataaagatcttctgaaatccaagttgttacccgaactgttacaaccttatactgagcgcgtggaacacctttcagagttcctagtcgatattaagcccagcctcaccttcgacgttatcccgctgctggatccctacggacccgccggaagtgacccttctctcgaatttctggtggtttccgaggaaacttatagagggggcatggctattaacagatttagactggagaacgacttagaggagttggctttgtaccaaatccagttactcaaagatttacgacatactgagaacgaagaggacaaggtgtcatcatcttcctttcgtcagcgtatgcttggcaacctactcaggcccccttacgaaagacccgagctacccacgtgtttgtacgtgattggactgactggtattagcggatctggaaagagttctattgcacagaggctgaaagggttaggggcctttgtgatagactcagaccacttaggccacagagcttacgcaccaggcgggcccgcgtaccagccagtcgtggaggcatttggaactgacatactgcacaaggatggcattattaacagaaaagtgctgggctcccgagtgttcgggaacaaaaaacagctcaagatcctgaccgatattatgtggcccattatagccaagttggcaagagaggagatggacagggctgtcgctgaaggtaaaagggtgtgcgttatcgatgctgctgtccttctggaggccggatggcagaacctcgtccatgaggtttggacagctgtcatcccagagaccgaagcagtgcgcaggatcgtggagagggacgggctaagcgaagctgcagcccaatctagactgcagagccagatgagcggccagcagctggtggaacagagccacgttgtcctatcgacactctgggagcctcatataactcagagacaggtggagaaggcttgggccctcctccaaaaacggatccctaaaacacaccaggcactggattag

SEQ ID NO: 183291 - DNA, 1782 bp, synthetic construct
  misc_feature 1..1782: note = Description of Artificial Sequence: Synthetic coding sequence
  source 1..1782: mol_type = other DNA
atgcggaccccccggctgcgggcccagccccggggcgccgtgtaccaagctcccagccctccgcctgcacctgtgggcctgggctccatggccgtattcaggtcaggattgctcgtacttaccaccccactggcgagcctagccccgcgtttagcttcaattttgacgtcggcagctcggctggtgaatcacaccttatacgtacacttacagcctggaatgagcctcgaaggacccgcacagccacagagctcccctgtgcaggctaccttcgaggtccttgacttcatcacccatctgtacgccggggccgatgtgcataggcacttggatgtgcgcatcttgcttacaaatattcgcacaaagagtacattcctgcctcccctacccacatctgtccagaacttagcccatcctcccgaagtcgtactgaccgatttccaaactttagatgggtcacagtacaatccagtgaaacagcagctcgttcgatacgcaacaagctgttattcttgctgtcctagactcgctagtgtgctgctctacagcgattatgggatcggcgaggtgcctgtggaacctcttgacgtcccactccccagcaccatacggccagcttcacctgtcgccgggtcgcccaaacagcctgtaagggggtactaccggggggcagtcggtgggacgttcgaccgtctccataacgcccataaggttctcttgtctgtggcttgtatcttagcccaggagcagctagtggtgggcgtagccgacaaggacctgctgaaatccaagcttctgccggaactccttcaaccctacaccgagagggtggagcacttgtctgaatttcttgtggacattaagccttcactgaccttcgacgtgattcctctactggatccatatgggcccgctggctctgatccctctctggagttcctggtggtttctgaggagacttaccgcgggggaatggcaatcaacaggttccggctcgaaaacgatttagaagagttggctctgtaccagattcagcttctcaaagacctgaggcataccgagaacgaggaggataaagtgagcagctcttccttccggcagcgtatgctcggcaacttgctccgccctccctacgaacggccggaacttcctacttgtctatatgtcatcggcctgaccggcatctccggttctggaaagtcttcaatcgcccagagactaaagggtctcggggcctttgttatcgatagcgatcatctgggacatcgggcctatgctccagggggtccagcgtaccagcctgtggtcgaggctttcggcactgatatcttacacaaagatggcataatcaaccgtaaagtgctgggaagtagagtgttcgggaacaaaaagcagcttaagatactgactgacatcatgtggccgatcatcgccaagctggctagggaagagatggatcgtgctgttgccgaaggaaaaagagtttgcgtgattgatgctgccgtgctactggaagcagggtggcagaatctggtgcacgaggtgtggaccgctgttattccagagaccgaagcagtgcgacggattgtggagcgggacggtctgagcgaagcggccgcccagagccgcttacagagccagatgtcaggacagcagctggtcgagcagtctcacgtggtattgagtacgctctgggagcctcacatcacgcaaaggcaagtcgagaaggcatgggccctgttgcagaagagaatacctaaaacccaccaagccttggactag

SEQ ID NO: 183292 - DNA, 528 bp, synthetic construct
  misc_feature 1..528: note = Description of Artificial Sequence: Synthetic coding sequence
  source 1..528: mol_type = other DNA
atggccgtgttccggagcggcctgctggtgctgaccacccccctggcatcactggcgccccgcttagcaagcatactgacatccgcagctagactcgtgaatcatactctctatgtgcatttgcagccaggcatgtcactggagggaccagcccagcctcagtcctcccctgtacaggccacctttgaagtcctggactttattacccatctttccccctcgccagctcacctgtctcccgagagtcgacctcccgcccgatcgcgggtggaccggttccccgacccgggctggaagcctgtgcagcccggacagaccgctgccagcgctctcagacatcaactgctgcaactgcttagcgcgaccggactgggcgcagccattttgaggttatgggatcgaaggtcagctcgaggggccccagggtgtcctctgactctccatgatcaggcttccttccctaggggcagagtctctaaagcggcaggtgcttggcttttgccttggcgctgtaggtggcacgtgtag

SEQ ID NO: 183293 - DNA, 810 bp, synthetic construct
  misc_feature 1..810: note = Description of Artificial Sequence: Synthetic coding sequence
  source 1..810: mol_type = other DNA
atggccatcaaccggttccggctggagaacgacctggaggagctggctctataccagattcagttgctgaaggatcttcgacacaccgaaaacgaagaggacaaggtgtctagtagctctttcaggcagagaatgctcggcaatctgctccggcccccatatgaaagacccgaattgcctacgtgcctctacgtgatcggcctgactggaatttcgggctccggtaagtcatcaatagcccagcggctcaagggattgggtgcgttcgtcattgactcggatcatctcggccaccgtgcatacgcgccggggggccccgcttaccagccagttgtggaggcctttggaactgatattctccacaaggacggaattattaatcgcaaagtactcgggagccgagtgtttggcaataagaagcagctcaagattctcaccgacatcatgtggcccattatcgccaaactggctcgcgaagaaatggatagagctgtggccgaaggaaaacgtgtgtgcgtcattgatgcggctgtcctactcgaggctggttggcaaaacttagttcacgaggtttggaccgcggtcattcccgaaaccgaagctgtcaggcggatcgtcgagcgagatggcctgagtgaggccgcagcacaatcaagactccagagccagatgtctggccagcagctcgtcgagcagagtcacgtggtgctttctacgctttgggagccacacatcactcagcgccaggtggaaaaggcgtgggccttactacaaaagagaatccccaaaacacatcaggctctggactag

SEQ ID NO: 183294 - DNA, 1782 bp, synthetic construct
  misc_feature 1..1782: note = Description of Artificial Sequence: Synthetic coding sequence
  source 1..1782: mol_type = other DNA
atgcggaccccccggctgcgggcccagccccggggcgccgtgtaccaagctcctagcccacctcccgcacccgtgggcttaggaagcatggccgttttccggagtggcctgctcgtgctgacgacacccttggcttctttggctccgagactagcctctattttaacctccgccgcacgactggttaatcatacgctgtacgtacacctgcagccggggatgtcattggaaggcccagcccaaccccagtcctctcccgtgcaggccaccttcgaagtcctcgacttcatcacccacttgtacgctggtgcggacgttcatcgacacttggatgtgcggattcttctgaccaacatccgcacaaaatccacttttttaccacctctgcctacaagcgtccagaatctcgcacatcccccagaggtggtgttaacggattttcagactcttgacggttcacagtataaccccgttaaacaacagttagtgcggtatgccactagctgttacagttgctgtccacgccttgccagtgtgttgctttacagtgattatggaatcggtgaagtcccagtggagccattagacgtcccactgccttctactattcgaccagcctcccccgttgcgggttcccccaaacagcccgttcgaggttattaccgcggtgctgtgggcgggacattcgatcgcctgcataatgcacataaagtactgttgagcgtggcctgtatactcgcacaggagcagcttgtggtgggggtcgcagacaaggatttgctgaagagtaagcttctaccggagctcctgcaaccctatactgagagagtggaacacctgtccgagtttctcgtcgacatcaagccctccctgactttcgatgtcataccgttgctagatccgtacgggcctgcaggctctgacccctccctcgagttcttagtggtttctgaggagacttatcgcggcggaatggccataaaccgtttcaggctcgagaacgatttggaggagctggccctttaccagattcagctattgaaggacctcagacacacggaaaatgaggaggacaaggtgagctccagtagtttccggcaacgcatgctgggcaatcttctgcgccccccttacgagagaccagaactcccaacctgtctttatgtcatcggcctgaccggcatctcaggatccggaaagagttcaatagcacagcggttgaaaggactcggtgccttcgttattgacagtgatcacctgggccaccgcgcgtatgcccccggaggccccgcgtaccagccggtggtggaggcatttggcacagacatcctgcataaagacggtatcataaatagaaaggtactcggcagtagggtattcggtaacaagaagcagctaaagatcctcaccgatatcatgtggcccatcattgccaagctggcacgagaggaaatggacagggctgtcgccgaaggcaaaagggtgtgtgttatcgatgcagctgtcctgctcgaagccgggtggcagaatttggtgcatgaggtgtggacagctgtcatccccgagaccgaggcagtgcggcgtatcgtggaaagagacggcttatccgaggccgccgcccagtccagactccagtcgcagatgtctggacagcaactggtcgaacagtcacatgtggttctgagtacgctgtgggagcctcacatcacgcagaggcaggtggagaaagcttgggccttactgcagaagagaatccctaagacccatcaggccctcgattag

SEQ ID NO: 183295 - DNA, 429 bp, synthetic construct
  misc_feature 1..429: note = Description of Artificial Sequence: Synthetic coding sequence
  source 1..429: mol_type = other DNA
atggccaccaagatcgacaaggaggcctgccgggccgcctacaacctcgtgcgagacgatggcagtgcagtaatatgggttactttcaaatatgacggtagcacaatagttccgggcgagcaaggtgcagagtatcaacattttatccagcagtgtaccgatgatgtaagactgtttgcattcgtcagattcactacgggggatgcaatgagcaagagaagcaaatttgcattgattacttggatcggggaaaatgtgtcggggctgcagagagccaaaaccggcaccgataaaaccttagttaaagaggtagtgcagaatttcgctaaggaatttgttatcagtgataggaaagaattggaagaagatttcattaagagcgagcttaagaaagctggaggtgcaaactatgacgcccagactgagtag

SEQ ID NO: 183296 - DNA, 1731 bp, synthetic construct
  misc_feature 1..1731: note = Description of Artificial Sequence: Synthetic coding sequence
  source 1..1731: mol_type = other DNA
atgcggggccccaacagcggcaccgagaagggccggctggtgatcccggaaaagcagggtttcgatttcttgtgtatgccagtgtttcacccacggtttaaacgtgagtttatacaggagcctgccaaaaatcgcccaggaccccagactcgatccgatttgctacttagcgggcgcgcgttcttgctccctctcaatcaggaagacaacaccaatctggcacgtgtgctgacgaaccacatccacactgggcatcactcctctatgttttggatgagggtgcctctggtggcaccagaggatctccgcgacgacattatagagaacgcccctaccacacacaccgaggagtatagtggggaggaaaagacttggatgtggtggcacaatttccgcacactttgtgactactcgaagcggatcgcggtggcactggagatcggtgccgatctgccctccaaccatgtcatagaccgctggctgggcgagccaataaaagccgccatcctgccgacaagtattttcctgactaacaagaaagggtttcctgtgctgtccaagatgcaccagcgcttgatcttccgactccttaagctcgaggtgcagttcataatcacaggtacaaaccatcattcagagaaggaattctgttcgtatctgcagtaccttgaatacctgtcccaaaaccgtccacctcccaatgcatatgaactcttcgccaagggctacgaagactacctccagtcacccttacagccattaatggataatctagagagccagacttatgaagtgttcgaaaaagaccccattaagtatagtcagtatcagcaggctatctacaagtgtttactggacagagtcccggaggaggaaaaagacacaaatgtccaagtgctaatggtgctcggtgccgggagaggtccgctggtaaacgcttctctgagagccgccaaacaggccgatagacggatcaagctctatgccgtcgagaagaacccgaacgctgtcgtaaccttggagaactggcagttcgaggagtgggggtctcaggtgaccgtggtgagcagtgacatgcgcgagtgggtcgcacccgaaaaagcagacattatcgtgtccgagctgcttggttcattcgccgacaacgaattgtcgccagagtgtctggacggtgcccagcacttcctgaaggatgatggtgtttctatacctggggagtacacaagctttctggcacctatttccagttcaaagctctacaacgaagtgcgcgcttgccgtgagaaagatcgcgatcccgaggcccagttcgagatgccctacgtggtgcgcctgcacaactttcaccagctaagcgcccctcagccttgtttcaccttctcacatccaaatagggacccaatgatcgacaataataggtactgcaccctcgaattcccggtggaggtcaataccgtgctccatggcttcgcaggctatttcgagaccgtgctctatcaggacattacgctgagtataagacccgagacacacagcccgggtatgttctcatggtttcccattctcttcccgatcaagcagccaattaccgttcgcgagggacaaactatatgcgtgaggttctggaggtgcagcaattctaagaaggtgtggtatgagtgggctgtgaccgcccccgtatgtagtgctatccataatcctaccgggagaagctacacaattggcctatag

SEQ ID NO: 183297 - DNA, 1206 bp, synthetic construct
  misc_feature 1..1206: note = Description of Artificial Sequence: Synthetic coding sequence
  source 1..1206: mol_type = other DNA
atgctgggcatcggcaccgagggcccccacgtgggcctggtgcaggcttccgaacaccccaaaatcgagttttatctgaaaaattttacatccgccaaagatgtactcttcgccataaaggaggtgggcttccgtgggggaaactccaataccgatatcacgctggagaagtatctgtttgtgatgcttaaacggagcgaaaaccagcagacatacctcatgaatgccgatgtggcggagagaatgagttccacaactgtcgatagtgaagagcgcctcctacggggaaaagcactgaagcacaccgcacagaagtttttcaccgtcgatgccggcgttaggaaggggattcctaaggtggtggtcgtgttcatcgatggctggccatctgatgatatcgaagaagccggaatcgtcgcacgagaatttggggtaaacgtctttatcgtttcagttgctaaacccatcccggaagagctcggaatggtccaagatgtcacatttgttgataaagccgtgtgtcggaacaatggttttttttcctaccatatgcccaattggtttggaaccactaaatacgttaagcccctagtgcagaagctctgtacacacgagcagatgatgtgttctaaaacatgctataattccgtgaacatcgcattcttaattgatggctcctcgtcagttggtgactcaaattttcggcttatgctggagttcgttagtaatattgctaaaactttcgagatctctgacattggtgccaagattgccgcagtgcaattcacatacgaccagcggaccgagttttctttcacagattactctaccaaggagaacgtcctggccgtaatcagaaacatcagatatatgtcaggcgggaccgccactggcgacgctattagttttaccgtgcggaacgtgtttggacctataagggagagcccaaataagaacttcctggtgatagtgaccgatggacaatcctatgatgacgtccagggcccagctgcagccgctcacgacgcagggataaccattttttctgtcggagtcgcatgggccccactggacgacttaaaagatatggctagcaaacccaaggaatcccatgcatttttcacacgggaattcaccggattagagccaattgtctccgatgtgattagaggcatctgccgtgacttcctggagtcccagcagtag

SEQ ID NO: 183298 - DNA, 1653 bp, synthetic construct
  misc_feature 1..1653: note = Description of Artificial Sequence: Synthetic coding sequence
  source 1..1653: mol_type = other DNA
atgagcgccgcctggatccccgccctgggcctgggcgtgtgcctgcttcttctgcccggccctgctggaagcgagggtgccgctccaatcgccataacctgcttcactagaggcttggacatacggaaggagaaggcagacgtgctgtgcccagggggttgcccactggaagaattttcggtatacgggaatatcgtgtatgcctccgtgagcagcatctgcggtgccgccgtgcacaggggggtgattagtaactcaggtggcccagtgcgggtgtacagccttcctggtagagagaactattcaagcgtcgacgccaatggtatccagagtcagatgctgagccgctggagtgcctcattcactgtgacaaaaggtaaaagcagtacccaggaggctactgggcaggcagtgtccacggctcacccgcctactggcaagaggcttaaaaaaacgccagagaaaaagaccggcaataaggattgcaaggcggacattgcctttttaatcgatggctcattcaatataggtcagcggcgcttcaacctgcagaaaaacttcgtgggcaaagtcgctcttatgcttggtataggcaccgaggggccccatgttggcctcgtgcaggcctctgaacatcccaagatcgagttctatctaaaaaatttcacctcagctaaggatgtgctgttcgctattaaggaggtcgggtttagaggcgggaattccaacactggcaaagcactgaagcacacagcgcaaaaattctttacggtcgacgccggtgtgcgcaaaggaattcccaaagtcgtagtggtgttcattgatggctggccctccgatgatattgaggaggccgggatagtcgcacgggagttcggggtcaacgtgtttatcgtgtctgtggctaaaccaatccccgaggaactcggtatggtacaagacgtgacattcgttgataaggcagtgtgtcgaaacaatgggttcttcagctaccacatgccaaactggttcgggaccacaaaatatgtcaaacccctagtgcagaaactgtgcacccacgaacaaatgatgtgttctaagacttgctacaacagtgtaaacatagcctttcttatcgacggttcctcctccgtaggagacagtaattttcgactaatgctggagttcgtgagtaatatcgcgaaaacttttgagatctctgacattggggcgaaaatcgcagccgtgcaattcacctacgaccagcggaccgaatttagctttacagattactccacgaaagaaaatgtcctcgcagtcataaggaacatccgttatatgtctggcggaaccgctaccggcgatgctatttcattcactgttagaaatgtgtttggtcccatccgtgagtcgccgaataaaaactttctagtgatcgtcacagatggacagtcatacgacgacgtgcagggtcctgcagccgccgcccatgacgccggtatcacaatatttagcgtaggtgtggcatgggccccactggacgatctgaaggacatggcctctaaacccaaggagtcacatgctttctttactagggaattcacaggattagagccaattgtgtctgatgtcatcagagggatttgtcgcgacttcctggagtcccaacagtag

SEQ ID NO: 183299 - DNA, 732 bp, synthetic construct
  misc_feature 1..732: note = Description of Artificial Sequence: Synthetic coding sequence
  source 1..732: mol_type = other DNA
atgctgagccggtggagcgccagcttcaccgtgaccaagggcaagagttccacccaggaggcgactggacaagctgtctctacagcccatccgccaacggggaaaaggctgaaaaagacacccgagaaaaagactggcaacaaagactgcaaggcagacatcgcatttctgatcgacggctcgtttaatatagggcagagacgatttaatctgcagaaaaactttgtagggaaggttgccctgatgctggggattggcacagaaggcccccacgttggacttgtgcaagcctcagagcatcccaagatagagttttacctaaaaaacttcacctctgcgaaggatgtgctgtttgccattaaggaggttggtttccggggaggtaactcaaacaccggaaaggccctgaaacacacagcacagaagttttttaccgtggacgcgggagttcgcaaaggaatccctaaagtggtggttgtgtttatcgacggctggccttctgacgatatcgaggaagccggcatcgttgccagggagttcggggtcaacgtgttcatcgtgagcgtagccaaacctataccagaggagcttggaatggtgcaagacgtgacatttgtcgataaagcagtgtgtaggaacaatggcttcttttcttatcacatgccaaattggtttgggactaccaagtatgtcagcttatggtatcggagttgcgccctcatgaataaatag

SEQ ID NO: 183300 - DNA, 1278 bp, synthetic construct
  misc_feature 1..1278: note = Description of Artificial Sequence: Synthetic coding sequence
  source 1..1278: mol_type = other DNA
atgggcccccggcggctgctgctggtggccgcctgcttcagcctgtgtggacccttgctgtcggcaaggacacgcgccaggaggcctgaaagcaaggcaaccaatgctacactcgatccacgatccttcctgctcagaaatccaaacgataaatatgaacctttttgggaggacgaagagaagaacgaaagtgggctgaccgaatataggttagtttcaataaacaaatcctctccactgcaaaagcagctgcctgcttttatctccgaagatgcttcaggctacctgacatcatcatggctgacccttttcgttccatctgtttatactggagtttttgtagtatccttgcccctcaatattatggccatcgtggtgttcatcctgaaaatgaaagtaaaaaagcctgctgttgtgtatatgctgcatctggctacagcagacgtcctgttcgtctctgtgctgccatttaagattagctactatttctcaggctccgactggcagttcggctccgagctgtgtcgattcgtcacggccgcattctactgcaacatgtatgcgagtatattgctgatgaccgtcatttcgatcgacaggttcttggctgtggtatatccaatgcagagtctgtcttggcggacattaggccgcgctagttttacgtgtcttgccatctgggccctggccattgctggcgtggtgcctcttttgctcaaagagcagaccatccaggttccagggctgaacatcaccacatgccacgacgtgctaaacgagaccctgctggaaggctactatgcatattatttctctgcgttcagcgccgtgttcttttttgtgcctctgatcatttcgacggtttgctatgtgagtatcattcgctgtctgagcagcagtgcagtggcaaacagaagtaaaaagtctagggcactcttccttagcgcagccgtgttctgcatctttatcatttgtttcggaccgaccaatgttctgctgatcgcacattacagcttcctgtcacacactagtactactgaagcagcatacttcgcctacctactgtgcgtgtgcgtcagttctatttcatgttgtattgacccccttatttactactatgccagttccgaatgtcagaggtacgtgtactccatcctgtgttgcaaagaaagcagcgatccttcttcttacaattcatcaggtcagctaatggcttccaagatggacacctgtagttctaacctgaacaacagtatctacaagaagctgctgacttag

SEQ ID NO: 183301 - DNA, 1194 bp, synthetic construct
  misc_feature 1..1194: note = Description of Artificial Sequence: Synthetic coding sequence
  source 1..1194: mol_type = other DNA
atgcggagccccagcgccgcctggctgctgggcgccgccatcctgctcgccgcctctctttcctgttcaggcaccatccagggaacgagccgcagttctaaaggaagatctttaatcggcaaagtggatgggacgtctcacgtcacaggaaaaggcgtcactgttgaaaccgtgttctcagtcgatgagttcagcgcgagcgtgctcaccgggaagcttactacggtgttccttcctatcgtctatactatagttttcgttgtcggactgcctagcaacggtatggctctttgggtgtttctttttaggaccaagaagaagcaccccgctgtgatctatatggcgaacctggcacttgccgacttgctcagtgtgatatggtttcccctcaagatcgcctatcacattcacggtaacaattggatttatggggaggccctatgcaatgttctcattgggtttttttacggtaacatgtactgctcaatactgtttatgacttgcctctctgtccagcgatattgggtgatcgtcaaccctatgggtcacagtcggaagaaagccaatattgcaattgggatttccctggccatctggctccttatcttgctggtcacgatcccactgtatgtggtcaaacagaccatttttattcctgccctcaacatcacaacctgccatgatgtgttgcctgaacagctgctggtgggtgacatgttcaactacttcctcagtctcgcaattggtgtgttcctttttccagcctttctgaccgcctcggcctacgtattgatgattagaatgctgcgctcctctgccatggatgagaatagtgagaaaaagcgcaagcgggcgattaagctgatcgtgacagtgctcgctatgtaccttatttgtttcacaccctcaaatctgcttctggtggtccactatttcctaataaagagccaggggcaaagtcacgtgtacgcattatacattgttgccctttgtctatctaccctgaactcttgtattgatccatttgtgtactattttgtgagccatgacttccgggatcatgcaaaaaatgccctcctctgcaggtctgtgaggactgtgaaacagatgcaggtgtctcttacaagcaagaagcactctaggaagtcatcatcttacagttcctcttctaccacagtgaaaacaagttattag

SEQ ID NO: 183302 - DNA, 1125 bp, synthetic construct
  misc_feature 1..1125: note = Description of Artificial Sequence: Synthetic coding sequence
  source 1..1125: mol_type = other DNA
atgaaggccctgatcttcgccgccgccggcctgctgctgctgctgcctaccttttgtcagagtggaatggagaacgataccaacaaccttgccaaacctaccctgcccatcaaaacctttagaggcgctcctcccaacagcttcgaagagtttccctttagcgccctcgagggctggactggcgcaaccatcaccgtgaaaataaagtgccccgaggagagcgcctctcatctgcacgtaaaaaatgccactatgggctacctcacctccagcctgtctacaaaattgatacccgctatttaccttctcgtttttgtggttggtgtgccggccaacgccgtgacactctggatgctgttcttccgaacgcgatctatatgtaccaccgtcttttacaccaatctggctattgccgactttcttttttgcgttactttgccttttaaaatagcctaccatctgaatgggaataactgggtgttcggagaggtgctttgtcgggcaactacagtgattttctatgggaatatgtactgttccatcttgctgctcgcatgcatttctatcaataggtacctggctattgtccatcccttcacctaccggggcctgcccaagcatacctatgcgctcgttacgtgtgggcttgtgtgggcaactgtgttcctctacatgctgcctttcttcatccttaagcaggagtactatctagtgcagccggacataactacatgccatgatgtgcacaacacttgcgagtcatcctcgccgttccagttatattactttatcagcctagccttttttggcttcctgatcccattcgtactcattatctactgttatgccgccataatacggactctgaacgcctacgatcacaggtggttgtggtacgtgaaagcatcccttcttatcttagttatcttcactatctgtttcgcaccatctaacattattctcataatccatcatgctaattactactataacaacacggatggtctgtactttatctacctaatcgcactttgcctgggaagcctgaacagctgtctggatccttttctttacttcctgatgagtaagacacggaaccacagcactgcctacctgaccaagtag

SEQ ID NO: 183303 - DNA, 1059 bp, synthetic construct
  misc_feature 1..1059: note = Description of Artificial Sequence: Synthetic coding sequence
  source 1..1059: mol_type = other DNA
atggagaacgacaccaacaacctggccaagcccaccctgcccatcaagacttttaggggggccccgccaaatagctttgaggagtttcccttcagtgctctagaaggctggaccggtgctacaattacagtgaaaataaaatgccctgaggaatccgcaagccatcttcatgtaaaaaatgctacgatgggttacttgacctcctccctttcaacgaaacttataccagctatttacctgctggtttttgtcgtgggggttcctgccaacgctgttacactgtggatgttgttcttccgcactcgatccatctgcaccactgtgttctacaccaacctcgccatcgctgactttctgttttgcgttacactgccattcaaaattgcctatcacctaaacggtaacaactgggtttttggtgaggttctgtgccgcgctaccacagtcatcttctatggcaatatgtactgctccatcctcctcctggcctgtattagcattaaccgttacctggcgatcgtgcacccattcacctatagagggttgccaaagcacacatatgccctcgtgacgtgtggcctcgtctgggctaccgtgtttctgtacatgcttccatttttcattttaaagcaggaatactatctggtgcagcccgacatcacaacatgtcacgacgtgcacaatacgtgtgagagcagttcacctttccagctgtactactttattagtctggctttcttcggattcctgataccattcgtgctgataatctattgctacgcagctattatacggacactgaatgcatacgaccatcgctggctgtggtacgtaaaagcatcactccttatccttgtcattttcacgatttgctttgctccctcaaatataatactgattattcaccacgcaaattattactacaataacacagacggcttgtacttcatctacctcattgctctgtgcctgggaagcctgaacagctgtttggatccattcttgtactttctgatgtccaagacacgtaaccactcaactgcctatcttacaaagtag

SEQ ID NO: 183304 - DNA, 1158 bp, synthetic construct
  misc_feature 1..1158: note = Description of Artificial Sequence: Synthetic coding sequence
  source 1..1158: mol_type = other DNA
atgtggggccggctgctgctgtggcccctggtgctgggcttcagcctctcaggcggaacacagacaccgtccgtatatgatgagagcgggtctactggcgggggggacgactcaactccctcaatattgcccgcccccagggggtatcccgggcaagtgtgtgcaaatgacagtgacacgttagaattgccagactccagtcgcgccctgctcttgggttgggtgcccaccaggctcgtacccgccctctacggcctagtgttggtagtcggactgcccgcaaacggtctcgcgctgtgggtccttgctacacaggcacctcgtctcccctcaactatgctgctgatgaaccttgctgccgctgacctgttgctggcattggcactgcctccaaggatagcctaccacctcagaggccagagatggccctttggagaggctgcatgtaggctcgcaactgcggcattatacggccatatgtacgggtccgtcctattactcgccgccgtgtcccttgaccgatatcttgctttagtacacccattgagggcccgcgcactgcgagggaggcgtttagctctgggattatgtatggcggcttggctgatggccgcagccttagcgctacccctcaccctccaaaggcagacattcagacttgctaggtcagaccgggtactgtgtcacgatgccctgcccctggacgcacaggcgagtcactggcagccagccttcacttgtctggctttgctgggttgcttcctgccactattggccatgctcttgtgttacggagccaccttgcacaccctcgctgcctccggacgcagatatggccatgcactgaggttgacagccgttgtgctcgcatccgctgtcgcttttttcgtcccaagtaacttgctactgttactgcactattctgacccaagcccatcagcatggggcaacctatatggcgcttatgtccctagtctggccctctccacgctcaatagctgcgtcgatccattcatctactattacgtgtcggctgaattcagggataaggtgcgggcgggattgtttcagcggtctcccggcgacacagtggctagtaaggccagtgccgaaggaggttcaagggggatgggaacacacagcagcctactgcagtag

SEQ ID NO: 183305 - DNA, 1848 bp, synthetic construct
  misc_feature 1..1848: note = Description of Artificial Sequence: Synthetic coding sequence
  source 1..1848: mol_type = other DNA
atgcgggccctgctgctgctgggcttcctgctggtgagcctggagagtaccttgagcatacccccctgggaagcaccgaaagagcacaaatacaaggccgaggagcatacagtagtactaaccgtgacgggcgagccttgccactttccatttcaataccatcggcaactttatcacaagtgtacacataagggcaggccagggcctcagccctggtgcgccactacccccaactttgatcaggaccaaagatgggggtactgtttggagccgaaaaaagtgaaggaccactgtagcaaacacagtccctgccagaagggcggaacgtgtgtgaacatgccaagcggaccacattgcctgtgtcctcaacacctgacaggcaaccactgccagaaggagaagtgcttcgagccgcagctactgagattttttcataaaaacgagatctggtacagaaccgaacaagcggccgtggcacggtgccaatgtaagggaccagacgctcattgtcagaggcttgcctcacaggcatgcaggaccaacccctgcttgcatggagggagatgcctggaggtggaaggtcaccggttatgtcactgcccagtgggttataccggagccttttgcgacgtggacactaaggcaagttgctacgatggcagagggctcagctatcgcggtttggcaagaacaaccttgtctggcgcgccttgccagccttgggcttccgaggccacttataggaatgtaactgcggagcaggctcggaattggggtctcggtggtcacgccttttgccgcaatccagataacgatatcagaccctggtgttttgtgttaaatcgagatcgcctctcttgggagtactgcgacctcgcacagtgtcaaacaccaacacaagctgctccaccgacccccgttagcccccgactgcacgtgccgttgatgcccgctcagcctgctccacctaaaccccagcctaccacacgcacgccaccccagagccagacccccggcgctctgcccgctaaacgcgaacagcccccatctttgacgagaaacgggcctctgtcttgcggacagaggctccggaaatccttgagtagcatgacccgggttgtgggcggcctggtggctctccgcggtgcccacccgtacatagcagccctatattgggggcatagtttctgcgcagggagcctgattgctccctgttgggtgttaaccgcagcgcactgtctccaggatcgccccgcaccggaggatctcacggtggtgctgggccaggagaggaggaaccatagctgcgagccatgtcagaccctggccgttagatcctatagattgcacgaagccttctctcctgtttcttaccagcacgacctcgccctgctccgactgcaggaggacgccgacggaagttgtgctcttctctcgccctacgtccagcctgtttgtttacctagcggtgccgccaggcccagcgaaacaactctgtgccaagtcgctggctggggacaccaattcgagggagctgaggaatatgcatccttcctgcaagaagcccaggtcccattcctgtcacttgagcgttgctccgcaccggatgtacatggaagcagcatactgcccggcatgttgtgtgctggctttctcgaaggggggacggatgcctgtcagggcgattccggcggcccgctggtgtgtgaagaccaagcggctgagcggcgcctgacactgcaggggatcatcagctggggttctggctgcggggaccggaataagccaggtgtctatactgacgtggcttattacctcgcttggattagggagcatacagtttcctag

SEQ ID NO: 183306 - DNA, 1986 bp, synthetic construct
  misc_feature 1..1986: note = Description of Artificial Sequence: Synthetic coding sequence
  source 1..1986: mol_type = other DNA
atgcggctgaagaacctgaccttcatcatcatcctgatcatcagcggcgaactttatgcagaggagaagccatgtgggttcccccacgtcgagaacggccggatcgctcaatactactatactttcaagagtttctacttcccaatgtcaatagacaaaaaactctctttcttttgtctcgccggctacaccacagaaagcggcagacaggaggaacagaccacatgtaccaccgagggatggtcccccgagccaagatgctttaaaaagtgcaccaaacccgaccttagtaatgggtatattagtgatgtcaaactgttgtacaagattcaggagaatatgagatacggttgtgcatccggatacaaaacaacagggggaaaagacgaggaagtcgtacagtgcctaagcgacggctggtcctcccagcctacctgtcgcaaagaacatgagacttgtctcgcccccgagctttacaatggtaattacagcacaacacaaaagacattcaaagtgaaagacaaggtacagtatgaatgcgcgacgggctactacacggcaggaggcaagaaaaccgaggaggtggagtgtcttacttacggctggagcctgacacccaagtgcactaagctgaaatgttccagcctcagactaattgagaacggttatttccatccagtgaaacaaacttacgaagaaggtgacgtagtacagttcttttgtcatgagaattattatctgagcggatcagatctaatacagtgctacaattttggctggtacccagagagtcccgtttgcgagggaaggagaaaccgctgcccacccccccccctgccaatcaattcaaagattcagactcacagtacgacttaccgccatggggagatagttcatattgagtgtgaactgaattttgaaattcatggtagcgcagaaattaggtgcgaagatggaaaatggacagagccccctaagtgcatcgaagggcaggaaaaggtcgcctgtgaagagccaccttttattgagaatggcgccgccaatttgcactcaaagatctattacaacggcgataaagtaacatacgcctgcaaatctggctatcttctgcacggaagtaacgaaatcacctgcaacaggggtaagtggacactgccccccgagtgcgtcgaaaataatgagaattgtaaacacccccctgtcgtgatgaatggtgcggttgccgatggcatcctggcgtcctacgctacaggtagtagtgtggaatacagatgtaatgaatattatcttctcaggggcagcaagatctcccgctgtgagcaggggaagtggtctagcccaccggtgtgtctggagccatgcacagtgaacgtggactatatgaacagaaacaacatcgagatgaaatggaagtacgaaggcaaggtgcttcacggggacctaatcgatttcgtgtgcaaacaggggtatgaccttagccctctgactcccctatctgagctaagcgtgcaatgtaatcgcggggaggtgaagtatcccctctgcacacggaaagagtcaaaagggatgtgtacctcaccgcctcttattaaacatggggtgataatatcctcgacagtggacacatacgaaaacggaagcagcgtcgagtatcggtgtttcgatcatcacttcttggaaggtagtcgggaggcatactgtctcgatggcatgtggaccacaccgccactttgcctggagccatgcactctgagctttacagagatggaaaagaataacctgctgctgaagtgggatttcgacaaccgtccacacatcctacatggggaatacattgagttcatatgtaggggggatacttatcccgcagagctatacataactgggtccatcctgcgaatgcagtgcgatcgggggcaattaaaataccccagatgtattcctcgccagtctaccctgtcataccaagagccacttagaacctag

SEQ ID NO: 183307 - DNA, 3675 bp, synthetic construct
  misc_feature 1..3675: note = Description of Artificial Sequence: Synthetic coding sequence
  source 1..3675: mol_type = other DNA
atgctgaccaagttcgagaccaagagcgcccgggtgaagggcctgagtttccatccaaagaggccttggattttaacatccttgcataacggcgtgattcagctgtgggactacagaatgtgcactcttatagataagtttgacgaacacgacgggccagtgagggggatcgacttccataagcaacaaccgttgttcgtatcaggaggggacgattacaaaattaaggtctggaattataaacttaggagatgcctctttactttactcgggcacctggactacatccgcactacattcttccaccacgaatacccatggatcttatccgccagtgacgaccaaaccattcgggtgtggaactggcagtccagaacttgcgtatgcgtgctgaccgggcacaatcactatgtgatgtgcgcacaatttcaccctactgaagacctggtggtctccgcctcacttgaccagacagtaagggtgtgggacatctctggcctgagaaagaagaatctaagtcccggggccgtcgagagtgacgtcagaggaatcacaggggtggaccttttcggtaccacagacgctgtggtgaaacacgtcctggagggccatgacaggggagtcaactgggcagcatttcatcccaccatgcctcttattgtgagtggcgctgatgatcgtcaagtcaaaatatggaggatgaacgagagcaaagcctgggaagtggatacttgtaggggacattataataatgtcagctgcgcggtgttccacccacgacaggagctgatcctgagcaactcagaggacaagtccatcagagtctgggatatgagcaagcgcacaggggttcagacctttcgaagggaccatgatcggttttgggtcctcgcagcccacccgaatttaaacctgtttgccgctggacatgatggaggaatgattgtttttaagctagagcgcgagcgccctgcctatgccgtccacggcaatatgctacactatgtgaaggatcgcttccttcgtcagctggatttcaatagttccaaggatgtagctgtgatgcaacttagatcaggttccaaatttcccgtgttcaacatgagttacaatcccgccgaaaatgcggttctgctctgcacacgcgccagcaatctggaaaatagtacatacgacttgtacactatcccaaaggacgccgattctcagaatcccgacgctcctgaggggaagcgcagtagcgggctcacggcagtgtgggttgccaggaatcgcttcgcagtgctggaccgaatgcactccctgctgatcaagaacttgaagaatgaaattaccaagaaagtccaggtacccaattgcgacgagattttctatgcgggtactggtaacctgcttttaagggatgcagactccattacactattcgacgtgcagcagaaaaggaccctcgcctctgtgaagatcagtaaagtgaaatacgtaatctggtcagcagatatgtcacatgttgccctgctggctaagcacgccatcgttatctgtaatcgtaagctggatgcattatgcaacatccatgagaatatcagagtcaaatccggcgcttgggatgagtctggcgttttcatatataccacatctaaccatattaagtatgcagtaaccacaggcgaccacggcattatccgcacactggatttgccaatttacgttacccgggtcaagggaaataatgtttactgcctagaccgcgaatgtcgaccgcgtgtgctgacgatcgacccgacggagtttaaatttaagctggccttgatcaaccggaagtacgatgaagtcctacatatggttcgcaacgctaaactggtgggacaatctattattgcctacctacagaaaaaaggataccctgaagtggccttgcatttcgttaaggatgagaagacgcggttctcactggcgctggagtgcggcaacatcgaaatagccctcgaggctgcaaaagccctagacgataaaaattgttgggagaagctgggggaagtagcactgcttcagggaaatcaccaaatcgttgagatgtgttaccagaggacaaaaaatttcgacaagctttctttcctgtacctaatcactggcaacctggaaaagctgcgaaaaatgatgaagatagcggagattagaaaggacatgtccgggcactatcagaacgccctttatcttggcgatgtctccgagagagtgaggatcctgaagaattgtgggcagaagagcctcgcctatctgacagctgccacgcacggcctagatgaagaggctgaatcactcaaagagaccttcgatcctgaaaaggagactattccggatattgatcccaacgctaagcttttgcagcccccagcaccgattatgcctctcgataccaactggccactgctaaccgtcagtaagggtttttttgagggcactattgccagcaagggaaaggggggtgcactggcggcagacatcgacattgatacggtcgggaccgaaggatggggggaggacgcagagctccagctggatgaagacggatttgtggaggctacagagggtctcggtgacgacgccctcggcaagggccaagaagagggtggtggttgggacgttgaggaggacctggagttaccccctgaattggatattagtcccggtgccgctgggggcgcagaagacgggttttttgtacctccaaccaagggtacaagtccaactcaaatatggtgtaacaatagccagctgcccgtggaccatatcctcgctggctctttcgaaactgcaatgcgtctgctccacgatcaggttggggtgattcagttcgggccctacaaacagttgttcttgcagacatacgcccggggtcgtacgacataccaagctttgccctgcctgccctccatgtacggatatcccaatcgcaattggaaggatgcaggcctcaaaaacggagtcccagcggttggtctgaaactgaatgatctgatccagcggcttcagctgtgctaccagctaaccaccgtgggtaagtttgaagaggccgtggagaaattcaggtctattctgctgtctgtcccactgttggtggtggacaataagcaggagattgcggaggcccagcaattgattacaatctgccgcgaatatattgtgggactgagcgtggagaccgaacgtaaaaagcttccaaaggagaccctcgaacaacagaagcgaatctgcgaaatggctgcgtacttcacgcattctaatctccagccggtccatatgattttagtacttcggacagccctgaacttgttctttaaactgaagaatttcaagactgcggccacctttgcacgccggttgttagagctggggcccaaacccgaggttgcacagcagacaagaaagatcttaagcgcatgtgaaaagaacccaacagacgcataccagttaaattatgacatgcacaatccttttgatatttgcgccgcatcttaccgcccgatctatcgcggaaaaccagtggaaaagtgcccactatccggagcctgctattctccagagttcaagggacagatttgtagagtcactaccgtcaccgagatagggaaggatgtaatcgggctacgtattagcccactgcagtttaggtag

SEQ ID NO: 183308 - DNA, 3702 bp, synthetic construct
  misc_feature 1..3702: note = Description of Artificial Sequence: Synthetic coding sequence
  source 1..3702: mol_type = other DNA
atgctgaccaagttcgagaccaagagcgcccgggtgaagggcctgtcctttcaccccaagcggccatggatcctcacctcattgcacaacggcgtgattcagctgtgggactaccgtatgtgtacactgatcgacaaatttgatgagcatgatggtcctgttcgcgggattgattttcacaaacagcaacccctgttcgtgtccggcggagacgattacaagatcaaagtgtggaattataagttgcgtaggtgtcttttcactctcctggggcacctcgactacataagaacaacgtttttccaccatgaatatccttggatactgagcgcttccgatgatcaaaccatcagggtgtggaactggcagtcccgtacttgtgtgtgtgtgctgacaggacacaatcactacgtgatgtgtgctcagttccaccccaccgaggacttggtggtaagcgctagccttgaccagaccgtcagagtgtgggatatttcaggattgaggaagaaaaatctgtctccaggagcggtagagagtgacgtgcgcggaattacaggggtcgacctcttcggtactactgacgcggtggtgaaacatgtattggaaggccacgacagaggagttaactgggctgcatttcatcccaccatgcctttaatcgtgagtggggctgatgatcggcaggtcaagatctggaggatgaacgagtccaaggcatgggaagttgacacttgcagagggcattacaacaacgtatcctgcgcagtattccacccgcgacaggagttgattctgtccaacagcgaggataaaagcattcgcgtatgggatatgtcaaaaaggactggtgtacagacctttcgcagagatcacgatcgtttctgggttctggcagcccaccctaaccttaatctttttgccgcagggcatgatggagggatgatagtctttaagcttgagagggaacggccagcttatgccgtgcatggaaatatgctccattacgtgaaggatagatttctccggcagctggacttcaactcctcgaaagacgtggccgtgatgcagttgcggtcaggatccaaatttcccgtgttcaatatgagctacaaccctgcggagaatgccgtgctcctgtgtacccgggcatctaatctggagaacagtacctatgatttgtacaccatccccaaggacgcagactctcagaacccagatgcaccggagggtaaaaggtcaagcggcttgactgccgtttgggttgcgagaaatcgattcgctgttttggataggatgcacagcctgctgattaagaaccttaaaaacgagatcactaagaaagtgcaggtccctaattgcgacgagatcttctatgccgggaccggcaatcttcttctgcgtgatgccgacagcattaccctgtttgatgttcagcagaaacgcaccctggcttccgtgaagatctcaaaggttaagtatgttatctggtcggctgatatgtcccacgtggcactgctcgcgaaacacgaacatagttgcccgttacccttgacagccatagttatctgcaatcggaagcttgatgccctgtgtaacattcatgagaacatacgcgtgaagtctggggcctgggatgagtctggcgttttcatttacaccacctccaatcatataaagtatgccgtgaccactggggatcatgggatcatccggaccctcgacctgcccatttacgtgactagagttaaggggaacaacgtatactgtctggatagagaatgccgtcccagagtgctgaccatcgatcctaccgagtttaaattcaagctggctcttatcaatcgaaaatacgatgaggtcctgcacatggttcggaacgcgaagctggtcggacagagcatcattgcctacctccagaagaaaggctaccccgaggtcgctttacattttgttaaggatgaaaagacgagattctccctggccttagaatgtggcaatattgagattgcactggaggctgctaaggcactggatgataaaaattgttgggaaaagctgggagaggtggccctgttgcagggcaatcaccaaatagtggagatgtgctatcagcggaccaagaacttcgacaaactgtcattcctctatttaattacagggaatttagagaagcttagaaagatgatgaaaattgccgagattcggaaggacatgagtggacactaccagaacgccctgtacctcggggacgtgtccgaacgtgtacggatcttaaagaactgtggtcagaagtctctggcatacctcacagcggccacccatggcttggatgaggaagcagagtctctcaaagagacttttgaccccgagaaagagacaattcccgacatagaccctaacgccaagctgctgcagcctccggcgccaattatgccgttagataccaactggcccttgttgaccgtaagtaagggtttttttgaaggaaccatagcaagtaagggcaaaggaggagctctggctgctgatatcgatatcgacactgtggggacagagggatggggagaggatgctgagcttcaactagatgaagacggattcgtcgaggccaccgaaggactgggtgatgatgccctggggaaaggacaggaggaaggcggaggctgggacgttgaagaggatctcgaactgccccctgagctcgatatctctcccggggcagctgggggtgcagaggacggctttttcgtgccccccactaaaggcactagccccactcaaatctggtgcaataacagccaattaccggtcgaccatattctcgctgggtcatttgagaccgccatgcgcctgttacatgaccaggtgggtgttatacagttcggcccctacaagcaactcttcttacagacctacgcacgggggcgtacaacataccaggctcttccttgcctgcccagcatgtacggttaccccaaccgaaattggaaagacgcgggtctgaaaaatggtgtcccggcagttggcctgaaattaaacgatctgattcagcgcctgcaactttgttatcagctcaccactgtgggaaaattcgaggaggctgtagagaaattccggagcatcctgttatcagtcccactcctggtcgtcgacaacaaacaggaaattgccgaggcacagcagttaatcacaatctgcagagagtacatcgtaggcctttccgtggagactgagcgaaaaaaattgccaaaggaaaccctagaacaacaaaagcggatctgtgagatggccgcttactttacacacagcaacctgcagcccgtgcatatgatcctggtcttacgcacagcactcaatctcttctttaagctgaagaatttcaaaacagccgctacgttcgctcgcaggttgcttgaattgggacctaaacctgaggtggctcagcagaccagaaaaatcctcagcgcatgtgaaaaaaacccgactgacgcctaccagctgaattatgacatgcataacccctttgacatttgcgccgctagctatagacccatttaccggggcaagccagtggaaaaatgtcctcttagcggtgcctgctattcacccgagtttaagggccagatctgtcgtgtcaccactgtgacagagataggaaaggacgttataggactgaggatcagtccactgcaatttcgctag

SEQ ID NO: 183309 - DNA, 2862 bp, synthetic construct
  misc_feature 1..2862: note = Description of Artificial Sequence: Synthetic coding sequence
  source 1..2862: mol_type = other DNA
atgaccgccgccgagaacgtgtgctacaccctgatcaacgtgcccatggattccgaacccccaagcgaaatctcgcttaaaaatgatctcgaaaaaggagacgtcaaatcaaagaccgaagccttaaaaaaggttatcattatgatcctgaatggcgaaaaactccctggactgttgatgactattattagatttgtcctgccgttacaggatcacacaatcaaaaagttgctcttagtgttttgggagatagtgccgaagaccacccccgacggcagactgctgcatgaaatgatcttggtctgcgatgcttatagaaaggatttgcaacatcctaacgaattcattaggggttctacactacgttttctgtgcaaactgaaagaagcggaattactggagccattaatgccagcgattagggcctgtttagagcaccggcacagctatgtgagaaggaatgctgtgctggctatttacacaatctacagaaatttcgaacatctgattcccgatgccccggaattaatccacgatttcctcgtcaacgaaaaagacgcttcttgtaaacgcaacgccttcatgatgcttatacacgccgaccaggacagagctctggattatctgtcaacctgtattgatcaggtgcagaccttcggagatattttacagctggtgattgtggagttaatctataaagtctgccacgctaacccttcagagagagcccggtttatcagatgtatctataacctgctgcaatcgtcatctccagccgtcaaatacgaggccgctggcaccctggttaccctgagctccgcacctacagcaatcaaggctgcagcgcagtgttacatcgacttgatcatcaaagaatcagataacaatgtgaagttaatcgtgctcgacagattaattgaattgaaagaacaccccgctcacgagcgggtgttacaagacttagttatggatatcctgagagtgctttctactcctgacctggaagtgaggaagaagaccctgcaactcgctcttgatttagtgagctctaggaatgttgaggaactagtgatcgtcttgaagaaagaggttatcaagacaaataatgtctcggagcatgaggacactgacaaatatcgccagctgctggtacggacgctacatagctgctctgttcgcttccccgacatggccgctaatgtcattcctgtgctgatggagttcctcagtgataacaacgaggcagccgccgcggacgtgcttgaattcgtgcgggaagcaatacagcgtttcgacaatctgcggatgctgattgttgagaagatgctcgaggtttttcacgctattaaatccgtaaaaatttacagaggcgctctctggatcctgggcgagtattgtagtacaaaagaagacatacaaagtgtgatgacagagataagacggtcgctcggagaaattcccatcgtggagagcgaaataaagaaagaagccggcgaactaaagcccgaagaggaaatcacagtgggtcccgtgcagaaactagtaacggagatgggaacctacgctacccaaagcgccctgagcagctcacgtcctaccaaaaaagaagaggacaggccacctctacgcggctttctcctggacggggatttctttgtggcagccagtctcgccactacccttaccaagattgccctccggtacgtggctctagtgcaggaaaagaaaaaacagaactcgttcgtcgctgaggcgatgctcctgatggccactattttgcacctgggaaagagcagcttgcccaagaaaccaatcactgatgacgatgttgaccgtatcagcctctgccttaaggtgctgtctgaatgttcccccctcatgaatgatatttttaataaggagtgtaggcagtccctatctcatatgctaagtgcaaagcttgaagaggaaaagctttcccaaaaaaaagagtcagaaaagcggaatgtaaccgtacaaccagacgatcctattagttttatgcagctgactgctaaaaatgagatgaactgcaaagaggaccagtttcagctcagtctcctggccgccatgggcaacactcaacggaaagaagccgctgatccgctcgcaagcaagctaaataaggtcacccagctgaccggcttctccgacccagtatatgctgaagcttatgttcatgtgaaccagtacgatatagtcctagatgtactcgtagtgaaccagacctcagatacgctgcaaaattgcaccctcgaactggctacactgggtgatctgaaactggttgaaaagccgagcccactgaccctggcaccacacgactttgctaacatcaaggccaatgttaaggtggctagcacggaaaacggtatcatctttggcaatattgtgtacgatgtatcaggagcggccagcgaccggaactgtgtggtgctctcagatatccatattgacatcatggattatattcaacccgctacttgcactgacgccgagtttcgtcagatgtgggccgagttcgagtgggagaacaaggtgaccgtcaacactaatatggtggacctgaacgactatctccagcacatcctcaaaagcactaacatgaagtgtctgacccccgaaaaggcgctgagcggctactgcggattcatggccgctaatctctatgcccgaagtatctttggtgaagacgcgctagcaaatgtttccatcgagaagcctattcatcaaggccccgacgccgcagtcactgggcacatccggatcagagcaaagtctcagggaatggctctgtcactaggcgataagattaacctgtcacaaaaaaagacaagcatttag

SEQ ID NO: 183310 - DNA, 2862 bp, synthetic construct
  misc_feature 1..2862: note = Description of Artificial Sequence: Synthetic coding sequence
  source 1..2862: mol_type = other DNA
atgaccgccgccgagaacgtgtgctacaccctgatcaacgtgcccatggacagtgaacccccctccgaaatttccctgaagaatgatctggaaaaaggcgatgttaaaagtaaaactgaagcacttaaaaaggtcataatcatgatcctcaacggagagaaactcccagggcttctgatgaccattattaggttcgtgcttcccttacaggatcataccataaaaaaacttctcttggtcttttgggagatcgtgccgaagacaacccctgatggcagattgttgcacgagatgattttggtgtgcgatgcttaccgcaaggacctccagcaccctaatgagttcattagaggtagcacactaaggttcctttgcaaactgaaggaggctgaactgctggagccactcatgccagcgataagggcctgtctcgaacatcgtcactcctacgtgagaaggaacgcagtattagcaatatatactatctatcgcaactttgagcatctgattcctgacgcccctgagttaattcacgactttctggtgaatgaaaaggatgcatcatgtaagcggaatgccttcatgatgctcatacatgccgaccaggacagggcgcttgactatctcagcacttgcatagatcaggtgcaaacattcggggatattctgcaactggtgatcgtggagcttatctataaggtctgccacgcgaatcccagcgaaagggctcgctttattcgatgtatttacaacctgttgcagagcagctcccccgcagtcaaatacgaggcagctggcactctcgtaactctctccagcgctccgacagctattaaagcagccgcccagtgttacatcgacctcatcattaaagaatcagataataacgtcaaacttatcgtgctggacaggctcatcgaactaaaagaacaccctgcccacgagcgtgtgttgcaggacttagtcatggacatcctgagggttctgagtacaccagacctggaagtgcgaaagaagactttacagctggctctggacctggtgtcctctcgcaatgtggaggaactcgtcattgtgcttaagaaagaggtgatcaaaaccaacaatgtctcagaacacgaggatacagataagtatagacagctgctggttcggacattacacagctgcagcgtgcgttttcctgatatggctgccaacgtaatccctgtcctgatggagttcctgtctgacaacaatgaagccgctgccgcagatgtactggagttcgtgagagaagcaatccagcggttcgataatctacgcatgcttatcgtggaaaagatgctggaagtgttccacgcaattaagtccgttaaaatctaccgcggcgctctctggatcctcggagaatactgctccacaaaggaggacatccagagcgtgatgacagagatccgccggagcttaggtgaaattcctattgtcgaatcagaaattaaaaaggaagctggcgagctgaagccggaagaagagattaccgtcggtcctgtgcagaagcttgtgacagaaatgggaacctacgccacacagtctgccctatccagtagccgacctaccaagaaggaagaggataggccccccctccgtggcttcctgcttgatggggattttttcgtcgctgcctccttggcgaccaccctgacaaagattgcacttcgctatgtggcactggtccaggaaaagaaaaaacagaacagcttcgtcgcagaggccatgttgttgatggctacaatcctccatttgggaaaatccagcctgcccaagaagcccataaccgatgatgacgtcgatcgcatcagtctgtgtttaaaggtcctctccgaatgtagccctctgatgaatgatatctttaacaaagagtgtcggcagagcttgagccacatgctgtcagcaaaactggaagaagagaagcttagccaaaaaaaggagtcagaaaagcgcaatgtgacagtccagcctgacgaccctatatcgttcatgcaactcaccgccaaaaacgagatgaattgtaaagaagaccagttccagctctctctgctggccgcaatggggaacacgcaacggaaggaggctgcagaccccctggcgtcaaaactgaataaggtgacgcaactaaccggtttttcagatccagtctatgcggaagcatatgtccacgttaaccagtacgacatagtcctggacgtacttgtggtgaaccagacaagcgacacactccagaactgcacactggagctcgccactctcggagacctcaagttggtcgagaagccgtccccgctgacactggcgcctcacgatttcgctaatattaaggccaacgtgaaggtggcctcaactgaaaacggtatcattttcggcaacattgtgtacgacgtctccggggccgcctcagacaggaactgtgtggtgctatcagacattcacatcgatataatggattacattcaacctgcaacctgtaccgacgctgaattccggcagatgtgggccgagtttgagtgggaaaataaagtgactgtgaacactaacatggtggatctgaatgattacctgcagcatatcttaaagagcacaaatatgaaatgccttacccccgaaaaagccctctccggctactgcggatttatggccgcaaatctgtacgcccgtagcatctttggcgaggacgccttggctaatgtctccatcgagaagcccatccatcagggtcctgacgccgccgtgaccggccacattagaattagggctaagtcccagggaatggcccttagcctgggcgacaagatcaacctaagtcagaaaaagacctctatttag

SEQ ID NO: 183311 - DNA, 2721 bp, synthetic construct
  misc_feature 1..2721: note = Description of Artificial Sequence: Synthetic coding sequence
  source 1..2721: mol_type = other DNA
atgcccctgcggctggacatcaagcggaagctgaccgcccggagcgaccgggttaagagtgttgatctacatcctaccgagccttggatgctcgcctctctttataatggatccgtgtgcgtctggaatcacgaaactcagactctggtgaagaccttcgaggtgtgtgacctgccagtgcgcgctgccaagttcgtggctaggaagaactgggtggtcacgggggcggacgacatgcagatccgggtgttcaactataacacactggaacgagtgcatatgttcgaagcccacagcgattatattaggtgtatcgctgtgcatcccacacagcctttcatactcacctcgtcggacgatatgctgatcaagctgtgggattgggacaaaaagtggtcctgtagtcaggtgtttgagggacacactcattacgtgatgcagatagtcatcaatcccaaggataacaatcaattcgcatctgccagcctcgaccgaaccatcaaggtgtggcaattggggagctcttcaccaaattttacattggagggtcatgagaagggagtgaactgcatagactattactccggaggagacaaaccatatctcatctccggtgcagatgacaggctggtaaaaatttgggactaccagaataagacctgtgtccagacgctggaagggcacgcccagaacgtgagctgcgcatccttccacccagagcttccaatcatcatcactggttccgaagacggcacagtccggatatggcatagcagcacctatcggcttgagtctaccctcaattatgggatggagcgtgtgtggtgcgtggcaagcctaagagggagcaacaacgtggctctgggctatgatgagggctccatcattgtgaaacttggcagagaagaacccgcaatgagtatggacgccaatgggaagattatttgggccaagcactccgaggtccagcaggcaaatttgaaagccatgggagacgcggagatcaaagacggtgagaggctacctctggccgtgaaagatatgggaagttgtgaaatatacccacaaacaatccagcacaatcctaacggtcggttcgtagtcgtgtgcggggacggagaatacatcatctataccgccatggcactaaggaataagtctttcggatcggcccaagagtttgcttgggcacacgactcatcggagtacgctattagagagtctaacagcattgtgaagatcttcaaaaacttcaaagagaagaaatcattcaagcctgactttggagccgaaagcatatatggtgggtttttgttaggagttaggtcagtgaatggcctcgccttctatgattgggacaatacagaactcattcgtcgcatcgaaattcagcccaaacacatcttctggtctgactctggtgagctcgtatgcatagcgactgaagagagttttttcattcttaaatatctctctgaaaaagtgttagccgcccaagagacgcatgagggtgttactgaagacgggatcgaagatgcctttgaggttcttggagagatccaggaaatcgtgaaaactggtctttgggttggggactgttttatatacacttccagtgtgaacaggctcaattattacgtcggaggtgagatcgtgaccatagcccatcttgacagaacaatgtatctgctgggatacataccaaaagacaatagactttatctgggcgataaagaactgaacatcatttcttatagtctcctggtatccgttctggagtaccagactgctgtgatgcgtcgtgatttttcaatggccgacaaggtcctgccaacaataccgaaagaacaacgaacccgggtggctcatttccttgaaaagcagggctttaaacagcaggctctgaccgtctccacagatccggagcacagatttgaactcgctttacagctgggggagctgaagatagcttatcagttggccgtggaggccgagagcgagcagaagtggaaacaactggccgagctcgctatctccaagtgccagtttggcctcgcccaagagtgcttacatcacgcccaggactacggtggcttgctactgctggctacagcgtcaggcaatgctaatatggtgaacaaactggcggagggcgcagagcgagatgggaagaacaatgttgcattcatgagctattttcttcaagggaaggtcgacgcctgtctggagctcctgattcgaactgggcgcctgccagaggccgcctttttggccagaacctacctgcctagccaggtcagccgcgtagtcaaactctggagagaaaacttatctaaagtgaatcagaaggccgctgaatcactcgccgatcccacagagtatgagaacctcttccccgggcttaaggaggcctttgttgttgaggaatgggtcaaagagactcacgccgatctgtggcccgccaagcagtacccactggttacacccaacgaagaacgcaacgtcatggaggagggcaaagactttcaaccatcccgtagcaccgcccaacaagaactcgatgggaagcccgcctcacccaccccggtgatagtcgcttctcacactgctaacaaggaagaaaagtcgcttttggaattagaggtggacctggacaacctggagctggaggatatcgataccaccgacattaacttggacgaggatatcttggatgactag

SEQ ID NO: 183312 - DNA, 2634 bp, synthetic construct
  misc_feature 1..2634: note = Description of Artificial Sequence: Synthetic coding sequence
  source 1..2634: mol_type = other DNA
atgctggccagcctgtacaacggcagcgtgtgcgtgtggaaccacgaaacccagacactggtcaagacctttgaagtctgcgatctgcctgtaagggcggctaagttcgtcgctagaaagaactgggtggtgacaggagctgacgatatgcagattcgggtgtttaactacaacactctagaacgagtgcatatgttcgaagcccactccgactacatccggtgtatagccgtccacccaacccaaccctttattcttacatcctccgacgacatgctgattaagttgtgggattgggacaagaaatggagttgtagccaggttttcgaagggcatacacactatgtgatgcagatcgttattaacccgaaagataataaccagtttgcatctgccagtctggacaggactatcaaagtatggcagttgggctcttcatcacccaatttcactctagaagggcatgagaaaggcgtcaactgtatagattattatagtggcggcgataagccttatttgatatccggagctgacgacagactggtcaagatctgggactatcaaaacaagacgtgcgtgcaaaccctggaaggccatgcccaaaacgtgagctgcgcctcatttcaccccgaattacccatcatcatcactggatctgaagatgggactgtgcggatctggcattcatccacttatcggctggaatccaccctaaattacggtatggaacgtgtatggtgcgtcgcttcactgagaggaagcaataacgtggctctgggctatgacgaaggatccatcatcgtaaagctgggccgggaagaaccagccatgtccatggatgctaatggcaaaatcatttgggctaagcattccgaagtccagcaggctaatctcaaagccatgggggacgccgaaatcaaggacggggagcgcctgcctctggccgttaaagacatgggttcctgcgaaatctacccacagaccatacagcacaatcccaacggccggttcgtggtggtttgtggagacggtgaatacatcatctacaccgcaatggctctgaggaataaaagcttcggatctgcacaggagtttgcatgggcccacgatagctctgagtacgccattagggaaagtaattccatcgtcaaaattttcaagaactttaaagagaagaagagcttcaaacccgattttggtgccgaatcaatctacgggggctttctgctgggcgtgcgatcagtgaatggcttagccttttacgattgggataacacagaactgattaggcgaatagaaattcagccaaaacatatcttttggagtgatagtggcgagctggtgtgtatagctaccgaagaatcatttttcatcttgaagtatctgagcgaaaaagtgctggccgcccaggaaacacacgagggcgtcaccgaggacggaatagaggacgccttcgaagtcttaggagagatccaggaaatcgtgaaaactggactgtgggttggggattgcttcatctatacttctagtgtcaataggcttaactactatgtgggtggggagatcgtgacgatcgcccacttggaccggactatgtacctgttaggatatatccccaaggacaaccgcttatacctgggagacaaggaactcaatatcatctcttactccctgttggttagcgtgctagaataccagacagccgtaatgcggcgggacttctccatggcggataaagttctgcccactatccccaaagagcaacgaacccgggtcgcccatttcctggagaagcagggcttcaagcagcaggccctgacggtgtctactgaccctgaacatagatttgagttggccctgcagctgggtgaattgaagattgcctaccagcttgctgtggaggcagaatcagagcagaaatggaaacagctggcagagctagccattagcaaatgccaatttgggttagcacaggagtgcttgcaccatgctcaagattacggcgggcttcttctacttgccactgccagtggtaatgcgaatatggtgaataagcttgctgaaggcgctgagagggatggcaaaaataacgttgcattcatgagctacttcttgcaaggaaaggtggatgcatgtctcgaactcctgattcgcaccggccgcttgccggaggctgcctttctcgctcgcacctatctacccagtcaggtgagccgcgtggtgaagctatggcgagagaacctctcaaaggtcaaccaaaaagcggccgaatcacttgccgaccccaccgaatatgagaacctgttccctgggttaaaagaagcatttgtggtggaagagtgggtgaaggagacccacgctgacctctggcctgccaagcagtatcccctggtcacaccaaacgaagaacgaaacgtgatggaggaaggcaaggactttcaaccctcacgctccaccgcccaacaggagctggatggcaagccagccagccccacccctgtcatagtggcatctcatacagccaataaagaggaaaaatccctgcttgagcttgaggtcgatctcgacaacctcgagctggaagatattgacactacagatatcaacctggacgaagacattctagacgattag

SEQ ID NO: 183313 - DNA, 927 bp, synthetic construct
  misc_feature 1..927: note = Description of Artificial Sequence: Synthetic coding sequence
  source 1..927: mol_type = other DNA
atggccccccccgcccccggccccgccagcggcggcagcggcgaggttgacgaattatttgatgtgaagaacgcgttttatattggttcgtaccagcaatgtattaacgaggcccagagagtcaagttgtcctcccccgagcgggacgtcgaacgtgacgtcttcctgtatagggcctatctcgctcagagaaaatttggggtagtgctggatgaaatcaagccttcatctgcaccagagctgcaggccgtgaggatgtttgcagattacctggcccacgagtcacggagagactccatcgtagcagagcttgatcgcgagatgtctagaagtgttgacgtcaccaatactacctttttgctgatggctgcttcgatttacctccatgaccagaaccccgatgccgcactgagggcacttcaccagggagattcattagagtgcaccgctatgaccgtccaaattttgttaaagctggatcggctggatctagcccgaaaagaactcaagcgcatgcaggatctggatgaggatgcgacacttacacagctagccaccgcatgggtgagtctggctacaggaggagagaagttgcaagatgcctattatattttccaagaaatggccgataagtgttcgcccacgcttctcctgctgaacggccaggctgcctgccacatggcacagggacggtgggaagctgcagaaggtttgctgcaggaggccctcgacaaagactcaggataccctgagacacttgtgaatctgattgtgctttcccaacatctggggaaaccacccgaggtcacaaaccggtacttatcgcagttaaaagacgcccatcgtagccaccccttcattaaagaatatcaggctaaagagaacgattttgatcggctagtactgcagtacgcccccagtgcctag

SEQ ID NO: 183314 - DNA, 771 bp, synthetic construct
  misc_feature 1..771: note = Description of Artificial Sequence: Synthetic coding sequence
  source 1..771: mol_type = other DNA
atggccccccccgcccccggccccgccagcggcggcagcggcgaggtcgatgagctgttcgatgtgaaaaacgcattctatatcggttcatatcagcagtgtattaatgaggcacagcgcgttaagctctctagtcctgagcgcgacgttgagcgcgacgtctttctttacagagcttacttggcccagcggaaatttggcgtggtgctagacgaaatcaaaccgagctcagctcctgaactccaggcagtgcggatgtttgccgactatcttgcccacgagagtcgccgagactcaattgtggctgagctagacagggagatgtcccgcagcgtggatgtgaccaacacaacattcctgctcatggctgcatccatatacttgcacgaccagaaccctgatgccgccctcagggcccttcatcaaggcgacagcctggagtgcactgcaatgacagtgcagattttgctgaagttagataggcttgacctagcccgtaaagagctcaagagaatgcaggatttggacgaagatgctactctcacacagctggcaaccgcttgggtgtcactcgccaccgactctgggtatcctgagaccctcgtcaacctgatcgttctctcccagcatctgggtaaaccccctgaggttactaaccgctatctgagccagctgaaggatgctcacagatcccacccttttatcaaagagtatcaggctaaagaaaatgacttcgaccggctagtcttgcaatacgccccttctgcctag

SEQ ID NO: 183315 - DNA, 774 bp, synthetic construct
  misc_feature 1..774: note = Description of Artificial Sequence: Synthetic coding sequence
  source 1..774: mol_type = other DNA
atggccccccccgcccccggccccgccagcggcggcagcggcgaggtcgatgaactgtttgacgtgaagaacgcgttctacatcgggtcttaccagcagtgcataaacgaggcacagagggttaagttgtcttcacccgagcgcgacgttgagagagatgtgtttctatatcgggcttacctcgcacaacggaagttcggcgtggtgctcgatgagatcaaaccaagctccgccccggagcttcaggccgttaggatgtttgccgactacttggcacatgagtccaggtccacggccatgactgttcagattctgctgaagctggacagactcgaccttgctcgaaaagagctcaagcgcatgcaagatttggatgaagacgctaccctgacgcagctcgcaaccgcctgggtgtcactcgcaaccggcggggagaagcttcaggacgcctactacatctttcaggagatggcagataagtgttcccccactctcttactgctcaacgggcaagctgcttgccatatggcccagggacggtgggaagccgccgagggtcttctccaagaggcactagacaaggactcaggctaccccgaaaccctggtgaacctgatcgttctgagtcagcatctggggaagcctccagaggtaaccaacagatatctgtctcagctgaaagacgcacacagaagtcacccttttatcaaagagtaccaggctaaagaaaacgatttcgaccggctggtcttgcagtacgcaccttcagcttag

SEQ ID NO: 183316 - DNA, 924 bp, synthetic construct
  misc_feature 1..924: note = Description of Artificial Sequence: Synthetic coding sequence
  source 1..924: mol_type = other DNA
atggccccccccgcccccgccggcctgcggggcagcggcgaggtggatgaattattcgacgtgaaaaatgccttctacattggctcctaccagcagtgcatcaacgaagctcagcgggtcaaactcagtagccctgagcgagacgtggaacgagatgtgtttttgtacagagcctacctggcccagcgaaagttcggcgtggtgctggatgaaattaaaccatcttctgccccagagctgcaggctgtgcggatgttcgcggactacctcgcccatgaatcaaggcgagactcaatcgttgctgaactcgaccgcgagatgagcagatccgtcgacgtgaccaacactaccttcttgctgatggcagcctctatttacttacatgatcagaaccctgatgccgccctcagggccttgcaccagggcgatagtctggaatgcaccgccatgacagtccaaatcttattgaaacttgacaggcttgacctggctaggaaagagcttaagaggatgcaggaccttgatgaggacgccactttgacccaacttgcgaccgcttgggtctctctggcgacggggggagaaaagcttcaggatgcttattatatattccaggaaatggcagacaaatgctcgcctacactcttgctgttaaacgggcaggccgcctgccacatggcacaaggacgctgggaggccgcagagggtctcctccaggaggccctggacaaggatagtggctatcctgagactctggtgaacttgatcgtgctgagtcagcacctaggcaaacccccggaagtgacaaatagatatctttcccagctgaaagacgctcatcgctcccatcctttcataaaggaataccaggccaaggagaatgacttcgaccgcttggtgctgcagtacgctccaagtgcctag

SEQ ID NO: 183317 - DNA, 741 bp, synthetic construct
  misc_feature 1..741: note = Description of Artificial Sequence: Synthetic coding sequence
  source 1..741: mol_type = other DNA
atgatcaagaagttcgacaagaaggacgaggagagcggcagcggctccaacccttttcagcacctcgagaaatccgccgtgctgcaggaggcgaggatatttaacgaaacacctatcaacccacgaagatgtctacatattctgactaagatcctatatctgcttaatcaaggggagcatttcggcaccacagaggcgactgaggctttcttcgcaatgaccagattgttccagagcaatgatcagacactgagacgcatgtgctatttgacgatcaaagagatggcaacaataagcgaagacgtaattatcgtaactagcagtctgacaaaggatatgactggtaaggaggatgtgtataggggcccagctattagggccctgtgcaggattaccgacgggacaatgcttcaggccatcgagcgttacatgaagcaggctatcgtggacaaggtgtcctctgtgtcctctagcgccctagtctctagcctccatatgatgaagatctcttacgatgtagttaaacggtggataaacgaagcccaggaggccgcctcctccgacaacattatggtccagtatcacgcgctgggggtcctgtaccatctaaggaaaaatgatcgtctggcagtgtcaaaaatgctgaacaagtttactaaatccggacttaagtcccagtttgcatattgtatgttgatcagaatcgctagcaggttgctcaaggagactgaggacgggtag

SEQ ID NO: 183318 - DNA, 468 bp, synthetic construct
  misc_feature 1..468: note = Description of Artificial Sequence: Synthetic coding sequence
  source 1..468: mol_type = other DNA
tgagccggcagcttcagctgcaccatgaagttcaccgtgcgggactgcgatccaaatacgggggtgccggacgaggatggatatgacgatgagtacgtactcgaggatctggaagtgacagtcagcgatcatatccagaaggtgttaaagcccaactttgctgctgcatgggaggaagtgggtgatacctttgaaaaggaggagacatttgcactgagttcaaccaagacactggaggaagctgttaataacatcataactttccttgggatgcagccgtgtgagcgctcggacaaggttcccgaaaataagaattcccattctttgtatttggcaggcatctttcgcggcggatacgacctgttggtacgttctcggctcgcccttgcagatggagtgacaatgcaggtcacggtaaggtctaaagaacgtactcccgtcgacgtgattctcgcgagcgtcggatag

SEQ ID NO: 183319 - DNA, 741 bp, synthetic construct
  misc_feature 1..741: note = Description of Artificial Sequence: Synthetic coding sequence
  source 1..741: mol_type = other DNA
atgatcaagaagttcgacaagaaggacgaggagagcggcagcggctcaaatccattccagcatctggagaagagcgccgtgcttcaggaggcccgaatcttcaatgaaacaccaatcaatcccagacgttgtctgcatattttgaccaagatcctgtatttacttaatcaaggcgaacatttcggaacaacggaggctaccgaagctttctttgccatgacgaggttgttccaatctaacgaccagaccctcaggaggatgtgctatcttaccataaaagaaatggccaccatttccgaggatgtcatcatcgtgaccagtagtctgactaaagatatgactggtaaggaagacgtttataggggccctgctattagagctttatgtcgaattactgacgggacaatgcttcaggcaattgaacgatacatgaaacaagccatcgtggacaaagtgagcagcgtctctagttcggccctggtaagcagcttgcacatgatgaaaatctcttacgacgtggtgaaaaggtggattaacgaagcccaagaagccgcttcctccgacaacatcatggtgcagtaccacgcgctgggagttttgtaccatttgcgaaagaatgacaggttggccgtgtcaaaaatgcttaacaaatttactaaaagcgggctgaagtcacagtttgcttactgcatgctgatcagaattgccagccgactacttaaagagacggaagatggatag

SEQ ID NO: 183320 - DNA, 1080 bp, synthetic construct
  misc_feature 1..1080: note = Description of Artificial Sequence: Synthetic coding sequence
  source 1..1080: mol_type = other DNA
atgtacttcaagcgggccgcccgggccttccccgtgctgctgaccggcgccggtaagacgactctgctaaattacatcctcaccgagcagcatagcaagcgcgtggcagtaatactaaatgagtttggagaagggtccgcccttgagaagtccttagccgtgtctcaggggggcgagctgtacgaagaatggctagaactacgtaacgggtgtttgtgttgcagcgtgaaggactccggcctcagagcaatcgagaacttaatgcaaaagaaggggaaatttgattatatattgcttgagacaacaggattggcagaccccggggctgttgcgtccatgttctgggtggatgccgagttgggaagcgatatatacttagatgggattataaccatcgtggactccaaatatggtctgaaacatctcaccgaggaaaagccggatggcctcattaatgaagctacacggcaggtggcattggctgatgctatattaatcaacaagaccgatctggtgcctgaggaggatgttaagaagctgcggacaactatcagaagcatcaatgggcttggtcagattttagagacacaaagaagcagagtcgatctgagcaacgtcctggaccttcacgccttcgattccctgagtggtatttctctgcagaagaaattacagcatgtacccggtacacagccacatctagatcagtctatcgtgacaattacatttgaggttccaggaaatgctaaggaggagcacctcaacatgtttattcagaacctgctgtgggagaaaaacgttcgtaataaagataatcattgcatggaagtaattagattaaaaggcctcgtctcaatcaaggacaagtcccagcaggtcattgtacagggagtgcacgagctgtatgatctcgaggagacaccggtgtcctggaaagatgacacagagcggacgaataggcttgtgctcctcgggagaaatcttgacaaagacattctgaagcagttgtttattgctaccgtgaccgagacagagaaacagtggaccacacgcttccaggaggaccaggtttgcacttag

SEQ ID NO: 183321 - DNA, 1188 bp, synthetic construct
  misc_feature 1..1188: note = Description of Artificial Sequence: Synthetic coding sequence
  source 1..1188: mol_type = other DNA
atgctgcccgccgtgggcagcgccgacgaggaggaggaccccgccgaagaggattgcccagagctcgtgcccatagaaaccacccaatctgaggaagaggagaagagtggcctgggtgccaaaattcccgtgaccatcatcactggatatctgggagcaggaaaaacaacactgctgaactacattctcaccgagcagcattccaagcgcgttgcagtgatccttaacgaatttggggaggggtccgcactcgaaaagagcctcgccgtatcccagggaggagaactgtatgaggagtggctggaactgagaaacgggtgcctatgttgtagtgtcaaagactcaggtctgagggcgattgaaaacctaatgcaaaaaaaaggaaaatttgactacatcctcctagaaactactggcttggctgaccccggggctgtggcctctatgttttgggtagatgccgagcttggctccgatatctacctcgacggaattatcaccatcgtcgacagtaaatatgggctcaagcacttaaccgaggaaaaaccggatggcttgattaacgaagcgacaaggcaggtggccctggcggacgccatcctaattaacaaaaccgatctagttcccgaagaggacgtgaagaagctccggactaccatcaggagcatcaatggcttggggcagattctggagacccagcgcagtcgtgtggacctgagcaacgtgctcgatcttcacgcatttgactcactaagtggtatttctcttcaaaagaaactgcagcatgtccccggcacacagcctcatttggaccaatcgattgtgacgatcaccttcgaggttccaggcaacgctaaagaagagcatctcaatatgtttattcagaatttactttgggagaaaaatgtaaggaacaaggacaatcactgtatggaggtgattaggttgaaaggacttgtttctatcaaagataagagtcagcaagtcattgtgcaaggcgtgcacgaactgtacgatctagaggagactccggtgtcctggaaggatgacaccgaaaggaccaatcgactggtgcttctgggacgaaatttggacaaggacatattgaaacagctcttcatagcaacggtgacggagactgagaagcagtggaccacccggttccaggaggaccaggtctgtacatag

SEQ ID NO: 183322 - DNA, 543 bp, synthetic construct
  misc_feature 1..543: note = Description of Artificial Sequence: Synthetic coding sequence
  source 1..543: mol_type = other DNA
atgctgcccgccgtgggcagcgccgacgaggaggaggaccccgccgaagaggattgtccagagctggttccgattgagacaacccagagtgaggaagaagagaagagcggccttggagccaaaatccctgttacgatcatcacaggatacctcggcgcaggcaagaccacgttgttgaactatatattaaccgaacagcattctaaacgtgtggccgtgattctaaacgagtttggcgaaggaagtgctcttgagaagtcactggcagtctcccaagggggagagctgtacgaggagtggttggaactaaggaacgggtgcttgtgctgttcggtgaaagactctggcctcagagctattgagaacctaatgcagaaaaaaggtaaatttgactatatcctgttagaaacgacgggactagccgatcccggagctgttgcttctatgttctgggtggacgccgagctggggtccgatatttatctagacggaatcatcacaattgtggactccaagtacggactcaaggttaagtatcattag

SEQ ID NO: 183323 - DNA, 1044 bp, synthetic construct
  misc_feature 1..1044: note = Description of Artificial Sequence: Synthetic coding sequence
  source 1..1044: mol_type = other DNA
atgctgcccgccgtgggcagcgccgacgaggaggaggaccccgccgaggaggactgccctgagcttgttccaatcgagaccactcaatccgaagaggaagagaagtccgggctgggagctaaaattccagttacaataatcaccgggtacctgggcgccggaaagacgacattactcaactacatcctgacagaacagcacagtaagcgcgttgccgtgattctgaacgaattcggtgaggggtccgcactggaaaagtccttggcagtgtcacagggaggtgaactgtatgaagagtggctcgaactccggaatgggtgcctttgttgttctgtgaaagacagtggattgagagcaatcgagaatctgatgcagaaaaaaggcaaatttgattatatcctgttggagaccacagggctcgccgacccgggggctgttgcctcaatgttttgggtcgatgctgagctgggctccgatatttatcttgatggcatcatcaccattgtagatagcaagtacggtctgaagcatctgaccgaagagaaacccgatggtctgattaatgaagctactcggtctataaatggcttagggcagattctcgagacccagaggagtagtcttcagaaaaaattgcagcacgttcctggcacgcagccccatctggaccagagcattgtcacgattacattcgaggttccaggcaacgcaaaggaggagcaccttaacatgtttatccagaacctgctgtgggagaaaaacgtcaggaataaagacaaccattgcatggaagttattcgtctgaagggattggtaagtattaaggataaaagtcagcaagtaatagttcaaggtgtgcacgagctctatgaccttgaagagacaccggtatcctggaaagatgataccgagaggacgaatcggctggtgctactagggcgaaatttagacaaagatatcttaaagcagctgtttatagccaccgtcaccgagacagagaaacaatggactacacggttccaggaagaccaggtctgtacatag

SEQ ID NO: 183324 - DNA, 753 bp, synthetic construct
  misc_feature 1..753: note = Description of Artificial Sequence: Synthetic coding sequence
  source 1..753: mol_type = other DNA
atgctgcccgccgtgggcagcgccgacgaggaggaggaccccgccgaagaggattgtccggagttagtacctattgaaactacgcagtctgaggaggaagagaagtctggcctcggggccaaaatccctgttaccattattacggggtatctcggtgccggaaaaacaaccctgctcaattatatcctgacagaacagcactcaaagagggtcgctgttatcctaaatgagttcggggaaggcagcgccctcgagaaaagtctggctgtgtctcagggcggtgaattatatgaagaatggctggaactacggaacgggtgtctgtgttgtagcgtgaaggattcggggctccgcgcaatcgagaatttgatgcagaaaaagggtaagttcgactacatcctattagaaacaactggtctggctgatccgggcgcggtagcctcaatgttctgggttgatgctgaactgggttctgacatctacctggatggaatcattaccatagtggattctaaatacggtttgaagcatcttacagaggaaaaacccgatggccttatcaatgaagccactagacaggtcgctctggcagatgctatactgattaataagaccgatctggtcccagaggaggacgttaaaaaactgcgtaccacgatccggtacgagatgatctcagtgctttcagcctacagatctatgctctatactcaaaatattttctacagtgactgctgtcccgtcgagacctag

SEQ ID NO: 183325 - DNA, 234 bp, synthetic construct
  misc_feature 1..234: note = Description of Artificial Sequence: Synthetic coding sequence
  source 1..234: mol_type = other DNA
atgtacttcaagcgggccgcccgggccttccccgtgctgctgaccggtgccggaaaaacaacattgttgaactacatcctcactgaacaacattcgaagagggtcgcagtgatcctgaacgaatttggagagggaagtgcattagagaagtcgctggccgtcagtcaaggcggcgaactgtatgaggaatggctggagctgaggaacggctgtctgtgttgtagcgtgaaatag

SEQ ID NO: 183326 - DNA, 342 bp, synthetic construct
  misc_feature 1..342: note = Description of Artificial Sequence: Synthetic coding sequence
  source 1..342: mol_type = other DNA
atgctgcccgccgtgggcagcgccgacgaggaggaggaccccgccgaggaggattgtcccgagcttgtgcctattgagactacccaaagcgaggaagaggagaaaagtggccttggggccaagattccggtgaccatcataacagggtatctgggcgcaggtaagacaacactcctcaattacattctgactgagcagcacagcaagcgcgtcgcggtgatactgaacgagtttggggaaggttcagcccttgaaaaaagtttggccgtttcgcagggcggcgagctgtacgaagagtggctggagctccgcaacggatgcctgtgttgttctgtgaagtag

SEQ ID NO: 183327 - DNA, 1131 bp, synthetic construct
  misc_feature 1..1131: note = Description of Artificial Sequence: Synthetic coding sequence
  source 1..1131: mol_type = other DNA
atgctgcccgccgtgggcagcgccgacgaggaggaggaccccgccgaagaagattgccccgaattggtgcccatcgagacaacccagagtgaggaggaggagaagtcgggcctgggggcaaagatccccgtgaccattatcacaggttatctgggagctggcaagacaacactgctgaattatatccttaccgagcagcacagtaagagggtggcagtgattttaaatgaattcggggaagggtctgcattagagaagtctctggccgtctcgcagggcggcgagctctacgaggaatggctagaactaaggaatggatgcctatgttgtagtgtgaaggattccgggctgcgggcaatcgaaaacctgatgcaaaagaagggcaagttcgactacattctgcttgagactacgggactcgccgaccctggcgctgtggcctctatgttctgggtcgacgcggaactaggttcagatatctatctggatgggattattacgattgtggatagcaagtatggcttgaagcacctgacagaagaaaagccggacggacttataaacgaggctaccaggcaagtcgcactagctgatgcgatcttgatcaacaaaaccgacctcgtacccgaagaagatgtgaaaaaactcagaaccaccatccgatcaattaacggacttgggcagatcctcgagactcagaggtcttctctccagaagaaactgcagcacgttcctggcacacagccccatctggatcagagtatcgtcaccatcacgttcgaagtgccgggaaacgcaaaggaagagcacttgaacatgtttatccaaaatctactgtgggagaaaaatgtgcgcaacaaggacaaccattgtatggaggtgatcagattgaaagggttggttagcatcaaggacaaatcccagcaggtgatcgtccagggcgtccacgaattgtacgacctggaggagacgcccgtgtcttggaaagacgatactgagaggaccaataggctggtgctgctggggcgcaacctggacaaagatattctcaaacagttgtttatcgcgacagtgactgagactgaaaagcagtggaccactcggtttcaggaagaccaggtgtgcacctag

SEQ ID NO: 183328 - DNA, 483 bp, synthetic construct
  misc_feature 1..483: note = Description of Artificial Sequence: Synthetic coding sequence
  source 1..483: mol_type = other DNA
atgctgcccgccgtgggcagcgccgacgaggaggaggaccccgccgaggaggattgccctgagctggttcccatagaaactacccagagcgaggaagaggagaaatccggcctgggcgccaaaatacctgtgaccataatcaccggctacctgggtgcaggaaagacaacattgctcaactacatcctcacagagcagcacagtaaaagagtggccgtgatcctgaatgagtttggagaaggttccgcactcgaaaaaagcctggccgtttctcagggcggcgagctctacgaggagtggctggaactcagaaacggttgcttatgttgttccgtaaaagactcagggctccgtgctatcgaaaacttaatgcaaaagaaggggaagttcgactatatacttctggaaactactggattagctgatccaggtattatcaccatcgtggactccaagtacgggcttaaggtgaagtaccactag

SEQ ID NO: 183329 - DNA, 441 bp, synthetic construct
  misc_feature 1..441: note = Description of Artificial Sequence: Synthetic coding sequence
  source 1..441: mol_type = other DNA
atgtacttcaagcgggccgcccgggccttccccgtgctgctgaccggggccggaaagaccactttattgaattatatcctgaccgagcagcactccaagcgcgtcgccgtcatcctcaacgaattcggagagggcagtgctctcgagaagagcctggcggtgtctcaagggggcgaactgtatgaagaatggttggagctccggaatggctgcctgtgctgttctgtaaaggactccggactgcgcgccattgagaacttaatgcagaaaaagggcaagtttgattacattctgttggaaacgaccggattggcagatcctggcgccgtggcttcaatgttctgggttgatgcagaattgggctctgacatttatttggacggaattattaccatcgtggattccaaatacggtctgaaagctaagaattggacgacttag

SEQ ID NO: 183330 - DNA, 1188 bp, synthetic construct
  misc_feature 1..1188: note = Description of Artificial Sequence: Synthetic coding sequence
  source 1..1188: mol_type = other DNA
atgctgcccgccgtgggcagcgccgacgaggaggaggaccccgccgaggaagattgccccgaactagtccctatggaaactacacagagtgaggaagaagaaaagagcggcttaggggccaagatcccagtaacaataatcacgggttacctgggcgcaggaaaaacaacactcctgaattacatcctcaccgagcagcacagcaaaagagtcgcagtaattctgaacgagttcggagaaggtagcgctttggaaaagagtttagccgtttctcaggggggggagctatacgaggaatggctggagctaagaaacggctgcctgtgttgtagtgtgaaggataacggactgagagcgatcgagaacctgatgcaaaagaaggggaaattcgattatattctcctggagacaaccgggcttgcagatccaggcgccgtcgcctctatgttttgggttgacgcagaattgggtagtgatatttacctggacgggataatcaccattgtggattcgaagtacggcctgaagcacctcgcagaggagaaacctgatggcctaattaacgaagcaaccaggcaggtggcactcgccgacgccatcctgatcaataaaactgaccttgtgcccgaagaggatgttaagaagttgcgggccacgattcgaagtattaacggattaggacagatccttgaaacgcagagatctagggtggacctatccaatgtccttgaccttcatgcatttgattctctgagtggtatcagtctgcagaaaaaactgcagcacgtgccaggtactcaaccccatctagatcagtcaatcgtgacgatcacgtttgaagtcccaggaaatgctaaagaggagcaccttaatatgttcatacagaacctgctctgggaaaagaacgtgcggaataaggacaatcactgcatggaagttatcaggttaaagggactggtctcaatcaaggataagtcacagcaagttatcgtgcagggggtgcatgagctctatgacctggaagaaacaccagtttcatggaaagacgatactgaacggacaaatcgtctggtgctgctcgggcgcaatctggataaagacatcctcaaacagttgttcatcgctacagtgaccgagaccgagaaacagtggacgacacacttcaaggaggaccaggtttgcacatag

SEQ ID NO: 183331 - DNA, 543 bp, synthetic construct
  misc_feature 1..543: note = Description of Artificial Sequence: Synthetic coding sequence
  source 1..543: mol_type = other DNA
atgctgcccgccgtgggcagcgccgacgaggaggaggaccccgccgaggaagattgccccgagttagtgcctatggaaacaacacagtctgaagaggaagagaaatcaggactgggggccaagattcccgtcaccattatcaccgggtacttaggcgccggcaaaacaacgctcctcaactacatcctgacagagcagcactccaagcgtgtggccgtcatactgaacgagttcggggagggatcagccttggagaaatcgctggcggtctctcagggcggcgagctgtacgaggaatggctggagcttcggaacggatgcctgtgttgttctgtgaaagacaatggattaagagctatcgagaacctcatgcagaagaaaggtaagtttgactatattctacttgaaaccaccgggttggccgacccaggtgccgtggcttcgatgttctgggtggatgccgagctggggtctgatatctacttagatggcattattaccattgttgatagcaagtatggtctgaaagtcaagtaccattag

SEQ ID NO: 183332 - DNA, 1131 bp, synthetic construct
  misc_feature 1..1131: note = Description of Artificial Sequence: Synthetic coding sequence
  source 1..1131: mol_type = other DNA
atgctgcccgccgtgggcagcgccgacgaggaggaggaccccgccgaggaagattgcccagagctggttcccatggaaaccactcaatctgaagaggaggagaagagtgggttgggggcaaagatcccagtcacgattatcacaggctacctcggagcagggaaaaccaccctgctgaattatatactgacagaacaacacagcaaacgagtagccgtgatactgaatgagttcggcgaagggtccgctttagagaaaagtctggctgtgtctcagggcggcgagctgtacgaagaatggctggagctgagaaacgggtgtctgtgttgcagcgtcaaggataatggcctcagagccatagaaaaccttatgcagaagaaaggcaaatttgactacattcttttagagaccaccggactcgctgatccaggagccgtggccagtatgttttgggtagatgctgaactgggctccgatatctatctggacggtatcattaccatcgttgactccaagtatggactgaagcatctggctgaggaaaaacccgatggtctcatcaacgaggcgacgcgccaggtggccctggctgacgccatcctgatcaacaaaactgacttagtaccagaggaggacgttaaaaagctgcgtgctaccattcgtagcatcaatggattgggacagatccttgaaacccagaggtcttccctgcagaagaagctgcagcatgtacctgggacgcaaccacacctggaccagtctatagtgacaataactttcgaggtgccgggaaacgccaaggaggagcacttaaacatgttcatccaaaatctattgtgggagaagaatgtcaggaacaaagacaaccactgcatggaagtgattcggctgaaaggactggtgtccattaaggacaaaagccagcaggtaatcgtccaaggtgtacatgagctttatgacctagaagagacccccgtgtcttggaaggatgatacggagagaaccaatcgtctcgtccttctgggacgaaatttagataaggatatcctgaagcaactgtttatcgctactgtgacggagacagaaaagcagtggacaactcatttcaaagaagatcaagtgtgtacatag

SEQ ID NO: 183333 - DNA, 1080 bp, synthetic construct
  misc_feature 1..1080: note = Description of Artificial Sequence: Synthetic coding sequence
  source 1..1080: mol_type = other DNA
atgtacttcaagcgggccgcccgggccttccccgtgctgctgaccggggctggaaaaacaactctcttgaactacatccttaccgaacaacattcgaaaagggttgcagttatcctgaatgagtttggagagggctcagcccttgagaagagcttagcggtctcgcagggcggggagctttatgaggaatggttggaactgaggaatgggtgtctctgttgctctgttaaggacaacggcctgagggcaattgagaatctcatgcagaagaaaggcaaatttgactacattctcctggagactacgggccttgcagaccccggagcagtggccagcatgttttgggtcgacgcagaactggggtcagacatctatttggacgggataattaccatcgtggattccaaatacggcctgaagcacctggctgaggagaaacctgacgggctgattaatgaagctacccgacaggtggcacttgccgacgctatcctgattaataagacagatttagtgccagaagaggatgtcaagaagttgcgcgccactattcggtctatcaatgggctgggccaaatattggagactcagagaagtcgcgtcgacctgtcaaacgtgctggatctgcacgcctttgactcactgagcggaatctcactgcagaagaaactgcagcacgtaccaggcactcagccccatctcgaccagtccatcgtcactataacattcgaggttcccggtaatgccaaggaggagcacctaaacatgtttatccagaatctgctgtgggagaagaatgtgaggaacaaggacaaccactgcatggaggtgatcagactgaagggactcgtgtctatcaaagataaatctcagcaagttatagtccagggcgtccacgagctgtatgacctcgaggaaacacccgtttcctggaaggacgatactgaacgaaccaaccgactggtgcttttgggccgcaacttagacaaagatatcctgaaacagctgtttattgccaccgtaaccgagacggaaaagcagtggactacgcatttcaaggaggaccaagtctgtacgtag

SEQ ID NO: 183334 - DNA, 483 bp, synthetic construct
  misc_feature 1..483: note = Description of Artificial Sequence: Synthetic coding sequence
  source 1..483: mol_type = other DNA
atgctgcccgccgtgggcagcgccgacgaggaggaggaccccgccgaggaagattgccccgaactggtgccgatggagactactcagagcgaggaggaggaaaagtccggactcggggcaaagattcctgtgactatcataacaggttacttaggggccgggaaaacaaccttactcaattacatcctgacggaacagcacagcaagagggtggcagtaattctgaacgaattcggtgaagggtccgccctggagaagtctctggcagtcagtcagggcggtgagctgtatgaggagtggcttgaactgaggaatgggtgcctttgctgctctgtcaaggataacggcctgcgcgccatcgaaaatctcatgcaaaagaaaggtaaattcgattacattttgctggagacgaccggccttgccgatccagggataattaccattgttgattctaaatacgggctgaaagttaagtaccactag

SEQ ID NO: 183335 - DNA, 1188 bp, synthetic construct
  misc_feature 1..1188: note = Description of Artificial Sequence: Synthetic coding sequence
  source 1..1188: mol_type = other DNA
atgctgcccgccgtgggcagcgtggacgaggaggaggaccccgccgaagaggactgccctgaacttgtccctattgagacaacacaaagtgaagaggaagagaagtctggactgggggctaaaattccagtcaccatcatcactgggtaccttggcgcgggaaagactacccttttgaattatatcctgacagagcagcactcaaagcgggtagctgtgattttgaatgagtctggagagggttcagccttagaaaagtctctggctgtgagtcagggaggcgaactgtatgaagagtggctcgaactccgcaacggatgtctctgctgtagcgtcaaagataacggactgcgggcaatcgaaaacctcatgcagaaaaaaggtaagtttgatgacatactactggaaacaacagggctcgccgaccctggagcggtcgcctccatgttttgggtggatgcagaactcggttcagacatttacctggatggcatcatcacaattgtggattcaaagtatggactgaaacacttgacagaagagaagcctgatggcctgatcaatgaggccacacgtcaggttgcgttagctgatattatccttataaataagacggacctggtgccggaggaggatgtgaagaaacttcgaaccaccattaggtccattaacggcctcgggcagatacttgaaacgcagcgttcacgggtagatttatccaatgtgctggacctgcacgccttcgatagcctgtcaggtattagtctgcagaaaaaactacaacacgttcccgggacacaaccacacctggatcagagcatcgtgacaataacatttgaagtgccggggaatgctaaagaagagcacctcaatatgttcatccagaatctgctgtgggagaagaacgtgcgcaacaaagacaatcactgtatggaagtgattcgactgaagggactggtgtccatcaaggacaagtctcagcaggtcatcgtgcagggggtgcatgagttgtatgacctggaagagacacccgtctcatggaaagatgataccgaaagaaccaatagactcgtcttaataggtcgcaatttagataaagatatcctgaagcagttatttattgccaccgtgaccgagacagaaaagcagtggacgacccacttcaaagaggaccaggtttgcacctag

SEQ ID NO: 183336 - DNA, 258 bp, synthetic construct
  misc_feature 1..258: note = Description of Artificial Sequence: Synthetic coding sequence
  source 1..258: mol_type = other DNA
atggaggtgatccggctgaagggcctggtgagcatcaaggacaagagtcagcaggttatcgtgcaaggggtgcatgagctgtacgatctggaggagacacctgtttcttggaaagatgatacggagcggactaacaggctggtgttaatcggccggaacctggataaagacattctaaagcaattattcatagcaaccgtgactgaaaccgaaaaacagtggaccactcattttaaggaggaccaggtttgcacctag

SEQ ID NO: 183337 - DNA, 258 bp, synthetic construct
  misc_feature 1..258: note = Description of Artificial Sequence: Synthetic coding sequence
  source 1..258: mol_type = other DNA
atggaggtgatccggctgaagggcctggtgagcatcaaggacaagtcgcagcaagttatcgtccagggagtgcacgaattgtacgatttggaggagacaccagtgagctggaaagacgacacagagaggacaaaccgtctggttctaatcggccgtaatctcgacaaagacattctgaaacagttatttatagcaaccgtcaccgaaaccgagaagcagtggaccacccacttcaaggaagatcaggtgtgtacatag

SEQ ID NO: 183338 - DNA, 132 bp, synthetic construct
  misc_feature 1..132: note = Description of Artificial Sequence: Synthetic coding sequence
  source 1..132: mol_type = other DNA
atgttcatccagaacctgctgtgggagaagaacgtgcggaacaaggacaaccattgcatggaggtgatccgcctaaaagtgcagtttacagttgctgatttctggaccaagtcctttagctggttgctctag

SEQ ID NO: 183339 - DNA, 1128 bp, synthetic construct
  misc_feature 1..1128: note = Description of Artificial Sequence: Synthetic coding sequence
  source 1..1128: mol_type = other DNA
atgctgcccgccgtgggcagcgtggacgaggaggaggaccccgccgaggaggactgccctgagctagtgccaatagagaccacccagagcgaggaggaggagaagagcgggctgggggcaaaaattccagttacaataatcacgggatatctgggagcagggaaaactaccctgttaaactatatccttacggagcaacactcgaaaagggtggctgttattttgaacgagagcggtgaaggctcggcactggagaagtccctggctgtatctcagggcggagaattgtacgaagagtggctcgagctgcggaacgggtgcctatgctgttccgtcaaggataatgggctgcgcgccatagagaatctcatgcagaaaaagggaaagtttgatgacatcttgttggagacaaccggcctggccgatcccggcatcattacaattgttgacagtaaatacggtctgaaacatttgaccgaggagaagcccgatgggctgatcaatgaagctactcgccaggttgcactagccgatattatcttaatcaataagactgatctggtgcccgaagaagacgttaagaaactcaggactaccattcgctccatcaatgggctgggccagatcctggaaactcagagaagtcgcgtggatctgagtaacgttctagacttacatgcctttgatagcctctcaggaattagtcttcaaaaaaaactgcagcacgtgcccggaacccaacctcacctggaccagtctattgttactattactttcgaggtacccggaaatgctaaggaggaacacctaaacatgtttatacaaaatctgctgtgggagaaaaacgtgcggaacaaggacaatcattgcatggaagttattcggctcaaagggcttgtctctatcaaagataagagccagcaggtgattgttcagggagtacatgagctgtacgatctggaggagacacccgtctcgtggaaggatgatactgaaagaaccaatcggctcgtccttatcggaaggaatctggataaagatattctgaagcaattgttcattgccaccgtaactgagacagagaaacaatggacaacacacttcaaggaggaccaggtctgtacgtag

SEQ ID NO: 183340 - DNA, 1080 bp, synthetic construct
  misc_feature 1..1080: note = Description of Artificial Sequence: Synthetic coding sequence
  source 1..1080: mol_type = other DNA
atgtacttcaagcgggccccccgggccttccccgtgctgctgaccggcgctggcaaaaccaccctcttgaactatattctcaccgagcagcacagcaaacgggtagcggtaatattgaatgagtccggggaaggctctgccctagagaagtctctggcagtgtcccagggcggggaactgtatgaggaatggctggagctcagaaacggttgtctctgctgctctgtcaaggacaacgggttgcgcgctatcgaaaacctgatgcagaagaaaggcaagttcgatgatattctccttgagactacagggctagctgacccgggcgcggtggcatccatgttttgggtcgatgctgagttgggcagcgatatctacctcgacggtatcattaccatcgtggatagcaaatatgggctcaagcatctaaccgaggagaagccggatggcctaattaacgaggccacaagacaggtggctttggcggatatcattttgattaacaaaaccgatttggtcccagaagaggatgtaaagaaactcaggactaccattagatcaatcaacggtctcgggcagatcttggagacccagagaagccgggtcgaccttagtaacgttctggacctgcacgcctttgattctctgtccggcatttccctacagaaaaaactccaacatgtccctggcacgcaacctcacttagaccagtccattgtgactatcacatttgaagttcccgggaacgccaaggaagaacatctaaacatgttcatccagaacctcctatgggagaagaacgtgagaaataaggataaccactgtatggaagttataaggctcaaggggctggtctccatcaaagataagagtcagcaggtcattgtacagggggtccatgaactgtacgacctggaagagacccccgtatcatggaaagacgatacagaaaggacaaaccggttagtcctgatcggtagaaatcttgacaaagacattctgaaacaactgtttattgctaccgtgacagagacagaaaaacaatggacaacacatttcaaagaggaccaggtttgcacttag

SEQ ID NO: 183341 - DNA, 234 bp, synthetic construct
  misc_feature 1..234: note = Description of Artificial Sequence: Synthetic coding sequence
  source 1..234: mol_type = other DNA
atgtacttcaagcgggccccccgggccttccccgtgctgctgaccggagccggcaaaacaacactactcaactatatcctgaccgaacagcactcaaagcgcgttgccgtcattctcaacgagagtggggaggggtccgcccttgagaagtcattggccgtgagccaaggaggcgagctgtatgaggagtggcttgagctgcggaacggatgcctgtgttgttcagtgaagtag

SEQ ID NO: 183342 - DNA, 1131 bp, synthetic construct
  misc_feature 1..1131: note = Description of Artificial Sequence: Synthetic coding sequence
  source 1..1131: mol_type = other DNA
atgctgcccgccgtgggcagcgtggacgaggaggaggaccccgccgaggaagattgccctgaactcgtcccaattgagaccactcaaagcgaagaggaagaaaagagcggcctaggcgctaagatccccgttacaattatcacaggctacctcggggctggcaagactaccctcctaaactatattttgaccgaacagcattcaaagagagtggctgtgattctgaatgagagcggcgaagggtctgccctcgaaaagtccctggctgtgagccaagggggggagttgtatgaggaatggctggagttgagaaatgggtgtctgtgttgctcagtgaaggacaatggactcagagccatcgaaaatctaatgcagaagaagggcaagtttgacgatatcctcctagagacaacgggattggctgacccaggcgccgttgcctctatgttctgggtcgacgccgaacttgggtccgatatctacctcgacggtatcatcaccatcgttgactctaagtatggcctaaagcatctcacggaggagaaaccagatggcctcattaatgaggccaccaggcaggtcgccttagcagatatcattctcataaacaagaccgacctggtacccgaggaggacgtgaaaaaattgaggacaaccattagatctatcaatgggctgggccagattcttgaaacgcagagatcctccctgcagaagaagcttcaacacgtgcccggaacacaaccccatctggaccaatctatcgtgaccattacatttgaagtgcccgggaatgctaaggaagaacacctgaacatgtttatacagaatctactctgggaaaagaatgtcaggaataaagataaccactgcatggaggtgattaggcttaagggacttgttagcataaaggacaagtcacaacaagtgatcgtgcagggcgtacacgagctctatgatttggaggaaacacccgtgagctggaaggatgacactgaacggaccaatcggctggtcctaatcggacggaacctcgacaaagacatccttaagcaattgttcatagccactgtgactgagacggaaaaacagtggaccacccacttcaaggaggaccaggtgtgtacttag

SEQ ID NO: 183343 - DNA, 225 bp, synthetic construct
  misc_feature 1..225: note = Description of Artificial Sequence: Synthetic coding sequence
  source 1..225: mol_type = other DNA
atgtacttcaagcgggccccccgggccttccccgtgctgctgaccggggcggggaaaactaccctgttaaattatatcttaaccgaacagcatagcaaacgagtggcagtgattctgaacgaaagcggcgagggctccgcactggagaagtctctggcagtgagccagggaggcgaactctacgaggaatggctcgagctgcgcaacggatgcctttgctgctag

SEQ ID NO: 183344 - DNA, 543 bp, synthetic construct
  misc_feature 1..543: note = Description of Artificial Sequence: Synthetic coding sequence
  source 1..543: mol_type = other DNA
atgctgcccgccgtgggcagcgtggacgaggaggaggaccccgccgaggaggattgccctgagctggtgcccatcgagaccacgcagtctgaggaagaggaaaaaagcggtttgggcgcgaagattccagtgacaattataacaggatacctgggagcgggaaagactaccctgctcaactacatcctgacagaacagcactctaagcgggttgcagttattctgaacgagtcgggtgagggcagtgccctcgagaaaagcctagcggtctcgcaaggaggagaactctacgaagaatggctagagctgcggaatggatgtctgtgttgttcagttaaggacaatgggcttcgggctattgaaaacctaatgcagaagaagggcaagtttgacgatattctactagaaaccactggcttggcggacccaggggccgttgcctccatgttctgggttgatgccgaattgggctcggatatttacctggacggaattattacaatcgtggactctaaatacggacttaaagttaaataccactag

SEQ ID NO: 183345 - DNA, 1044 bp, synthetic construct
  misc_feature 1..1044: note = Description of Artificial Sequence: Synthetic coding sequence
  source 1..1044: mol_type = other DNA
atgctgcccgccgtgggcagcgtggacgaggaggaggaccccgccgaggaggattgccccgaacttgtgcctatcgaaactactcagtccgaagaggaagaaaaatcaggcctcggcgctaagatacccgtgactatcattaccggctacctcggagccggcaagaccacgctgctcaattacattctgacagaacagcactccaaaagagttgccgtcatccttaacgaatctggggagggctctgccttggagaagtctcttgccgtgagccaaggcggggaattatatgaagaatggttggaattgagaaatggatgtctctgttgtagtgtaaaggataacggtttaagggcaattgaaaacttgatgcagaaaaaaggcaaattcgatgatattctcctcgagacgaccggtttggcagatcctggggcagtagcctccatgttctgggtggatgccgagttaggatcggatatttatctcgatggtataatcacaatcgtggattccaaatacgggctgaaacacctgacggaggagaagcctgatgggttaattaacgaggctacgaggtccattaatggcctcggccagattttagaaacgcaacgcagctcgctgcagaaaaaactgcagcatgtgcctggtacacagccccacctggaccagagtatcgttacaattacattcgaagtaccagggaatgccaaggaggaacacctgaacatgttcatacagaacctcctgtgggaaaagaatgtgcgtaataaagataaccactgcatggaagtgattcgcttgaagggtctggtctctattaaagataaaagccaacaggtcattgtacaaggtgtacacgagctttacgacttggaggaaaccccagtgtcttggaaagacgatacagaaagaacgaatagactagtattgatcggccgcaacttagacaaagacattctgaaacaactattcatagccacggtgacagagaccgagaaacagtggacaacgcacttcaaagaggatcaagtttgtacttag

SEQ ID NO: 183346 - DNA, 987 bp, synthetic construct
  misc_feature 1..987: note = Description of Artificial Sequence: Synthetic coding sequence
  source 1..987: mol_type = other DNA
atgctgggcagccgggccgccggcttcgcccggggcctgcgggccgtcgccttggcctggcttccaggatggcgaggcaggtcattcgcccttgcacgcgcagctggggcaccccacggtggggatctccaaccgcctgcgtgccccgagcctagaggccggcagctgtcactctccgcagcagccgtggtcgactccgctcctcgccctctccagccttacttgcgcctgatgaggctcgacaagcccatcggaacctggcttctgtacttaccctgtacatggtcgattggattggcagctgaacccggatgctttccagactggtacatgctgtcactctttgggactggtgcaatcttaatgcgaggcgcagggtgcactatcaacgatatgtgggatcaagattacgacaagaaagtcaccagaacagctaaccgtcccatagccgctggcgacatatctacttttcagagttttgtattccttgggggacagttgactcttgctctgggggtcctcctgtgcttgaattactatagcattgccctgggcgccggcagcttactcttggtaattacctaccctctgatgaaacggatttcctattggccccagctggctctggggctgactttcaactggggagcactcctggggtggtccgctatcaaagggagttgcgaccctagtgtttgcctccccctgtactttagtggcgtaatgtggacactgatctacgatacaatttacgctcatcaggacaagagggatgacgtcctgatcggcttgaagtccacagctctgagattcggtgagaatactaagccgtggctctcaggctttagcgtagccatgttgggtgccctgagcctcgtgggcgttaacagcgggcagacggcgccctattatgcggctcttggagctgtgggcgctcacctcactcaccagaaatggggcctggagatcctgcctaggctcgtttag

SEQ ID NO: 183347 - DNA, 1266 bp, synthetic construct
  misc_feature 1..1266: note = Description of Artificial Sequence: Synthetic coding sequence
  source 1..1266: mol_type = other DNA
atgacccccatcagccaggtgcggatgcggaagggcagcgcccacacagccgcacagccagggagactgggactgcatcctgccggggcgactgctcacgcctgccggggcatgacaagcatacgagctcggcctgggctcacatctgccatgctcggttctagagccgccggctttgcaagaggcctgcgcgccgttgcattggcatggctccctgggtggagaggccgttcgttcgcgctagcaagggctgcgggcgcaccgcacggtggcgacctccaaccccctgcttgcccagagcctagaggcaggcagctctcattgagtgctgccgccgtggtggacagcgcgccaaggcccttgcagccgtaccttcgccttatgcgcttggacaagcccattggtacatggctgttatatttgccatgcacttggtctattggcctagccgcagagccagggtgttttcccgactggtatatgctgagtttgtttggcaccggggcgatcctcatgagaggcgccgggtgcactatcaatgatatgtgggatcaggactatgataagaaggtgacaaggaccgcaaatagaccaatagccgccggcgacatctctacattccagtcattcgtgtttctcgggggccaactgactctagctttgggggttctgctgtgtctgaattattattcaattgctctgggcgccgggtcactactgttggtcatcacatatccgttgatgaagaggatttcctattggcctcagttagctctgggcctcacttttaactggggggcactgctgggctggagtgccatcaaagggtcttgcgatccctctgtgtgcttgcctttgtacttcagtggtgtaatgtggactctgatctacgacaccatttacgcccatcaggacaaaagagacgacgtattgatcgggctaaaaagtacagccttaagattcggagagaacacaaagccctggttgtccggttttagtgtcgcaatgctgggtgctctatctcttgttggcgtgaacagcggtcaaaccgccccctactatgccgcgcttggggccgtgggtgcccacttgacacatcagatttacaccctggatatccacagacctgaggattgctggaataaatttataagtaacagaacactcggtttaatcgtcttcctagggatagtgctgggcaatctttggaaggaaaagaagacagataagaccaaaaagggaattgaaaacaagatcgaaaattag

SEQ ID NO: 183348 - DNA, 1155 bp, synthetic construct
  misc_feature 1..1155: note = Description of Artificial Sequence: Synthetic coding sequence
  source 1..1155: mol_type = other DNA
atgaccagcatccgggcccggcccggcctgaccagcgccatgctgggcagccgagccgccggctttgctagggggctgagggccgtggcgctcgcgtggttgcccggttggagaggccgcagcttcgctcttgcccgagccgcaggcgctccccacgggggtgatcttcagcctccggcctgtccagagccacggggcagacagcttagtcttagcgctgctgctgtagtggacagcgccccacgcccattacaaccctacttgcgcctaatgaggctggacaagccaattggtacgtggctactgtacctgccctgcacatggtctattgggctggctgcagagccaggttgttttccagattggtatatgctctccctgttcggcacaggcgctatcttaatgcgcggggccgggtgcacaatcaacgacatgtgggaccaagattatgacaaaaaagtcacacgtaccgctaatcgtcccatagccgcaggggacatctctacctttcaatccttcgtttttctcggcggacagttgaccctggcattgggggttctgttatgtctgaattattacagcatagcacttggcgccggcagtctgctgctggtcatcacctaccccctgatgaagagaatctcctactggccacaactggcacttggcctgacttttaattggggtgcactgctggggtggtctgctattaaagggtcatgtgatcccagcgtttgtttgcctttgtactttagcggcgtcatgtggacgttgatctatgacaccatctatgcacatcaagacaagcgagatgacgtgctaattggtttaaagagcactgctctgagattcggcgaaaacacgaagccctggctctccggtttttccgtggccatgctgggagctctttctctggtcggggtgaatagtggccaaactgctccctattacgcagcattgggtgcggttggagcgcatctgactcaccagatttacacccttgacatccacagacccgaggattgctggaataaattcatttccaaccgtactctgggccttatcgttttcctcggtattgtgctgggtaatctgtggaaagagaaaaaaacggacaaaactaaaaaggggatcgagaataaaatcgagaattag

SEQ ID NO: 183349 - DNA, 798 bp, synthetic construct
  misc_feature 1..798: note = Description of Artificial Sequence: Synthetic coding sequence
  source 1..798: mol_type = other DNA
atggccaccctgctgcggcccgtgctgcggcggctgtgcggcctgccaggtctgcaacgcccggcagcagaaatgcccctgagggctcggtctgacggagccgggccactgtattcccaccacttgcccacctcccccctgcagaagggacttcttgccgcaggatccgccgctatggcactatacaacccatatcgccatgacatggtggcagtcctcggcgagacaaccgggcacaggacgctaaaagttctgcgcgaccaaatgcggcgagacccagagggggcacaaattctgcaagaacggccaagaatttcaaccagcaccctggacctgggcaagctgcaatcactgcctgaggggagtttgggacgggagtacctgagattcctcgacgtgaacagagtgtcacctgacactcgggccccaactaggtttgtcgacgatgaggagctggcttatgtgatacagcggtatagggaggtgcacgatatgctgcatacgctgcttggaatgcccactaatattttgggagaaatcgtagtgaaatggttcgaagccgtgcagacaggattgcctatgtgtatactgggagccttcttcggacctattcgcttgggtgctcagagtctgcaggtgctcgtgagcgaactcatcccctgggccgtgcaaaatgggaggcgcgccccctgtgtactgaatctgtattatgaacgcaggtgggaacagtcattgcgcgccctccgcgaagagctcggcatcacagcccctccaatgcacgtacagggactcgcctag

SEQ ID NO: 183350 - DNA, 456 bp, synthetic construct
  misc_feature 1..456: note = Description of Artificial Sequence: Synthetic coding sequence
  source 1..456: mol_type = other DNA
atggccaccctgctgcggcccgtgctgcggcggctgtgcggcctgcccgggctgcagcgtccagcagccgagatgcccctcagggctcgcagcgacggggctggcccgctgtactcccaccatctccccacctcacctcttcagaaggggctgctggcggcgggtagcgcagctatggctctgtataatccttacaggcatgatatggtcgccgtgctgggcgagacaactgggcaccgcactttaaaggtgttacgtgaccagatgcgacgcgaccctgagggcgctcagatcctccaggaacggccccgcatatcaacgagcacactcgatttagggaaattgcagtctttgccagaagggtcactcggtcgggagtatcttcgattcctggatgtaaacgtctcgtttcagttgctctgtatttggcaatctcctgatagaacagaagagtag

SEQ ID NO: 183351 - DNA, 654 bp, synthetic construct
  misc_feature 1..654: note = Description of Artificial Sequence: Synthetic coding sequence
  source 1..654: mol_type = other DNA
atgagctgcgccggcgccgccgccgccccccggctgtggcggctgaggcctggtgcccgccgatctctttccgcctatggacggaggaccagtgtcagatttcgatctagcggcatgaccctcgataatattagccgagcagccgtcgatagaattatccgcgtggaccatgcaggggaatatggcgctaaccgaatttatgcaggccagatggccgtgctgggtcgtaccagtgtgggccctgtcattcaaaaaatgtgggaccaggaaaaagatcatcttaaaaagttcaatgaactgatggtaactttccgggtgcgccccactgtccttatgcccctctggaacgtcctgggttttgccttaggggcgggaaccgcccttctgggaaaggagggcgccatggcttgcaccgtggctgttgaagagtccatagctcaccattataacaaccagatacgaactctcatggaggaggaccccgagaaatacgaagaactccttcagcttatcaagaagttcagagatgaagagcttgaacatcatgatataggattagatcatgacgccgagctcgcaccggcatatgccgtccttaaatccatcatccaggccggatgcagagtcgctatatatctgtctgagagactgtag

SEQ ID NO: 183352 - DNA, 540 bp, synthetic construct
  misc_feature 1..540: note = Description of Artificial Sequence: Synthetic coding sequence
  source 1..540: mol_type = other DNA
atgaccctggacaacatcagccgggccgccgtggaccggatcatcagagtggatcacgcgggtgaatatggcgctaatcggatctatgcgggtcagatggcggtgcttggccgcacaagcgtgggtcctgtaattcagaagatgtgggaccaggaaaaggatcatttgaaaaaattcaatgagctgatggttacctttcgggtgcgcccaaccgtgctgatgcctctgtggaatgttctcggcttcgccctgggcgccggcacggcgttgctagggaaggaaggtgccatggcctgcacggtcgccgtagaggaatccattgcccatcattacaacaatcaaatccgaacactgatggaagaagatcctgagaaatacgaagaactccttcagctaatcaagaagtttcgagatgaagaactagaacatcatgatataggactagatcacgacgccgagctcgcccctgcttacgcggtgctgaagtcaattatccaggcaggatgtagggtcgccatttatctcagcgaaaggctgtag

SEQ ID NO: 183353 - DNA, 957 bp, synthetic construct
  misc_feature 1..957: note = Description of Artificial Sequence: Synthetic coding sequence
  source 1..957: mol_type = other DNA
atggccgccgccgccgtgagcggcgccctgggccgggccggctggcggctgctgcaattgcgatgtctgcccgtggcgcgctgtcgacaggctctggtaccacgcgccttccacgccagtgccgtgggactgagatccagtgacgaacagaagcagcaaccccctaacagctttagccaacagcactccgagacgcagggcgccgagaaacctgatcctgaatcctcgcactccccgccccgatacacagatcagggcggagaggaggaagaggattatgaatctgaggagcagctgcagcatagaatcctgaccgcggccttggagtttgtgcccgctcatgggtggaccgcggaagcgatcgcggagggcgcccaatccctgggcctgtccagtgccgcagctagtatgttcgggaaggatggatcagagcttattctccacttcgttacgcaatgtaataccagacttactagagtactggaggaagaacagaagttagtgcagttagggcaggctgaaaagcgaaagacagatcagtttctgagagatgccgtggagacgcgccttaggatgctcatcccctacatcgagcactggccccgtgcgctctccatcttgatgcttcctcacaacatcccatcaagtctgtctttgctgacgtctatggtggatgacatgtggcactatgctggcgaccaatccactgatttcaattggtatactcgccgcgctatgctagctgccatttataatactaccgaacttgtgatgatgcaggactcgtctccggattttgaggacacatggcgttttttggaaaatcgcgttaacgacgccatgaacatgggacatacagctaaacaggttaaaagtacaggcgaagctctcgtccaggggctaatgggggccgcagtcaccttgaagaatctgaccggcctgaaccagcgacgctag

SEQ ID NO: 183354 - DNA, 1743 bp, synthetic construct
  misc_feature 1..1743: note = Description of Artificial Sequence: Synthetic coding sequence
  source 1..1743: mol_type = other DNA
atgttcgccggcctgcaggacctgggcgtggccaacggcgaggacctcaaggagactttaacgaattgcacagagcccttaaaagctatcgaacagtttcagaccgaaaatggcgtgctgctgccaagtctccagagtgcactgccgtttctggatctccacggtacccccaggctagagtttcaccagagcgtcttcgacgaacttagagacaaattgctggaaagggtaagtgccatcgcaagtgaggggaaagccgaagagagatataaaaagctggaagatctgcttgagaaatctttcagcctagtcaagatgcccagtttgcaaccggttgtaatgtgcgtcatgaagcacctgcctaaggttccagaaaaaaaattaaagctggtgatggcagacaaggaactataccgggcttgtgcggtggaggtgaaacggcagatttggcaggataaccaagccctgtttggagacgaagtgagccccctactcaagcaatatatcttggaaaaagagtctgctctcttcagcacagagctatctgttttgcacaattttttcagcccgtctcctaagacacgacgtcagggagaggtggtccagaggctgaccaggatggttggtaagaatgttaaactgtatgacatggttctccagtttttgcggacgttgtttctgcggactagaaacgtgcactattgcactctgcgggcggagctgctcatgtccctccacgacctggacgtcggcgaaatatgcacggtagacccatgtcacaaattcacctggtgcctggatgcttgcattagagagcggtttgtcgattctaagcgggctcgagaattacaggggttcctggatggggtcaagaaggggcaggagcaggtgctgggagacctgtctatgattctatgtgatccgtttgctattaacacactagctcttagtactgtcaggcatcttcaagagttggtgggacaggaaacccttcccagagactcgcctgatctgctgttgctgctgagactgcttgcattggggcagggggcttgggacatgattgatagccaggtcttcaaggagcccaagatggaagtggagctcatcactagatttctgccgatgctaatgagcttcttggtcgacgactatacattcaacgtcgatcagaagcttcccgccgaagagaaggccccagtgtcctaccctaacaccctgcccgagtcttttaccaagtttctccaggagcagcggatggcgtgcgaggttgggctgtattacgtgctacacattacgaagcagcggaacaagaacgccctgctgaggttgctccctgggctggtggaaacatttggcgacctggcatttggtgatatttttttacacctgctcaccgggaacctggctctgttagctgacgaatttgcactggaggacttctgctcatcactgttcgatgggtttttcctaacagcctccccccgcaaagagaatgtacaccggcatgctttgagactgctgatccatttacaccctcgcgtggcaccatcaaaactggaggccctgcagaaagctctagaaccaaccggccagagcggcgaggcagtgaaggaactgtattctcagctcggtgaaaaacttgaacaactagaccaccgtaagccatccccagcgcaggccgcggagactcctgcgctagaacttcccttgccgagtgttccagcccctgccccactttag

SEQ ID NO: 183355 - DNA, 501 bp, synthetic construct
  misc_feature 1..501: note = Description of Artificial Sequence: Synthetic coding sequence
  source 1..501: mol_type = other DNA
atggccagcggcgtgaccgtgaacgacgaggtgatcaaggtgttcaacgatatgaaggtgcgcaagagtagtacacaagaggagatcaaaaagcgtaaaaaagctgtcctgttctgcctatctgacgataaacgccagattatagtcgaggaagccaagcagatcttagttggagacatcggagacactgttgaagacccttataccagcttcgtcaagctgctcccgctcaatgattgtcggtacgcactgtacgatgctacctacgaaaccaaggaatccaaaaaagaggatctcgtgttcatcttttgggctcctgagtctgctccactgaaatccaaaatgatctacgcatcttccaaggatgcaattaagaaaaaatttacgggcattaagcacgaatggcaggtaaacggactagatgacatcaaggacagatctacgctcggcgaaaaactgggggggaacgtcgtggtgtcattggaaggaaaacctctctag

SEQ ID NO: 183356 - DNA, 501 bp, synthetic construct
  misc_feature 1..501: note = Description of Artificial Sequence: Synthetic coding sequence
  source 1..501: mol_type = other DNA
atggccagcggcgtgaccgtgaacgacgaggtgatcaaggtgttcaatgatatgaaggtgaggaaatctagtacccaagaagagattaaaaagcgcaaaaaagccgtactcttctgtctgtcggacgacaagagacaaatcattgtggaggaagcaaaacagattctggtcggagacataggagacaccgtggaggatccgtacacaagtttcgtaaagctcctgccacttaatgattgtaggtatgctctctacgatgccacctatgagactaaggagagtaaaaaggaagacctcgtgtttatcttttgggccccagagtctgctccccttaaaagtaaaatgatctatgcaagctcaaaggacgcgatcaagaaaaagttcactgggataaagcacgagtggcaggtgaacggcctcgacgacataaaggacaggtcaactttaggggagaaactggggggaaacgtcgtggtttctctggaaggaaagcccctctag

SEQ ID NO: 183357 - DNA, 1722 bp, synthetic construct
  misc_feature 1..1722: note = Description of Artificial Sequence: Synthetic coding sequence
  source 1..1722: mol_type = other DNA
atgcggcggtacgaccggggcctgaagaccctggagaacctgctggcatctatacgaaagggtaacgctatcgacgaagccgacatccctcctcccgtggccattggcaagggacctgccagtacccctacctactcacctgcgcccacacagccagccccacggatcgcttccgctcctgaacctagggtgacacttgaagggccatctgccaccgctcccgcctcatcccccgggctcgccaaaccccagatgcctcccggcccctgctctccgggtcccctcgcgcagctgcagtctagacagcgggactataagctcgccgcactccatgctaaacagcagcagctggcctttctcgaggggaggaaaaagcagcttcttcaagccgccttacgcgccaaacaaaagaatgatgtggagggggcgaagatgcacctgcggcaagccaaaggtctagagccaatgctggaagcttctaggaatggcctgcctgtagacatcacaaaggtgccacccgcccctgtgaataaggatgactttgccctcgtccaaagacctgggcctggattgtcccaggaggccgctagaaggtacggcgaactgaccaagcttattaggcaacagcatgaaatgtgtctgaaccattctaaccagtttactcagctcggaaacatcaccgagacgacaaaatttgagaaactggccgaagactgcaagaggtcaatggacatcttgaaacaggctttcgtgagaggattgccaacacctactgcacgtttcgagcagagaacctttagcgttatcaagatttttcccgatctcagctccaacgatatgctgctgtttattgttaagggcattaaccttcctacgcctcccggactatcccctggcgacttggatgtgttcgttaggttcgattttccttatcctaatgtcgaggaggctcaaaaggacaagacaagcgtgattaagaacactgacagccctgagttcaaagagcaattcaaactctgtatcaataggtcacacaggggtttcaggcgtgcgatccagacaaaaggcattaaatttgaggttgtgcacaagggggggttgttcaaaacagacagggtcctcggcaccgcccagctcaagctggacgcactggagatcgcatgcgaggttcgcgagatcctggaagttttagacggtcgacgaccaaccggcgggcggctcgaggtcatggttcgcattcgggaaccacttacggcacagcaattagagacaacaacagaacggtggctggttatcgaccctgtgcccgctgctgtcccaactgtagccggcccaaagggaaaggcccctccagtgcctgcccccgcccgggaaagcggaaacagatcagcccggcccttacactccctcagtgtcctggcattcgatcaggaaaggctggagcgcaaaatactcgcactgagacaggctcggcggcctgtgccccccgaggtcgctcagcagtaccaggatataatgcagagatcgcaatggcaacgcgcccagctcgagcagggcggggtggggatccggcgcgagtacgcagcccaactggagcgccagctccagttctatacagaagccgcgcgccgccttggcaacgacggatcccgcgacgcagccaaggaggcgttgtatagacgcaatctggtggagtctgagctgcaacgcctccgccgctag

SEQ ID NO: 183358 - DNA, 2856 bp, synthetic construct
  misc_feature 1..2856: note = Description of Artificial Sequence: Synthetic coding sequence
  source 1..2856: mol_type = other DNA
atgcacaagcggaagggcccccccggcccccccggccggggcgccgccgccgccagacagttaggactcctcgtggatctctcccctgatggcttaatgattcccgaggacggtgccaatgacgaggagctggaggcagagtttcttgcactggttggcgggcaaccacccgccctcgaaaagctgaaagggaaggggccgttgcccatggaggcgatcgagaaaatggcatcactctgcatgcgggaccccgatgaagatgaggaggagggcacagacgaagatgaccttgaagcagatgatgatctactcgccgaactgaatgaggtgttgggcgaagagcaaaaggcctccgagaccccgccgcctgtggcccagcctaagcccgaagctcctcacccagggctcgagactactctccaggaaaggcttgcgctgtatcagactgctatcgaatcagcgcggcaagccggtgattctgccaagatgcgaagatatgaccgagggctgaaaacactggagaacttactggcgagcatcagaaaagggaatgccattgacgaagctgatatcccaccccctgtcgccatcgggaagggcccagccagtacacccacgtattctccagcgcccacacagcccgcaccacgtatcgcgagtgctcccgagcctagagtgaccctggaagggccctcagccaccgcaccagcctcgtctccagggcttgccaagccccagatgcccccaggtccctgttcgcccgggccgctagcacaacttcaaagccgccagcgcgattacaagctcgcagccctgcatgctaaacagcagggtgacaccacagctgccgcccgtcactttcgggtggcaaaatctttcgatgccgtgctcgaagcactctctaggggtgaaccagtagatctgtcttgtctcccaccacctcctgaccagcttcccccagatcctccgagtcccccttcccagcctccgacaccagcaactgcgccctctacaacagaggtaccaccccctcctcgaaccctcctcgaagcactagagcagcggatggaaaggtatcaggtggcagctgcacaggcgaagtcaaaaggagatcagagaaaagcacgaatgcacgagcgtatcgtgaaacagtatcaggatgctatccgggctcataaggccggtagagccgtggatgttgccgaactaccggtgcctccgggttttccccccattcagggcttggaggccaccaagcctacccagcagtctctggtgggagtgctggaaaccgcgatgaaactggccaaccaggatgaggggcctgaggacgaggaagacgaagtcccgaaaaagcagaacagccctgttgccccaaccgcacagccaaaagctccaccatcaaggacacctcagagcggatcagcacctacagccaaggctccccccaaggctacttccacgagagcccagcaacagttggccttcctcgaggggcgcaaaaagcagctgctccaggccgctctgcgggcgaagcagaaaaatgatgttgaaggggcaaaaatgcacctccggcaggcaaagggcctcgaacctatgctggaagctagtcggaatggactgcctgttgatattaccaaggtgcccccagcgccagtcaacaaagatgatttcgccctcgttcagagacccggaccaggtttatctcaagaagcagcccgccgttatggagaactaactaagctgatccgacagcagcatgagatgtgcctgaatcacagtaatcagtttacacaactcggaaacatcactgagactaccaagttcgagaaactggcagaagattgcaagaggtctatggatatcttgaaacaagcattcgttagggggttgcctaccccaaccgccaggttcgaacaacggaccttcagtgtgataaagatctttccagacctgagctccaatgacatgttgttatttatagtgaaagggatcaacctgcccacgccacccggactgtctccaggcgacctcgatgtttttgtgcgttttgattttccctacccaaacgtcgaagaggctcaaaaagacaaaacatctgttattaaaaataccgattcccccgaattcaaggaacagtttaagctgtgcatcaaccggagccatcggggttttaggcgagcgatccagacaaagggtatcaaatttgaggtggtgcataaaggagggctcttcaaaaccgatagggtgctgggcaccgcccaactgaaactggacgctctcgagattgcctgcgaggtcagggaaattttggaggtgttggatgggaggagaccgacaggggggcgactggaggtgatggtccggatccgggaaccgctcacagctcagcagctggagactaccactgagcggtggcttgtgatcgatcccgtgcctgctgctgtcccaacccaagttgctgggccgaagggtaaggcaccaccggttccagccccagctagagaaagcgggaatcgcagcgcaagacctttacatagtctatcggtgctcgccttcgatcaggagcggctggagagaaagatcctcgcgctcaggcaagccaggagacctgtcccgcccgaagttgcgcagcagtatcaggacatcatgcaacgatcgcaatggcaacgggcacaactggagcaaggaggcgtgggtattcgccgcgaatatgcggcccagcttgaaagacaacttcaattctatacagaagccgcccgccgcctcggaaacgacgggagcagagacgcagccaaagaagctctttatcgccggaacctggtggaaagcgagctgcagaggcttagacgctag

SEQ ID NO: 183359 - DNA, 711 bp, synthetic construct
  misc_feature 1..711: note = Description of Artificial Sequence: Synthetic coding sequence
  source 1..711: mol_type = other DNA
tggcacagccccgacggcctgatgatccccgaggacggcgccaacgatgaagaactggaagccgagtttttggccctggtgggaggccaaccgcccgcgctggagaaactgaaaggcaagggacctctccctatggaggcgatcgagaagatggcctccctttgcatgcgcgaccccgacgaagatgaagaagagggtacagacgaggacgatctcgaggcagatgacgaccttctcgcagaactgaatgaggtactcggtgaagagcagaaggccagtgagacccccccaccggtggctcagccgaagcctgaggcccctcaccctggactggagaccactctgcaagagcgcctggccctgtaccagacagccatagaatcggcccgccaggctggcgattccgctaagatgagacggtatgataggggtctaaagacattggagaaccttctagccagtattcggaaggggaatgcaatagatgaggcagacatacctccacccgtggctatcggaaagggtcccgcgtcaacccctacatatagtcccgcccctactcagcctgcgccccgcattgcctcagcccccgaaccaagggtcacgctcgaagggccctcagcaactgcccccgctagctccccgggccttgctaaacctcaaatgccacccggcccatgttctcccggcccgctcgcccagctgcagtag

SEQ ID NO: 183360 - DNA, 1116 bp, synthetic construct
  misc_feature 1..1116: note = Description of Artificial Sequence: Synthetic coding sequence
  source 1..1116: mol_type = other DNA
atgccccccggcccctgcagccccggccccctggcccagctgcagtctaggcaaagagactacaaattggcagccctgcatgcgaagcagcaaggcgatacaaccgccgccgccaggcattttagagtggctaagagcttcgacgcagtcctggaggccctcagtagaggggagccggtggatctgagttgtcttcccccgccccctgatcaacttcctcccgacccacccagccccccatctcagcctcccacaccggcgacggccccatcaaccacagaggtaccaccgcccccccgcacacttctggaagctctcgagcaacggatggagaggtaccaggtagccgccgcgcaggcgaaatctaaaggggaccagcgaaaggcccggatgcatgagcgtatcgtgaaacagtatcaagatgccatccgggcccataaagctgggagggcagtcgacgtggctgagctgccagtccccccgggtttcccacctatccagggacttgaggcaaccaaaccaacccaacagagccttgtcggcgttctggaaaccgcaatgaagctggccaaccaagacgagggcccggaagacgaggaagatgaagttccgaaaaagcagaattccccagtggcccccactgcccagccgaaggcacccccaagccggactccgcagtctggcagtgcgccaacagctaaagcccctcccaaagctactagcacccgggctcagcagcaactggcctttcttgagggccggaagaagcagcttctgcaggcagccttgcgtgccaagcagaagaacgacgtggagggtgccaagatgcatctgagacaggccaagggactggaacctatgttggaggcctctagaaacggcttacctgtggacatcacaaaagttcctcctgcgccagtgaataaggacgacttcgccctggtgcagagacctggccctgggctctctcaggaagccgccaggaggtacggtgagcttaccaagctgatccgccagcagcacgagatgtgcctgaaccattctaaccagttcacgcagctgggcaatatcacggaaaccaccaaggccaatatggtaaaaccatgtttctattag

SEQ ID NO: 183361 - DNA, 4539 bp, synthetic construct
  misc_feature 1..4539: note = Description of Artificial Sequence: Synthetic coding sequence
  source 1..4539: mol_type = other DNA
atggtgagcgagaagagccacctgggcaacccccaggagcccgtgcaggaggaacctaagactcggctgctgtctatgaccgtccgccgaggccctaggagcctgcctccgatcccatcaacatccagaacgggattcgctgagttctccatgcggggtcggatgagggaaaagttacaggcggcccgctcgaaggccgagtcagcgctgctgcaggagatccccaccccgagaccacgaaggctgcggtccccttccaagaaggagctggagaccgaattcgggacagagccaggcaaagaagtcgagagaacccagcaggaagttgactctcagtcatatagcagggtgaagttccatgacagcgccagaaagattaagcccaaaccccaggtacctccagggtttcccagtgccgaggaggcctataatttcttcactttcaacttcgaccccgagcctgaggggtccgaggaaaagcctaaagcccggcatagggccgggacgaatcaggaggaagaagaaggggaagaggaggagcccccggcccagggcggggggaaagagatggatgaagaggagctcctaaacggcgatgacgctgaagacttcctgctgggtttagatcacgtggccgacgattttgtggccgtgcggccagccgattatgagagtattcatgaccggcttcagatggaaagagaaatgctttttattccctcacgacaaaccgtacctacttataaaaaattgcccgaaaatgtccaacctcggttcctggaggacgaaggcctttacaccggtgtgcggccggaagtggcccgcactaaccaaaacattatggagaaccgactcctcatgcaagatcccgaacgtcgttggtttggcgatgatgggcgaatacttgctcttcccaaccctataaaaccctttccctcacgcccacctgtcttaactcaggaacagagtatcaaagccgaactggaaactctgtacaagaaggcagtgaaatacgtgcattccagccaacacgtgatcagatcaggcgatccccctggaaactttcaactggacatcgatatttctgggctcatctttacacatcatccctgcttctctcgtgaacacgtgttagccgccaagctggctcaactttacgatcagtatctcgcccgccaccagagaaacaaagccaagttcctaaccgacaaactgcaagcactgaggaacgccgtccaaaccgggctagatccggagaagccccaccagagtctggataccatccaaaagactatcaatgaatacaagtctgagattagacagacacggaagttcagagatgctgaacaggagaaggacagaactctgctgaaaactatcatcaaagtctggaaagagatgaagagcctgcgcgagttccagagatttaccaatactccactcaagttggtgctgaggaaggaaaaggccgaccagaaggccgatgaggaggcttacgaggccgaaatacaggccgagatctccgagctgttggaggagcatacggaagagtatgctcagaaaatggaagaatatcgcacatctttacagcagtggaaggcatggcggaaagtccagcgcgccaagaaaaaaaagcgaaagcaggccgcagaagagcaccctggcgatgagatagcagaaccgtatcccgaggaagatttggtaaagcctagccctccagaacccacagatagggcagtcattgaacaggaagtacgcgaacgggccgcccagagcagacgtcgaccatgggaacctacgctggtacctgagctgtcccttgcgggaagcgttactccaaatgaccagtgcccacgggctgaagtgagtcgccgcgaagatgttaaaaagaggagcgtatatctcaaggtcttgttcaataataaggaggtgtctagaacagtgagcaggcccctgggggcagacttcagagttcattttggccagatatttaacctgcagatcgtcaattggcctgaaagcctgactctgcaggtttacgagaccgtgggccacagtagccccacactcctggcagaagtgttcctgcccattcctgagactacagtcgtcacaggcagagctccaaccgaggaggtcgagtttagcagcaaccaacacgtgaccttggatcacgaaggggtgggctcaggcgttccattttcattcgaagccgacggctctaaccaactgacccttatgacatccggcaaagtgtcccacagcgtagcctgggctatcggagaaaacgggattcccttgattcctcctttaagccagcagaacattggcttccgctcagctttgaagaaagccgacgcgatttcttcgatcggcacaagcggcctgacggacatgaagaagttggctaagtgggcagccgaatcaaagttggaccctaatgatcctaataatgctcctctgatgcagttaatttcagtggccacgtctggcgagtcctatgtgcctgattttttccggctggagcaattgcagcaagagttcaattttgtgagcgaccaggagctgaacaggagcaagcggttccgtcttctccacttgagatcccaggaggtgcccgaattccggaactacaagcaggtgcctgtgtatgatcgggaaattatggagaaggtttttcaggactatgaaaaacgtctccgcgatcggaacgtaattgaaacaaaagagcatattgacacacatagagccatcgtggcaaagtaccttcagcaggtgcgagagagcgtaatcaaccggttcctgattgccaagcagtacttccttctggccgatatgatagttgaagaagaggtgccgaatatttccatcctcggcctgtctctattcaagctggcagagcagaagcggcccctgcgtccacgccgcaaaggacggaaaaaggtcacagcgcagaacttgtccgacggggacatcaaactactggtcaacatcgtgcgcgcctacgatattccagttcgaaaacccgctgtgtccaaattccagcagcctagtagatctagcagaatgttttccgagaagcacgctgcatctccttctacctattcccccacccataatgccgattaccccctgggacaggtgttggtgcgccccttcgtggaggtgagctttcagcgaactgtgtgccacaccaccaccgctgagggccccaacccctcatggaacgaggagttggagcttcccttccgtgcccccaatggagactactccacggcttctctgcagtccgtcaaggacgtggtctttatcaatattttcgatgaggtactccacgatgttctagaggacgatagggagagaggttccggcatccacacacgcatagagcggcactggctgggatgcgtgaaaatgcccttcagcacaatttatttccaggctcggtttgagtctcaagaggacgaaaagctcctccaggcaacagaaaagttccaagcggagtgtgctctcaaattccccaatagacagtgtttgaccaccgtgatcgacatttccggaaaaacagtatttatcacacggtatctgaaacctttgaaccctcctcaagagctgctgaacgtgtacccgaacaaccttcaagctacagccgagcttgtcgcgcgctacgttagcctaattccatttctccctgataccgtctcatttgggggtatctgtgacctatggtcaaccagcgaccagtttctggacctcttggcaggtgacgaggaggaacacgctgtgctgctttgtaattacttcctctcactgggcaaaaaggcttggctacttatgggcaatgctattccagaaggccctacagcctacgtactgacctgggagcaaggacggtatctaatttggaacccatgctctggccacttctacggacaatttgacaccttctgccccctgaaaaatgtgggatgtctgattggccccgataacatttggtttaacatccagaggtacgagtccccgctgaggatcaatttcgacgtgacaaggcctaaactctggaagtccttcttctctcgcagcttgccataccccgggctgtcgagcgttcaacccgaggaattgatttaccaacgatcagataaggctgctgccgcagagctccaagatcggatcgaaaagattctcaaagagaagattatggactggaggccaaggcacctcacccgatggaaccgttactgtaccagtactctcaggcattttttacccctgctggagaaatcacagggcgaagatgtggaggacgaccaccgtgccgagttgttaaaacaactgggagattatcgttttagcggcttccctctccacatgccgtacagcgaggttaaacccctcatagatgctgtttattctacaggcgtccacaacattgatgtgccaaatgttgagttcgcattggcagtttacattcatccctatcccaaaaatgtgctcagtgtgtggatctacgttgcctctctcatacggaacaggtag

SEQ ID NO: 183362 - DNA, 4863 bp, synthetic construct
  misc_feature 1..4863: note = Description of Artificial Sequence: Synthetic coding sequence
  source 1..4863: mol_type = other DNA
atgaacccccgggaggagaaggtgaagatcatcaccgaggagttcatcgaaaacgacgaagacgctgatatgggtcgccaaaataaaaacagtaaggtgcggcgacaacctagaaagaagcaacctcctactgccgttccgaaggaaatggtctcagagaaaagtcacttgggtaacccccaagagcccgttcaagaagagcccaagacccggctgctatcgatgaccgtgcgaagaggtccacgttccttaccccctatcccatcgacttccagaaccggattcgccgaattctcgatgcgcgggcgaatgagggaaaaactccaggccgctcgaagcaaggctgaaagcgcacttctgcaagagatcccaacaccgcggccgagaagattacgcagcccatccaagaaggaactggagaccgagtttgggactgaacccggaaaagaagtagagaggacccagcaggaggtggattcacaatcctatagccgagtgaagtttcatgattctgctcggaaaattaagcccaaaccacaggtcccacctggcttccccagcgccgaagaagcctataatttcttcacttttaactttgaccccgaaccggaaggctcagaggaaaaacctaaagctcgccaccgggccgggaccaatcaagaggaggaggagggcgaggaggaggaacccccagcccaggggggggggaaagagatggacgaggaggaacttttgaatggtgatgatgccgaggatttccttctagggttggatcacgtagctgatgacttcgtagcagtgcgccccgctgattatgaaagcattcacgaccggctgcaaatggaacgagagatgctgttcatcccatcgaggcagactgtgcccacttacaagaagcttcccgaaaatgtgcagccccgtttcctggaggatgaaggtctctacactggggttcgacccgaggtggctcggacaaaccagaacattatggagaatcggctgctgatgcaggatcctgagcgccggtggttcggcgatgacgggcgtattcttgccttgccaaatcctatcaagccatttccttcacgacccccagtgctgacacaggagcagtcgatcaaggcagaattggaaactctgtacaaaaaggcggtgaagtacgtacacagtagccagcacgtaattaggtccggcgacccacccgggaattttcagctggatattgatatcagtggcctcatcttcacacaccatccttgtttcagtagggagcacgtcctcgccgcaaaactggcacagctctacgaccaatacttagcacgacaccagcggaataaggcaaagtttttgactgacaaactacaggccctgcgcaacgctgtccaaactggactggatccggagaaaccccaccagtcactggatactatacaaaaaaccatcaatgagtataagtctgagattcgccagactaggaaattcagggacgcagaacaagaaaaagataggacgctactgaagacaatcatcaaggtttggaaagagatgaaaagtcttcgagaattccaaagattcacgaatacccccctgaaactcgtgctcagaaaggagaaggcggaccaaaaagccgacgaggaagcatatgaggcagaaatccaagcggagatctcggaacttttggaggaacatacagaagaatatgcccaaaagatggaggagtatagaacaagcctgcagcagtggaaggcgtggcggaaagtccaacgagctaagaagaagaagcgaaagcaggccgccgaagagcatccgggagacgaaatcgcagaaccataccccgaggaggatctcgtgaaacctagccccccagagcctacagacagagctgtaatcgagcaggaggtgcgagagagagccgcccaaagtcggagacggccctgggagccaacgctggtgccagaactgtcactggcaggatcagttactcccaatgaccagtgtccccgtgccgaggtgagccggagggaagatgtcaagaagagatccgtgtacttgaaggtactgtttaacaataaggaagtgtccagaacggtttcacggccactgggcgccgatttccgagttcactttggccagattttcaatctccagattgtgaactggccggagtcacttaccctgcaggtctatgaaaccgtcgggcacagctctcctactctgttagccgaagtgtttctcccgatccctgaaaccaccgtcgtgacagggagggctccaacagaagaggtggaattttcctccaatcaacacgtgaccctcgaccacgagggtgtcggaagcggagttccatttagcttcgaggctgatggtagcaatcagctaactctgatgacatctggcaaggtgagtcactccgttgcctgggccattggagaaaacgggattcctttaattccaccattaagccaacaaaatataggctttcgtagcgccctgaagaaggcggatgctattagttctattggtacatctgggctaaccgatatgaagaagctggccaagtgggccgcagagagtaagcttgatccaaatgatccaaacaatgcccccttgatgcaacttatttcagtggccacttccggtgagtcatatgtgcctgatttcttccgcctggaacagctgcagcaagaattcaattttgtgtctgatcaggaattgaaccgaagcaaacgcttcaggctgttgcacttacggtcccaagaagtcccagagttcaggaattataaacaggttcctgtctatgacagggagattatggaaaaggtgtttcaggactatgagaagcggcttcgtgatcgcaatgtgatcgagaccaaagaacatatcgacacccaccgagccatcgtagccaaatacctccagcaggttcgggagtccgttatcaatcggttcttaattgctaaacagtattttctgctcgccgacatgatagtggaggaggaagtgcctaacatttctatcctaggactctcattgtttaagctggcagagcagaagaggccgctaaggcctagaagaaagggcagaaaaaaggtaacagcccaaaatctgtcagacggcgacataaagctgctggtgaatatcgtgagggcatacgacatccctgtgagaaaacccgccgtgagtaagtttcaacagccgagcaggtcatcccgtatgttctcagagaagcacgccgctagtcctagcacatactcgcccacccacaatgccgactatcctctggggcaggtgctcgtgagaccgttcgtggaggtatcctttcagcggaccgtttgtcataccacaacagcagagggccccaatccttcgtggaatgaagaacttgaactgcctttcagagcgccaaatggcgattacagcacggcatcattacagtctgtgaaagacgtagtgtttattaatatttttgatgaggtgctgcacgatgtcctggaggatgacagggagaggggttccggcatccacactcgcatcgaacggcactggctcggttgcgtaaagatgcccttctccacaatctatttccaggcacgcatcgatggtacgttcaagatcgatattcccccagtgctcctgggatattccaaggagaggaacatgattttagagaggggatttgatagcgtgcggagcttgagcgagggctcctacataaccctctttatcacaattgagccacagttagtacccggcgagtcaatacgcgaaaaattcgagtcccaggaagatgaaaagcttctacaagctaccgagaagttccaagcagagtgtgccctgaagtttcccaacagacagtgtctgactaccgtaatcgatatttccggcaaaacagtcttcattacaagatacctgaaacccctcaaccccccccaggaactcctgaacgtatatccaaacaatttgcaggcaacggccgagttagtcgcgagatatgttagtctgattccattcttacctgataccgtgtcctttggcggtatatgtgatctgtggtctaccagcgaccaatttctcgacctacttgctggcgatgaggaagagcacgccgtcttgttatgtaactacttcctgtccctcggcaagaaagcgtggctcttgatgggaaatgccatccctgagggtcctaccgcatatgtgcttacctgggagcagggccggtatctcatctggaatccttgtagcggacatttttatggtcagttcgatactttttgcccattgaagaacgtcgggtgcttaattgggcccgataacatctggtttaacatccaacgatacgagtcaccacttcgcatcaactttgacgtgaccaggccaaaattatggaagtcgttcttttcccgtagcctgccctatcctgggctgtccagtgtgcaaccagaggagctgatctaccaacggtctgacaaggcggcggccgcagagctgcaagatcgcattgagaaaatcctgaaggaaaagatcatggactggaggccccggcatctgacgcggtggaatcggtattgtaccagcacactcagacatttcttgccccttttggagaaatcccaaggcgaggacgtggaggacgaccacagagctgaattgttaaagcagcttggcgattacagatttagtggctttcctctgcacatgccgtatagtgaagtgaagccactcatcgacgctgtgtattccactggcgttcataatattgacgttcccaatgtcgagtttgccctggccgtgtatatccacccgtatcccaaaaacgtactctcagtctggatttatgttgcgtctctgatccggaatcgttag

SEQ ID NO: 183363 - DNA, 4863 bp, synthetic construct
  misc_feature 1..4863: note = Description of Artificial Sequence: Synthetic coding sequence
  source 1..4863: mol_type = other DNA
atgaacccccgggaggagaaggtgaagatcatcaccgaggagttcatcgagaatgacgaagatgctgatatgggtaggcaaaacaagaacagtaaggtacgcagacagcctaggaagaaacagccaccaaccgccgtgcccaaggagatggtgtctgagaagagtcacctcgggaacccgcaggaacccgtgcaggaggaaccaaaaactaggctgttatcgatgacggtgagacgtggcccgcgctctttaccgcctattccatctactagcagaacgggctttgctgagttctcaatgcgagggcgaatgagagaaaagctgcaggcagctcgctccaaagcggagtctgcgttacttcaagaaatccccactccacgaccgagacggctcaggtccccttccaagaaagaactcgagaccgagttcggcactgagccgggcaaagaggttgagagaacccagcaggaagtcgactcacaatcttatagtcgggtcaagtttcacgactctgcccggaagattaagcccaagcctcaggtcccgccagggttccccagcgcggaagaagcatacaacttttttacattcaacttcgacccagagccagaagggtcagaggaaaagccaaaggcacgacaccgcgccggaacaaatcaggaagaagaagaaggagaggaagaggagcctccggctcagggtggcggcaaggaaatggatgaagaggagctcctgaatggggatgacgctgaggatttcctgttaggattagaccatgtggcagatgacttcgtagccgtgcggccagccgactacgaatcgattcacgaccggctacagatggagagagaaatgctattcatcccttctcgacagacagtccccacatacaagaagctgcccgaaaatgtgcaaccacggtttctagaagatgagggtctgtataccggagtacggcctgaggtggccaggaccaatcagaacatcatggaaaacagactcctgatgcaggaccctgaacggcgctggttcggagacgatggtagaattcttgcactgcctaaccctattaagccgtttcccagcaggccgccagttcttacccaagaacagtcaatcaaagccgaactggaaacattgtacaaaaaggcggtgaagtacgtacattcttcccaacacgtaattcgcagtggcgatccccccgggaatttccagctggatatagacatctccggtttgatctttacccaccacccctgcttttctagagagcacgtgctggcagctaagctggcacagctgtatgaccagtacttggctcgacaccagcgaaataaagcaaagtttctaactgacaagctgcaagctcttcggaacgccgtgcaaacagggctggatcccgagaaaccccatcagtctttggacacaattcagaaaacaataaatgaatataaatccgaaatccggcagacacggaaattccgagatgcagagcaggagaaggacaggacgctcctaaaaactatcattaaggtctggaaagaaatgaagagcttgagggagtttcagcgtttcaccaacacacctctaaagctggtgttgcggaaagaaaaggccgaccagaaggccgacgaggaggcttacgaagcagaaatccaggcagagatctcggagctcttagaggaacacacggaggaatatgctcaaaagatggaggagtaccggacgagccttcaacaatggaaggcctggcggaaagtgcagcgggccaagaagaagaagaggaaacaagccgccgaggaacatcctggtgacgaaatcgccgaaccttatcccgaagaggatctggtcaagccctcacctcccgagcccaccgatcgtgctgtgattgaacaggaggtgcgggagagagccgcccagtctaggcggagaccctgggagcctacactcgtccccgagctctctttagctggctctgttacgcccaatgatcaatgccctagagccgaagtgtctcgaagggaggatgtgaagaaacgctcggtgtacctgaaagtgcttttcaataacaaggaggtgtcaagaactgtgtcacggccactcggcgctgactttcgtgttcattttggccagatcttcaacctgcagattgtgaattggcctgagtccctgacgttgcaggtgtacgagactgtcggccattcaagcccgacgctcctggccgaagtgtttttgcccattccggaaaccactgtagtgaccggaagagcacctactgaagaggtggagtttagcagtaaccagcacgtgacgctggaccacgaaggggttggctctggggtaccgttctccttcgaagcagacggatcgaatcaacttactctgatgacatcaggcaaagtcagtcactccgttgcttgggccattggggagaatggtatcccccttatccccccactgagtcagcagaatattgggtttagaagcgccctgaagaaagcggacgccatctcctccatcggcacctccggtttaacagatatgaaaaagcttgccaagtgggccgcagaatccaaactcgacccaaatgaccccaataacgcccctctcatgcagctgatcagcgtcgctactagcggagaatcctatgtgccagattttttccgcttggaacaactgcagcaggagtttaacttcgtcagcgaccaagaattgaatcgcagtaaaagattcaggctgttacacctgaggtctcaggaagtgcctgaattccgcaactacaagcaggtacctgtgtacgatcgagagattatggagaaggtgttccaagactacgagaagagactcagggatcgcaacgttattgaaactaaagagcatattgatacccatcgggctattgtggccaagtacctgcaacaggtcagggagtccgttattaaccgatttcttatcgcgaagcagtatttcctgcttgcggatatgattgtggaggaggaagttccaaacatcagtatactgggcctgtccttgttcaaactcgccgaacagaagagacctctgcgccctcgacggaagggccggaagaaagtgacagcacagaatttgtcggacggggacatcaagctgctggtgaatatcgtacgcgcttacgacatccccgtgcgcaagccagctgtctccaagtttcagcagccatctagatctagccgcatgttctccgagaagcatgcggcttcgcccagcacctactcacctacccacaatgctgactacccactgggacaggttcttgttcggccctttgtggaggtaagctttcagagaacagtttgtcataccaccaccgccgagggaccaaacccaagctggaacgaagagttagagcttcctttcagggcgcctaacggcgactacagtaccgccagcttacaaagcgtgaaagacgtggtgttcatcaatatatttgatgaagtgctgcacgatgtccttgaggatgacagggagcgggggtccgggattcacacgcggatcgaaaggcactggttgggctgcgtcaagatgcccttttccactatttacttccaggctagaatcgatggtactttcaagatcgatattcctccagtgttgttgggttactcaaaggaaaggaacatgattctagagcgcggcttcgatagcgtgcgttctctgtctgagggctcttatattaccctctttattacaatcgaaccccagctggtccccggagaatctattcgcgaaaagttcgagagccaggaggatgagaaactgctgcaggccacggagaaattccaggccgaatgtgctctgaagttcccaaatagacagtgtctgactaccgtcattgatatcagcggaaagacagtctttattaccagatatttaaagcccctgaacccgccgcaggagttgctcaacgtttatccaaataatctgcaagctaccgcagaactggtcgcgcggtacgtctctctgattccattcttaccagatacagtgagttttggcggcatatgtgacctctggagcacaagcgatcagtttctagacttgttggcgggcgatgaagaggaacatgctgtcttactgtgcaactactttctgagcttgggcaaaaaagcctggttgctgatgggaaacgctattcccgaggggccaacagcctacgttctgacttgggagcaggggagatatctgatttggaacccttgcagtggccacttttacggacagtttgataccttctgtcccctgaagaatgttggttgccttatcggcccagacaacatctggttcaatatccagaggtacgaatctccgcttaggataaactttgacgtgacccggccaaagctgtggaagagcttcttctctcgttctttaccctacccagggttatcatccgtgcagcctgaggagctcatttaccagcgcagcgataaggctgctgctgctgagttacaagacagaatcgaaaagattctcaaggagaagattatggattggcgcccacgccacctgactcgctggaacagatattgcacatcaacactgcggcatttcctgcctttgctggagaagtcacagggcgaggacgtcgaggatgatcatcgggcggagctgctgaagcagctaggagactaccggttttccggcttcccgttacatatgccctatagtgaggttaagcctctcatcgacgcggtatattccaccggcgtccacaacatcgatgtcccaaacgtggagttcgcattagctgtctatatccatccctaccctaaaaacgtcctcagcgtttggatctatgtcgcttccctgattcggaaccgatag

SEQ ID NO: 183364 - DNA, 4539 bp, synthetic construct
  misc_feature 1..4539: note = Description of Artificial Sequence: Synthetic coding sequence
  source 1..4539: mol_type = other DNA
atggtgagcgagaagagccacctgggcaacccccaggagcccgtgcaggaggaacctaaaacacggttgctctctatgacagtgagacggggcccacgctccctccctccaatcccgtccacttccagaaccggatttgccgaattttcgatgcggggaaggatgcgcgagaagcttcaggccgctaggtctaaggcagagagcgcgttactacaggagattcccaccccaaggcctaggcggctccgctcacctagtaaaaaagaactggaaactgagttcggcaccgagccaggtaaggaagtagagaggacccaacaggaagtcgattctcaatcgtatagtagagtcaagttccacgatagtgcccgcaagataaagcccaagccacaggtgcctccgggctttccctcagcggaagaggcttataatttcttcactttcaacttcgacccagaacccgaagggtcggaggaaaagccaaaggcacggcaccgtgcaggaaccaatcaggaggaggaggagggggaagaggaagaacctcccgcccagggcggcggaaaggaaatggacgaggaggaattgcttaacggggacgacgccgaggacttcctcttgggactcgatcatgtcgccgatgactttgttgccgtcagacctgctgattacgagtcgatccacgaccgtcttcagatggagcgtgagatgctcttcattcccagccggcagacagtgcctacttataaaaagctaccagaaaatgtgcagcccaggtttctggaagacgaaggactgtatactggggttcgaccagaggtggccaggaccaaccaaaatatcatggaaaaccggctactgatgcaggatcccgagcggaggtggtttggtgatgacggacggatcctcgccctacccaatccaattaagccatttccatccagacctcctgtgcttacacaggagcaaagtattaaggctgagctggaaaccttgtataagaaagcagttaagtatgtgcattcatcccagcacgtgatcagatccggcgaccctcctggcaacttccagctggatatcgacatcagcgggcttatcttcacccatcatccatgttttagtcgagagcacgttctcgcagcaaaattggcccagctgtatgaccagtatctggctagacaccagcggaataaggccaaattcctgaccgataagctgcaggccctgcgtaatgccgtccaaaccggcttggatcccgagaaacctcatcagtctttagacaccattcaaaaaaccatcaatgaatacaagagtgaaattagacaaacgaggaagttccgggatgccgaacaggaaaaagaccgcacactgctgaaaactatcatcaaggtatggaaagaaatgaagtcactaagagagtttcagcgctttactaatactcctcttaagctggtgttgcggaaggagaaagccgaccagaaggccgatgaagaggcctatgaagctgagatccaagcagagataagtgagctgctggaagagcacaccgaagagtacgcgcaaaagatggaagagtacaggacctccctgcaacaatggaaggcatggcgcaaggtgcaacgggcgaaaaaaaagaaaagaaagcaagctgccgaggagcacccaggcgacgaaatcgcggaaccatatcccgaagaagatttagtgaagcctagccctcctgagcctacggaccgggccgttattgagcaggaggtcagggaacgtgcagcccagtctaggcgccggccttgggagccaacactcgtccctgagctgtctctggccggctctgtgacacccaacgaccagtgcccgagagccgaagttagtagaagagaggatgtaaagaaacgctccgtctacctcaaagtactgttcaacaacaaagaagtcagcagaactgtctcaagacccctgggcgcagactttcgggtacattttggccaaatctttaacctccagatcgttaactggcctgaatccctaacactccaagtgtatgagacggtcggacattctagccctacgctccttgccgaagttttcttgccgatccctgaaactacggtggtgacaggacgcgcacctacagaggaggtcgaattcagctctaaccaacatgtcaccctcgatcatgagggcgtcgggtccggcgttccatttagcttcgaagctgacgggagtaatcagctgacccttatgacatccggtaaagtgtctcacagtgtagcgtgggctattggagagaacggaatccctttgatacctccacttagccaacagaatatcggatttcggtctgctttaaagaaggcagacgctatctctagtatcggcacctctgggttaaccgacatgaagaaattggctaagtgggccgccgaatcaaaactagaccccaacgacccgaataatgctccactgatgcagctcatctctgtcgcgaccagcggggaatcttacgtgcctgacttttttcggctggagcagcttcaacaggagtttaacttcgtaagtgaccaagagctaaatcgcagcaagaggtttagactgctacatttacgcagtcaggaggtgccagaatttaggaactacaagcaggttccagtgtacgaccgagaaattatggaaaaagtttttcaggactatgagaaacgattacgggaccggaacgtgatcgagaccaaggaacacattgacacgcacagggcgattgtagcaaaatatctacagcaggtgcgtgaaagtgtgattaacagattcctcatagccaaacagtacttcttgctcgcggatatgatcgtcgaagaagaggtgccaaacatttcaatactggggctgagcttgttcaaattggcggaacaaaagagacctttacggcctcgccgcaaggggcggaaaaaagttaccgcccagaacctgtcagatggtgacatcaagctgctcgtgaacatcgttagggcctacgacattccggtccgtaaacccgctgtgtctaagtttcaacagcctagtcgctccagtcgcatgttttcagaaaaacacgcggctagcccctcgacttactcccccactcataatgctgattatcccttaggacaggtgctggttcgaccatttgttgaagtgtccttccaaagaactgtgtgccatacgacaacagccgaggggccgaatcctagctggaacgaagaactggagctccctttcagagccccaaatggggactattctacagcctctcttcagtctgttaaggacgtcgtcttcattaacatctttgatgaagtgttgcacgacgttctggaagatgacagggagagagggtccgggattcacaccagaatcgaacgccactggttaggctgtgttaaaatgcccttctctactatctacttccaggccagattcgagagccaggaggacgaaaagctgctgcaggcaacagaaaagttccaggccgagtgtgccctgaaatttcctaatcggcagtgccttacaaccgtgatcgatattagcggtaaaaccgttttcataacacgctacctgaagccgttaaatccgccgcaagagctgctaaacgtataccctaataacctacaggccaccgctgagctggtggcaaggtacgtcagcctgatcccattcttgcccgacactgtgagctttggcgggatttgtgacctctggagcaccagtgatcaatttctcgacttgctggccggagatgaggaggagcacgcagtgctgctgtgcaattactttctgtctctgggaaaaaaagcttggcttctgatgggtaatgccatccctgagggcccaactgcctacgtgcttacctgggagcaggggcgatatctgatctggaatccatgttctgggcacttttacggacagtttgacaccttttgcccgctgaaaaacgttggctgtcttatcggaccggataacatatggttcaacattcagcgctatgagtcccccctacgaatcaatttcgacgtgactcggcccaaactgtggaagtcctttttctcacgatcgctgccataccctgggctgagctctgtccagcccgaagagctcatttaccaacgttctgacaaagccgctgctgctgagctgcaggacagaatcgagaaaattctgaaggaaaaaatcatggattggagaccccgtcacctcacacgttggaacagatactgcactagcacactgagacattttctcccgctgctggagaagtcccagggtgaagacgtggaagacgatcaccgtgccgagcttttaaagcagctaggagattaccgcttttccggctttcccctacacatgccatacagcgaagtcaagccgctgattgatgctgtgtactctacaggagtacataatatcgacgtgccaaatgtggaatttgccctggccgtctatattcatccatatccaaagaatgtgctgtccgtttggatctacgttgcgtcccttatcagaaatcgctag

SEQ ID NO: 183365 - DNA, 369 bp, synthetic construct
  misc_feature 1..369: note = Description of Artificial Sequence: Synthetic coding sequence
  source 1..369: mol_type = other DNA
atgaacccccgggaggagaaggtgaagatcatcaccgaggagttcatcgaaaacgatgaagatgcagatatgggaagacaaaacaaaaatagcaaggtccgtcgccaaccacggaagaagcagaagcccacaccgttttctagagcctgttggcagatcttacctcatctgtcagcaggagtgcccctgctgggatgggaacacccggtgcagggaaagtccttccaagcaactaactgttgtcctcagggcaatggagtcaggaagattcccccctggcagcctccaggagcatgtgctggcggggcacaggaccccccccccgagtacgacagtccagagcggcccaccgaacgagccgggtgctag

SEQ ID NO: 183366 - DNA, 4863 bp, synthetic construct
  misc_feature 1..4863: note = Description of Artificial Sequence: Synthetic coding sequence
  source 1..4863: mol_type = other DNA
atgaacccccgggaggagaaggtgaagatcatcaccgaggagttcatcgaaaatgatgaggacgcggatatgggtagacagaataagaactctaaagtcaggagacaaccccggaagaagcagcctcctacggccgtacccaaggagatggtgagcgaaaagagtcacctcggcaacccccaggagcccgttcaggaggaacctaaaactagactgctcagtatgaccgttagaaggggacctaggtctctgccgcccattccttccacttcaagaacagggtttgctgaatttagcatgcgggggaggatgcgcgagaagcttcaggcggcgaggagcaaggccgaaagcgccctattacaggagattccaacaccccgacctcgaaggctgcggtctccaagcaagaaagagctcgagacagagtttggaaccgaacccggcaaggaggtggaacgcacacagcaagaggttgactcgcagagctattcacgagtcaagtttcatgattcagcccgcaagatcaagcccaagccgcaggtcccacccggcttcccctctgcagaagaggcatataatttttttaccttcaacttcgaccctgaaccagagggatcagaggagaaacccaaggctaggcatcgggccggtacaaaccaggaagaggaggaaggggaagaagaagaaccccccgcgcaaggcggtgggaaagagatggacgaggaggagctgctgaacggcgacgatgcagaagatttcttactcgggttggaccatgtcgccgacgatttcgtcgctgtccggcccgctgactacgaatccatccacgacaggcttcagatggagcgggagatgcttttcatacctagtcgtcagacagttccaacctacaagaagctgcccgagaatgtccagccgagattcctcgaggacgaggggctctataccggcgtgcgacccgaggtggcgcggactaatcaaaatattatggagaaccggctgttgatgcaggaccccgagcggcgctggttcggtgatgatggacgcatactggccttgcctaacccaattaaaccgtttccctcgaggccccccgtgctgacacaagagcagtccatcaaggctgaacttgaaactctatacaaaaaagccgttaaatatgtgcattcctcacagcatgtaattcgatcaggcgatcctccagggaattttcagcttgacattgatatctctggactgatttttacacaccatccttgcttctctcgggagcacgtgttggcagctaaattagcccaactttatgaccagtacctagcaagacatcagcgaaacaaagcaaaattcttgacggacaaattgcaggctctgcgcaatgcagtgcagacgggtctggaccccgagaagccccatcagtccttggatacaatccaaaagaccattaatgaatataagtcggaaattcgccagactcggaagtttcgggacgccgaacaagagaaggatagaactttgcttaaaaccattatcaaggtgtggaaagagatgaagagtcttcgggaattccaaagattcactaacacccccctgaagctggtcctaagaaaggagaaggctgaccagaaggcagatgaggaagcctatgaagccgaaatccaagcagaaattagtgagttgctggaagaacataccgaagagtacgcacagaaaatggaagagtacaggacaagcttacagcagtggaaagcctggcggaaagtccagagggccaaaaagaagaaaaggaagcaggctgcagaggagcaccccggcgatgaaattgccgaaccctacccagaggaggacctggttaaaccttctcctccagagccaacagatagagccgtcattgagcaggaggtacgggaaagggccgcgcaatctcgcagaaggccatgggaaccaactttggtccctgaactttctctggccggatccgtcactccaaacgaccagtgcccaagagccgaggtgtctcgccgcgaagacgttaagaagcgtagcgtttaccttaaggtcctcttcaacaataaagaggtgtcccgcactgtttctcgcccacttggcgccgacttccgagttcattttggccagatcttcaatctgcaaatcgtcaactggcctgagagtcttacgctccaggtgtacgaaacagtcggccacagcagtcccaccctcttggccgaggtgtttttgcccatccccgagaccaccgtggttaccggtagagctccaaccgaggaggtcgagttttcctccaatcagcacgttacgttagatcacgaaggcgtcggatccggagtccccttttcttttgaagctgacggaagtaaccagctaacgctcatgacctcggggaaagtgtctcactccgtcgcctgggccatcggcgagaatgggatccccttgattcctcctctgtctcaacagaacatcggatttagaagcgccctgaagaaggcagatgctatcagcagcattgggactagtggcttaactgatatgaagaagctggcgaaatgggccgccgagtcaaagctggatcccaacgacccaaacaacgccccactgatgcagctcatctcagtagccactagcggcgagtcatacgtacccgatttctttaggttagagcagcttcaacaggagtttaatttcgtcagtgatcaagaactgaatcggtccaaaaggttcaggctgctacacctgcggtctcaggaggtacccgaatttcggaattacaagcaggtcccagtgtacgacagagagatcatggagaaggtgtttcaggactacgagaagaggctgcgagatagaaatgtgattgagacaaaggagcatatcgacacacaccgtgccatagtggccaaatatttgcaacaagtgagagaatctgtgattaaccgttttctcatagctaagcagtacttcctgctggccgacatgatagtggaggaggaggtccctaacatcagcatactcggactcagcctttttaagttggccgagcagaaacgccctcttcgccccagacggaaggggagaaaaaaggttacagctcagaacctgagtgacggcgacatcaagctcttagtaaatatcgtccgggcctacgatattcccgtccggaagcccgccgtgtcaaaatttcaacagccatcaagatcaagccgaatgttttccgagaagcatgccgctagcccaagcacttacagcccaacacacaacgcagactatcctctggggcaggtgctggtgcgcccattcgtcgaagtgtcctttcagcgcacagtttgccacactacgacagccgagggcccaaatcccagttggaacgaggaactagagctgccgttccgcgctccaaatggggactattccaccgccagcctacagagtgtgaaggacgtagtattcatcaacatatttgacgaagttcttcacgacgtgctcgaggacgatagggaaagaggttcaggaatacatactcgaatagagcgtcattggttagggtgtgtcaaaatgccattcagtaccatctactttcaggccagaatcgatggcaccttcaagattgatatccccccagtgttgctaggctatagcaaggagcgcaacatgatcctggagaggggatttgactctgtgaggtctctaagcgagggatcctacattacactcttcatcaccatcgaacctcagctggtgcctggcgagtctatcagggaaaaatttgagtcccaggaggatgagaagctactgcaagctactgagaagtttcaagctgagtgtgccctgaaattccccaatcgacagtgcttaacaactgtgatcgacatttccggaaaaaccgtctttattacccggtatctgaagcccctaaatcctccacaggagctgttgaacgtatatcctaacaacttacaggctaccgccgagctggtggccagatatgtcagccttataccatttctgcccgacacggtctcattcggcggcatttgtgacctgtggagcacgtctgaccaatttctggatctgctggccggcgacgaagaagaacacgcagtgttactctgcaattatttcctgtccctcggaaaaaaggcctggttgctgatgggaaacgctatccctgaagggcccaccgcttatgttctgacgtgggagcaggggcgttatctgatctggaacccctgctctggccatttttatggccagtttgatacgttctgcccccttaaaaatgtagggtgcttgataggtccagacaacatctggtttaatatccaacgatacgagagccctttacgaataaacttcgatgtgacccggccgaagctctggaagtcttttttctcacgttctttaccctaccccggtctctcaagcgttcaacctgaggagctgatctatcagagatctgacaaagccgctgcagctgagctgcaggatcgcatcgaaaaaattctgaaagagaaaataatggattggaggcccaggcatctgaccagatggaaccggtactgtactagcaccctgcgccacttcttgcccttgcttgagaagtcacagggagaagacgtcgaagacgaccaccgggccgagctgctgaagcagctaggggactatagattttctgggtttccccttcacatgccttattcagaggtgaaaccacttatagatgcagtctactccaccggagttcacaatatcgatgtacctaacgtcgagttcgctctcgctgtgtatatccacccttaccccaagaatgtgttgtccgtctggatctatgtggctagcttaatccggaaccgttag

SEQ ID NO: 183367 - DNA, 369 bp, synthetic construct
  misc_feature 1..369: note = Description of Artificial Sequence: Synthetic coding sequence
  source 1..369: mol_type = other DNA
atgaacccccgggaggagaaggtgaagatcatcaccgaggagttcatcgaaaacgacgaggacgccgacatgggtcggcaaaacaaaaatagcaaagtgcggcggcaaccacgcaagaagcagaaacccactccattttctagggcatgctggcagatcctgccgcacctgagcgccggtgtaccgctactggggtgggaacacccagtgcagggcaaaagcttccaagccacgaattgttgtccccagggtaacggcgtccgcaaaatccccccctggcaaccgcctggggcttgcgccggcggagcccaagatcccccacctgagtacgactcccctgaacggcccaccgagagagccggctgctag

SEQ ID NO: 183368 - DNA, 4539 bp, synthetic construct
  misc_feature 1..4539: note = Description of Artificial Sequence: Synthetic coding sequence
  source 1..4539: mol_type = other DNA
atggtgagcgagaagagccacctgggcaacccccaggagcccgtgcaggaagaaccaaaaacgcgcctcctaagtatgactgtaaggaggggaccaagatccttgccccctattccctcaacaagccgaacgggattcgccgagttcagcatgcggggccggatgagggagaagctacaggccgcccgctccaaggcggaaagtgccctgctgcaagagataccaaccccacgtccacgacggctacgcagtcccagcaagaaggaactggagaccgagttcgggacagagccaggaaaagaagttgagaggacacaacaggaagtcgactcccagagttactcccgtgtaaagtttcacgatagtgcccgtaaaattaaacccaagccacaggtccctccaggattcccttcagccgaagaggcttacaacttttttacttttaacttcgatcctgaacctgaaggcagcgaggagaagcctaaggcaagacacagggctggcacaaaccaagaggaagaggagggggaagaggaggaacctcctgcccaaggcggcggaaaggaaatggatgaggaagagcttctgaatggggacgatgcagaggacttcctgctaggcctggaccatgttgctgatgatttcgtggcagtgcgccccgcagactatgaatccattcacgaccgcttgcagatggaacgtgagatgctctttatcccgtcccggcagaccgttccaacctataaaaagcttccagagaatgtgcagccccgcttcctcgaagatgagggcctgtatacaggtgtgcggccagaagtggccaggacaaatcaaaacatcatggaaaatcgcctgttgatgcaggaccccgagcgacgatggtttggagacgatggtaggatcctagcacttcccaaccccatcaagccgttccccagtagacctcccgtcttgacacaggagcagagtatcaaggctgaactcgaaaccctctataaaaaggccgtgaagtacgtgcactccagtcagcacgtcatacgctccggggaccctcccggaaatttccagttggatatcgacatatccggcctgattttcacacatcacccctgctttagcagggaacacgtcctggccgcaaagttggctcagctctacgaccaatatttagcacggcaccagcgtaataaggcaaagttcctgactgataaactccaggccctgaggaatgctgttcagacaggactcgatcccgaaaaaccacatcagagcctggacactatccagaagaccatcaacgagtacaagtccgagattcggcagacccgtaagtttagagatgccgagcaagagaaagatcgtacactgctgaaaacaattattaaggtgtggaaagaaatgaagtcgctgagggagttccagcgctttacaaatacacctttgaagctggttttaagaaaagaaaaagccgaccaaaaagcggatgaagaggcttacgaagccgagatccaagctgagatcagcgagctgttggaggagcatactgaggaatacgcccagaaaatggaggaatatcggactagtttacagcagtggaaggcctggcgaaaggtgcaacgggccaagaagaagaaacgcaaacaagccgctgaggaacacccaggagatgaaattgctgaaccttacccagaggaagacctggttaagccttctcctccagagcccactgacagggcagtgatcgaacaggaggtgcgggagagggccgctcagtcccgccgccgcccttgggaaccgaccctagtacccgagctaagcctggccggtagtgttaccccaaatgatcagtgcccgcgcgctgaggtttctcggcgcgaggacgtcaaaaagcggagtgtttatcttaaagtcctttttaacaataaagaggttagtcgcactgtaagtcgcccattgggggctgacttcagagtccattttggccagatcttcaacctccagattgttaattggccggagtctctgacattacaagtatacgaaactgtgggccactcatctccaacactgctggccgaggtgttcctgccgatcccagagactacagttgttaccggtagagctccgacagaggaggtggagttttcgtctaaccagcacgtgacattggaccacgagggggtgggttcaggcgtcccttttagttttgaagctgatggcagcaatcagttaaccctcatgacttctggcaaagtatctcactcagtagcctgggctattggcgagaacgggatccctctgatccctcctctaagccagcagaacatcggcttccgatccgctcttaaaaaagcagatgctatttcatccatcggaactagcgggttgaccgacatgaaaaaactcgcaaagtgggcagccgagtccaaattagaccctaatgaccccaacaatgctccgctgatgcaactgatctccgttgccacctccggagagtcatacgtgccggacttctttcgactcgagcagctccagcaggagttcaattttgtaagtgatcaagagctgaaccggtctaagcgttttaggttgctccacctccgctcacaagaggtgcccgagttccggaattacaaacaggtgcctgtgtacgaccgtgaaatcatggaaaaagttttccaagattacgaaaaaaggctgagggacagaaatgtgatcgagacgaaggaacatatcgatacgcaccgcgcgatcgtggccaagtacctgcagcaggttcgtgagagcgtgattaaccggtttctgatagctaaacagtatttcctgttggccgatatgattgtggaggaggaggtccctaatattagtatcctgggcctgtccctatttaaactagctgagcagaaacgccctctacggccaagacggaaaggccggaagaaggttactgcgcaaaatctgtcggatggggacatcaagcttctcgtcaacatcgttcgtgcttacgacatacctgtgaggaagccagccgtgagtaaattccagcaacctagccggagctcccgcatgtttagcgagaaacacgcggcctctccgagcacctatagcccgactcacaatgccgattatcccttgggacaggtcctagtgagacctttcgttgaagtctccttccagcggactgtatgtcatactactaccgctgagggccccaatccaagttggaacgaagagctagagctgccattccgcgcgcctaatggggactattcgactgcgtctctgcagagcgttaaagacgtcgtcttcatcaatattttcgatgaggtgctgcatgatgtgcttgaggacgaccgagagaggggttctggtattcatacacggattgaaaggcattggctgggatgcgtgaaaatgccattttctactatctactttcaggcaaggttcgagtctcaggaagacgagaagctgctgcaggccaccgaaaaatttcaggcagagtgcgcactcaagtttccgaacaggcagtgcctaactaccgtaattgacattagcggaaagacagtctttatcacccggtacttgaagccattgaatccgccccaggagctcttgaacgtctatcctaataacctgcaagctaccgctgaactggttgcccgctatgtctcactgattccctttctgccagacactgtttcttttggcggaatctgtgacttgtggtcgacgtcggaccagtttcttgatttactggccggcgatgaggaggaacacgcagttctgctgtgcaattatttcctgagcctcggcaagaaggcctggctgttgatgggcaacgcaattccagagggtcctaccgcctacgtactgacatgggagcagggacgatatcttatttggaatccatgctccggccatttctacggacagttcgatacattctgtcctctgaaaaatgtgggctgcctcattggccccgataacatctggtttaatattcagcgatacgagtctcctttgcgcattaacttcgacgtgacccgacccaagctttggaagtcgttcttctctaggtcacttccctatcctggtctgagctccgttcagccagaagaactcatataccaacgcagtgacaaggcagctgcagcagaactccaagaccggattgaaaagatcctgaaagagaagatcatggactggcgaccccgccacctaactaggtggaacagatactgcacctccacacttcggcactttcttcctttactcgagaaaagccagggagaggatgttgaggacgatcaccgcgcggaactcctgaaacagctgggcgattatcggtttagcggattccccctccacatgccgtattctgaagtcaaacctctgatcgatgctgtctactctaccggcgtacacaacattgatgtccctaatgtcgagttcgcactagcggtgtatatacacccatatcccaagaacgttctgtcagtctggatctatgttgcttccctcataaggaaccgatag

SEQ ID NO: 183369 - DNA, 369 bp, synthetic construct
  misc_feature 1..369: note = Description of Artificial Sequence: Synthetic coding sequence
  source 1..369: mol_type = other DNA
atgaacccccgggaggagaaggtgaagatcatcaccgaggagttcattgagaatgatgaggatgccgacatgggtcgtcagaataaaaatagcaaggtgagaaggcagcctcgaaaaaaacagaagcccacccccttttctagagcatgttggcagattcttccacaccttagcgccggcgttccactgctcgggtgggagcatcctgttcaaggcaagtcctttcaggcaactaactgctgccctcagggaaacggtgtccgtaaaatccctccttggcaacccccgggggcttgtgcaggaggcgcccaggatccacccccagaatatgatagccccgagaggcccacagaacgagctggctgctag

SEQ ID NO: 183370 - DNA, 1767 bp, synthetic construct
  misc_feature 1..1767: note = Description of Artificial Sequence: Synthetic coding sequence
  source 1..1767: mol_type = other DNA
atgaacccccgggaggagaaggtgaagatcatcaccgaggagttcatcgaaaatgacgaggacgcagacatggggcggcaaaacaagaactctaaggtgcgccggcaaccccgcaagaaacaaccgccgactgccgtgcctaaagagatggtgtcagagaaatcacacctgggcaatccacaggagccagttcaggaagaaccgaagacacgcttgttgagtatgactgtgaggagaggacctcggtcattacccccgattccatccactagtaggaccggtttcgcggagtttagcatgagggggcggatgcgagagaagctccaagcagcccgatcaaaagccgaaagcgccctgttgcaggagattcctaccccaaggcctagacgactccggagtcctagcaagaaagagcttgagaccgaatttggcaccgagcctggcaaagaggtggaacggacccaacaagaggtcgattctcagtcatattctcgggtgaagttccacgattccgctcggaaaatcaagccaaagccgcaggttccacctggtttccccagcgcggaggaggcctacaactttttcacattcaactttgaccctgagcccgaggggagcgaagaaaagccgaaggctagacatcgggctggaaccaaccaggaagaagaggagggagaagaggaagagcctcctgcccaggggggggggaaagagatggatgaggaagagctgctcaatggcgatgacgcagaagattttctcttaggcttggatcacgtagctgacgacttcgtagccgtacggcccgcagactacgaaagtatccacgatcgcttgcagatggaaagggagatgctgttcatcccttctcgacagactgttcccacctataaaaaacttcccgagaacgtccaaccacggtttctggaggacgagggcctctatactggcgtccgtcctgaggttgcccgaacaaaccagaacatcatggagaataggttgctgatgcaggaccctgagagacgttggtttggagacgacggccggattctggccttgcccaaccctattaagccctttccttcacggcctcccgtcctgacccaagaacagagcatcaaggctgagctggaaactctttataagaaagccgttaagtatgtccattcatcacaacacgtgatccgaagtggggaccccccaggtaactttcagctggatatagacattagcgggttgatattcacacatcatccttgttttagccgcgaacatgtgctggccgctaaacttgcacagctctatgaccaatatctcgcccgccaccagcggaacaaggccaagttcctgaccgacaaattgcaggcgctccgcaatgccgtgcaaactggtttggatcctgagaaaccccatcagtcactcgacacaatacagaagacaatcaacgagtacaaatctgagatacggcagacccgtaagttcagagacgccgagcaagagaaggaccgaaccctcctcaagaccattatcaaggtgtggaaggagatgaaatccttaagggaatttcaacggtttactaatactccacttaaattagtgcttcgcaaggagaaggccgaccaaaaagctgacgaggaggcctatgaagctgagattcaagcggaaatttctgagctgcttgaggaacatacagaggagtatgcgcagaaaatggaggagtaccgcacaagtttacagcagtggaaggcttggaggaaggtgcagtag

SEQ ID NO: 183371 - DNA, 336 bp, synthetic construct
  misc_feature 1..336: note = Description of Artificial Sequence: Synthetic coding sequence
  source 1..336: mol_type = other DNA
atgaacccccgggaggagaaggtgaagatcatcaccgaggagttcatagaaaacgacgaggatgctgacatggggcggcagaataaaaattccaaggtccggcggcagccaagaaagaaacagccccccaccgctgtcccaaaggagatggtgtctgaaaaatcacacctggggaaccctcaagaaccagtccaggaggagccaaaaacacgtctcttatctatgaccgtccggaggggtccacgacgcgaactggtggtgaaaaagtcactggggcgcccgggcactgtcacccacgtctgtaatccaagcacactggaaggccgagggggttag

SEQ ID NO: 183372 - DNA, 882 bp, synthetic construct
  misc_feature 1..882: note = Description of Artificial Sequence: Synthetic coding sequence
  source 1..882: mol_type = other DNA
atggccctggtgagcgccgacagccggatcgccgagctgctgaccgaattacaccaacttatcaaacaaacgcaggaggaaaggtctagaagcgagcacaatctagtaaacatccaaaagactcacgaacgtatgcagaccgaaaataagatttcgccatactacaggacaaagctcagaggtctgtatacaaccgctaaggccgatgcagaggccgagtgcaacattttaagaaaagccctcgacaaaatcgcagaaataaaaagcttgctagaggagcgtaggatcgcagccaaaattgccgggctctataacgactctgagcccccacgtaaaacgatgaggaggggcgtcttaatgacacttctccaacagagcgctatgacccttcccctctggatagggaaacctggtgataagccaccccctctctgcggtgctatccctgcttctggcgattacgtggcgcgccctggggacaaagtggctgccagggttaaggcggtggacggagatgagcagtggattctggcagaagtcgtctcctacagccatgccacaaataagtacgaggtcgatgatattgacgaagaaggcaaggagagacatacattgagccggaggagagtgataccccttccacagtggaaagccaatccggaaaccgaccctgaggcattatttcagaaggaacagctggtcctcgcactctatcctcagacaacatgtttctaccgggctttgatccacgcacctccacaacggcctcaggatgattatagcgtgctgttcgaggatacttcatacgccgacggctactccccccccctcaatgtcgctcagcgctacgtcgttgcttgcaaggaacctaagaaaaagtag

SEQ ID NO: 183373 - DNA, 843 bp, synthetic construct
  misc_feature 1..843: note = Description of Artificial Sequence: Synthetic coding sequence
  source 1..843: mol_type = other DNA
atgaacgaccggagcagccggcggcggaccatgaaggacgacgagacattcgagatctccatcccctttgacgaagcaccacatctcgatccgcagatcttctattctctgagccccagtcgcagaaacttcgaagagcctcccgaggccgcaagtagcgccctggccctcatgaatagtgtcaaaacccagctgcacatggcgctggaacggaattcttggctgcagaagcggattgaagatctggaggaggagagagatttccttcgatgccagctggacaagttcatatccagtgcgcgcatggaggcagaggaccactgcaggatgaagcctggacctaggagaatggagggagacagtcgaggtggcgcgggtggcgaggcatctgatccagaatctgccgcctcctcgctaagcggcgctagtgaggaagggtccgcatccgaaagacggcgacagaaacagaaggggggcgcctcacgcagaagattcggaaaacccaaagcaagggagcgccaacgtgtcaaagacgcagacggcgtactttgcaggtataagaagatacttggaacctttcagaagttgaagagcatgagccgggcatttgagcatcatagagtggaccggaatactgtggctttaaccacacctatcgccgagctcctcattgtggctcccgaaaaactggccgaggtcggggagtttgacccatcaaaagaacgtctcctcgaatatagcaggcggtgcttcctagccctcgatgacgagacgttgaagaaagtccaagcactgaagaagtccaaactgcttctgcctatcacctacaggtttaagagatag

SEQ ID NO: 183374 - DNA, 495 bp, synthetic construct
  misc_feature 1..495: note = Description of Artificial Sequence: Synthetic coding sequence
  source 1..495: mol_type = other DNA
atgatgctgacccaggcccccagcagcgtggtgcggagccggaacagtcggaatcatacagtgaactccggcgggtcctgcttgagcgcaagtaccgtagccatccccgctatcaatgactctagcgccgctatgagtgcatgcagcaccatctcggcacagcctgcatcttctatggacacccaaatgcactccccgaaaaaacaagagcgagtgaacaagcgtgttatatgggggattgaggtggcggaagaactacactggaaaggatgggagctcggaaaagaaacgactcgcaacttggtgctcaagaacaggagtctcaaattgcagaagatgaaatataggtatcagtacaagggcagtaggacgcagtgtcattccctagaaccccgcaaacaggctttgttcaagaccaagcagaataagcagaaaaaaccattgacttgccacatcaaagcctccgaatgcctgaagtacgtgcagtatgaatag

SEQ ID NO: 183375 - DNA, 495 bp, synthetic construct
  misc_feature 1..495: note = Description of Artificial Sequence: Synthetic coding sequence
  source 1..495: mol_type = other DNA
atgatgctgacccaggcccccagcagcgtggtgcggagccggaactctcgcaatcacacagtcaattccgggggatcctgcctctcagcctctactgttgcaataccggccatcaacgacagctctgccgcaatgtctgcctgttctaccatttctgcccagccagcctcatcgatggacacccaaatgcacagtcctaaaaaacaggagagggtgaataagcgcgtgatctggggcatcgaagtggccgaggagctccattggaagggatgggagctagggaaggaaacaactcgcaatctggtgttgaagaaccggtccctgaaactacagaagatgaagtacaggtaccaatacaaaggctccagaacacaatgccactccctggaaccgcgaaagcaggccttgtttaagacaaaacaaaacaagcagaagaagcctttgacttgccatatcaaggccagtgagtgtctcaagtatgtgcagtacgagtag

SEQ ID NO: 183376 - DNA, 5778 bp, synthetic construct
  misc_feature 1..5778: note = Description of Artificial Sequence: Synthetic coding sequence
  source 1..5778: mol_type = other DNA
atgttcaccctgaccggctgccggctggtggagaagacccagaaggtcgagaacccctcagtctcattcgcttctagctttcccttgattccactcctcttaagaggcaaatccgtacagaaaaaacaggcagagtctaagtctcagattaaactccatacacagagtgccccgttcggcctatgtccaaaggacatgatgctgactcaggccccaagctcagttgtgcgttctcgaaatagtagaaatcatacagtcaattcggggggaagttgcctatctgcgtccacagttgcgatccccgctataaacgactcttcagcagctatgagcgcatgtagcacgatatcagcccaacccgcctccagcatggacactcagatgcattctccaaagaagcaggagcgtgttaacaaacgagttatttggggcatcgaggtggccgaggagctgcattggaaagggtgggagctgggaaaggaaacaacgcggaaccttgtcttgaagaatcgctccctgaaactgcaaaagatgaagtatcgtcctccgaagactaaatttttctttacagtcatcccccagcccattttcctgtcacctggaattacgctcacactgcctatagtgttcaggcccttggaagccaaggagtacatggaccagttgtggttcgaaaaggctgaggggatgttttgtgttggcctcagggcaaccctcccatgccaccgcctcatttgtcgacctccatccttacagctccccatgtgcgccgtaggggacaccaccgaagcctttttctgcctagataatgtaggagatttgcctaccttcttcacatgggagttctcgagtcccttccaaatgctgccagccaccgggttgctcgagcccgggcaagcctcccaaatcaaagtcacgttccaaccactgactgcggtgatttatgaggtgcaagccacgtgctggtacggagcaggtagcagacagcggagcagcatccagttacaggctgtcgcaaagtgtgctcagttactggtttccattaaacacaaatgtcccgaagatcaagatgccgagggctttcagaagctgttgtattttggttctgtggccgtcgggtgtacatctgaaaggcagattagacttcacaatccaagcgcagttaatgcaccgtttaggattgagatctcccccgacgaacttgccgaagatcaggccttctcctgccccaccgcccacggaattgtgctccccggcgagaaaaaatgtgtgagcgtgtttttccaccctaagacactggacacaaggacagtggactactgtagcattatgccatcaggctgcgcaagcaagacgctgctcaaagtggtgggattctgccgggggcctgctgtttcccttcagcactactgcgtaaactttagctgggtgaatctcggagaaagatcggagcagcccctgtggatcgaaaatcagagtgattgtacagcgcacttccagtttgctatagactgtctggagagcgtgttcactatccgtcccgcttttggcacactcgtggggaaagcacggatgactctgcattgtgcgtttcagcccacgcacccaattatttgctttaggagggtcgcatgccttattcaccaccaggatcctttgttcctggatctgatggggacgtgccactccgactcgactaaaccagctatactaaagcctcagcatctgacatggtacaggactcatcttgcaagaggactgaccctctacccacccgatatcctcgacgccatgttgaaggagaaaaagctcgcacaggaccagaacggggccttaatgatccctatccaggatctggaggacatgcccgctcctcagtacccctatatccccccaatgacagaatttttttttgatgggactagtgatattactatcttcccaccaccaataagcgtcgaacctgttgaggtggactttggtgcttgccccggccccgaggctcctaatcccgtgcccctttgcctcatgaaccacacaaagggcaaaattatggtggtctggactagacggagcgattgccccttctgggttacccctgaatcctgcgacgttccccccttgaagtccatggcaatgaggctgcacttccagccacctcatcccaactgcctgtacactgtggaactcgaggctttcgctatatataaagtcctgcagagttactctaatatcgaggaggattgcactatgtgtcccagttggtgcctcaccgtgagggcaagaggccatagctactttgcaggtttcgagcatcacatcccccaatatagccttgacgtcccaaagctcttccccgctgtcagctcgggggagcccacttacaggtcactactgctggtgaacaaagactgcaagctattgacattcagcctggctccccagcggggttctgatgtgatcctacggccaacctccggcctggtcgcacccggggcgcaccagatcattctcatttgtacctatcccgagggaagctcctggaagcagcacacgttctatctgcaatgtaatgcaagcccccagtacctcaaagaagtaagtatgtactccagggaggaacccctccagctgaaactggacactcataagtcactttatttcaagccgacatgggtgggctgtagcagcacttcaccttttacctttaggaatccgagtcgactccccctacagtttgaatggcgggttagcgaacaacaccgtaaactgttggccgtacagccatcacgcggtctgattcagccaaatgaacggctgactttgacctggactttctcacctctggaagagactaaatacctgtttcaggttggtatgtgggtttgggaagctggactttctcctaatgccaatcccgccgccaccacccattatatgctgcgactggtcggcgttggcctgacaagctctctgagcgccaaggaaaaggaactcgccttcggaaacgtacttgtaaatagcaagcagtccaggttcctggtcctactgaacgatggaaattgcacactctattaccgcctgtatctggaacaagggagccccgaggcagtggacaatcatccgctggcattacaacttgataggactgagggatcaatgcccccacgcagccaggacaccatctgcctgacagcttgccctaagcaaagatcccaatactcatggacgatcacctactcgctgctcagccaccgggataacaaggcaggggagaaacaagaactgtgttgtgtaagcctagtcgctgtgtatcctttattgtctattctggatgtgtcgagtatgggttctgccgaggggatcacacgtaagcacctctggagactcttctcccttgatttgctaaacagctatttggaacgcgatccaacaccatgcgaattgacatacaaggtccccacacgccacagcatgtcccagattcctcccgtgctgaccccactgagactggacttcaactttggggcagcaccgttcaaggccccccccagtgttgtgttcttggctttgaaaaactccggcgtggtgagcctggattgggcttttcttctccccagcgatcagaggatcgacgtagagctgtgggccgagcaagcggagctaaattctacagagttgcaccagatgagggtacaagacaactgcctgttctcaatcagcccaaaggccggatctttaagccctgggcaggagcagatggtcgagttgaagtactctcacttattcataggaaccgatcatctgccagtgctgtttaaagtgtctcacggacgggaaattctcttgaactttatcggcgtgaccgtgaagccggagcaaaagtacgtgcactttacctctacaacgcaccagttcatacctataccaatcggcgacacactccctcctagacaaatatatgaactttataacggtggcagcgttcctgtgacatatgaggtacagacggatgtgctctcccaggtgcaggaaaagaatttcgaccaccccatcttttgttgtttgaatcctaagggggagattcagcctggttctaccgcccgagtgttatggatcttctcccctatagaagccaagacgtatactgtggatgtccctatacacatcttaggctggaactctgccctcatacatttccaaggagtaggatacaacccccatatgatgggcgatacggccccctttcataacattagctcttgggataacagctccatccattctcgtttggtggttccagggcagaatgtctttctctctcaaagccacatctctctggggaacattccagtgcagtctaagtgctcccggctcctattcctcaataatataagtaagaatgaagagatcgccttcagttggcagccctctcctttagacttcggagaagtgagcgtgagcccgatgatcggcgtggtggccccggaggagacagtgccattcgttgtcactctgcgggctagcgtccacgctagcttctattctgctgatctggtgtgcaagctgtactcccaacaactcatgcgccaataccacaaggagttacaggagtggaaagatgaaaaagtccgtcaggaagtggagtttacgattacggatatgaaggttaaaaagcgaacttgttgcaccgcctgcgagccagccaggaaatataaaactctgccacccataaaaaaccaacagagtgtgtcgcgccctgcaagttggaaacttcagacccctaaagaagaggtctcctggccctgcccccaaccaccttctccaggcatgttgtgcctggggctcacagctcgcgcacacgccaccgactacttcctggcaaatttcttcagcgagtttccatgccatttcctgcatagagagctgcccaagcgcaaggctcctagggaggagtccgaaactagcgaagagaagagccccaacaaatgggggccagtgtcaaagcaaaaaaagcagctgctggttgacatactaacaactatcatcaggggactcttagaggacaaaaactttcacgaggccgtggaccagtctctggtggagcaagtgccttacttccgtcaattctggaatgagcaaagtacgaagttcatggaccagaagaattcattgtacctaatgcccattctgcctgtgccatccagctcgtgggaggatggaaaaggtaagcagcccaaggaagatagacccgaacactacccaggcttaggcaagaaggaggaaggggaggaggaaaagggggaggaggaagaggaggagctggaagaagaggaagaagaagaagaggagacagaagaagaggagctgggaaaagaagagatcgaagaaaaggaggaggagcgtgatgaaaaggaggagaaggtctcctgggcagggatcggcccaacacctcaaccggaaagtcaagaatccatgcagtggcagtggcaacagcaactcaacgtgatggttaaggaagaacaggaacaggacgagaaggaggccatacgccgactgcccgcgttcgccaacctgcaggaagcactcttagaaaacatgatccagaatatcctggtggaagcatcgcgaggtgaagtggtgctcacctcacgtcctcgcgttatcgctctaccacccttttgcgtaccaagaagtctgactcctgatactcttctgcctacccagcaagctgaggtattgcacccggtcgtgccgctgcccaccgatctcccatag

SEQ ID NO: 183377 - DNA, 2190 bp, synthetic construct
  misc_feature 1..2190: note = Description of Artificial Sequence: Synthetic coding sequence
  source 1..2190: mol_type = other DNA
atgctgacccaggcccccagcagcgtggtgcggagccggaacagcaggaaccacactgtcaactcaggagggtcttgtctctcagcatctacagtggcaatcccagcgatcaacgactccagtgccgccatgagcgcctgctccacaatctcggctcaacctgcctctagtatggacacacagatgcattctcccaagaaacaggagcgagtgaacaaacgagtgatctggggcatcgaggtggccgaggagcttcactggaagggatgggaattgggaaaagagacgacgcgcaatctcgtgttgaaaaatcgcagtctaaagctacagaagatgaaatatcgcccccctaaaactaagtttttttttactgtcattcctcagcccatcttcctcagtccaggtattacacttactctcccgattgtgtttcgcccgcttgaggctaaggaatacatggatcagttgtggttcgagaaggccgaggggatgttctgtgtgggcttacgagccacactgccttgtcatcgtctgatatgcaggcctccctctctgcagctccctatgtgcgccgtaggcgacacgaccgaggcctttttctgtctggacaacgtaggagacctgcctaccttctttacctgggagttcagctcacccttccagatgttgcctgcgacagggctgctcgaaccagggcaggcatcacagatcaaggtaaccttccagccactgacagcggtaatatatgaagttcaggctacatgttggtatggcgctgggtcaagacagcggagctcgatccagctccaggctgtcgccaagtgtgcacagttgctggtatcaattaaacataagtgccctgaagatcaggatgctgaggggtttcagaaattgctgtacttcgggtctgtagccgttggatgcacaagcgaacgtcagattcgattgcacaacccctctgctgtgaacgcacccttccgtatcgaaatctcgccagacgagctcgcagaggatcaggctttttcctgccccaccgcccacgggatcgttctcccaggggagaagaagtgtgtgtctgtgttcttccatccgaagaccctggacacacggaccgttgattactgcagtattatgccgtctggatgtgcgagcaaaacattacttaaagtggtgggattctgcaggggccctgccgtgtctcttcaacactactgcgtgaattttagttgggttaacctgggagagcgaagcgagcagccactatggatcgagaaccagtccgactgcacagcccactttcagtttgctattgactgcttagagtcggtgttcaccatcaggcccgcatttggcactttggtggggaaggctcgcatgacgttacattgtgccttccagccgacccacccaatcatctgtttccgccgtgttgcctgtctcattcatcaccaggatcccctttttttagacctcatgggtacctgccattctgactccaccaagcccgccatcctgaagccacagcatctgacttggtatcgaactcacttggctcgcggcctgacgctttacccacccgacatcctggatgctatgctcaaagagaaaaaactcgcgcaagaccagaatggcgccctcatgattcccattcaggacttggaagatatgcctgccccgcaatacccatacatcccccccatgacggagttctttttcgatgggacatccgacatcaccatttttcccccacccataagcgtggaacctgtggaggtagacttcggtgcatgccccggtcccgaagccccgaacccagtgccgttgtgtctgatgaatcacacaaaggggaagattatggttgtttggacgcgacggagtgattgccccttctgggtaacacccgaaagctgtgatgttcctcccctgaagtcaatggcaatgcgacttcattttcagcctcctcatcctaattgcctctatactgtggaactggaggcttttgctatatacaaggtctgtgctcggaatgagcgtgaagaatgtggagtcagcgcccgctcacttagcgggcttgtcggatggcaagaggtcacagaggggtctttccgtctgcatccgctgcgcgcgcgactgtcattggggtggactgttacccctatgtccctgagtcctcccaaattattagcatag

SEQ ID NO: 183378 - DNA, 5778 bp, synthetic construct
  misc_feature 1..5778: note = Description of Artificial Sequence: Synthetic coding sequence
  source 1..5778: mol_type = other DNA
atgttcaccctgaccggctgccggctggtggagaagacccagaaggtggaaaatccatctgtctctttcgcgtccagtttccccctaattccattactgctgcggggcaagtcagtgcagaaaaagcaggcggagtctaaatctcagatcaaactgcacacacagtctgctccattcggcctctgtcctaaggacatgatgttaacccaagcaccctcatccgtggttagaagtaggaatagccggaaccatacagtgaattctggcgggtcctgtctgagcgctagtaccgtagccatccctgcaatcaacgattcgtctgcagctatgtcagcctgctccaccatctctgcacaacctgcttcgtcaatggacacgcagatgcatagccctaagaagcaggaaagggtgaacaaacgcgtgatctggggtatcgaggttgcggaagagcttcactggaaaggctgggaactgggaaaggagacaactcggaatctggttcttaagaaccgcagtcttaaactgcagaagatgaaataccggcctcccaaaaccaaattttttttcacagtaatcccccagcccatctttttgagtcccgggatcaccctgacactgccaatagtgtttcggcctttagaggcgaaggagtatatggaccagctttggttcgaaaaggccgaaggaatgttctgcgtgggactacgggctacactaccatgtcaccgactgatttgtcggccgccatctctgcagctgcccatgtgtgctgtcggtgacacaacagaggcctttttctgtttggacaacgtaggggacctcccaactttctttacttgggagttttcttcccctttccagatgctgccggccaccggattgcttgagcctggacaggcatctcagataaaagtcactttccagccgttaactgccgtaatctacgaagtccaggctacatgttggtacggcgctggatcccgtcagagaagctccattcagctgcaagccgtcgcaaaatgtgcacagctattggtgagcattaagcacaagtgcccagaggatcaggacgcagaggggtttcagaagcttctgtacttcggatcagtggccgtgggatgcacctcagagagacagatccgtctgcataacccatccgccgttaatgcacctttccggatcgagatctctccggatgagctggctgaggaccaagcgttttcttgccctacagctcatggaatagtgctgcctggtgagaagaagtgtgtgtctgttttctttcatccaaagacacttgatacgcgcacagtggactactgttcgatcatgcctagtggatgtgcaagtaagaccctcctgaaagttgttgggttctgccgaggtccagccgtcagcctccaacactactgcgtcaattttagctgggtgaacctgggcgaaagatctgagcagcctctctggatagagaaccagagcgactgtacagcacatttccaattcgccatcgattgcctggagtcagtttttacgatccgacctgcattcggcacactggtggggaaagctaggatgacactgcactgtgctttccaaccgacccaccctatcatatgtttccggcgggtggcttgtttaattcatcaccaggatccactttttctagacctcatgggtacttgccatagcgactctaccaaaccggcgatcttaaaaccacaacaccttacatggtaccgcacacacctggcgcgcggcctgacactgtatcctcctgatattctggatgccatgctgaaagaaaaaaaactggctcaggatcaaaatggggccctgatgatccccatccaagatcttgaggacatgccggcaccacagtacccctatatcccgcctatgaccgagttctttttcgatgggacaagcgatattacaattttcccccctcccatcagcgtcgagccagtagaagtcgatttcggagcatgtcccggacccgaggcccctaaccccgtcccattgtgtctgatgaatcacaccaaggggaaaattatggtagtatggacaaggagaagcgattgtcctttctgggttaccccagaaagttgcgatgtgccgcctctaaagagcatggctatgaggctgcattttcaacccccacatccgaattgtctctataccgttgaacttgaggccttcgctatatataaggtgttgcaaagctatagcaatatcgaagaagactgcactatgtgcccatcctggtgcttgactgtcagggcccgcggacatagttactttgccgggttcgagcaccacatcccacaatacagcttagacgtgccgaagttgttcccggccgtcagttccggggaacctacatataggtcattactgttggtaaataaagattgtaagctattgaccttttcactagcgccccagcgcggatccgatgtgatattacggcctacgtctggcctcgtcgcccctggggcgcatcagatcatactaatatgtacttacccagagggctcctcgtggaagcagcatacattctacttgcagtgcaacgcatccccccaatatctgaaggaggtgagtatgtactcacgagaagagccactgcaactgaagctggacacacataagtcattatactttaagcccacatgggtgggttgttcatctacctccccttttaccttcaggaacccgagcaggctacccttacagttcgaatggagggtgagcgagcaacatcgcaagctcctcgccgtccagccctcacggggcctgatacagcccaatgaacggctgaccttaacttggacattctctcccctggaagaaactaaataccttttccaggtggggatgtgggtctgggaggccggcctcagcccaaatgctaatcccgcggccaccacccattacatgctcagattggtgggagtcggattgacatcgtccctgtctgccaaggaaaaagagctcgcctttggcaacgtcctcgtcaacagcaagcaatcccgttttctcgtattattaaatgatggcaattgcacactctactacaggctttacttagagcagggctccccagaagctgttgataaccatcctttggccttgcagctggatcgcactgagggaagcatgccacctcgaagtcaggacacaatatgtctaaccgcctgccctaaacagaggtcgcagtacagctggaccataacatacagcctgctaagccacagggataacaaagctggcgagaagcaggaactgtgctgcgtgagtcttgtagccgtttaccctctactcagcattttggatgtctctagcatggggtccgctgaagggattactcggaaacacttatggagattgttctccctcgatctgttgaactcgtaccttgaacgtgatccaaccccctgcgagctgacttacaaggtgccaactcgccacagcatgtcccagattccccctgttttgacaccactgcgcttagactttaattttggggccgctcccttcaaagcccccccaagtgtcgtctttctggctctcaagaactccggcgtcgtaagtctggactgggcatttctcctgccctctgatcagcgcattgatgtggaactttgggctgagcaagctgagctcaactccacagaacttcaccaaatgagagtccaagataattgcctgtttagtattagtccgaaggccgggtccctatcccctggtcaggagcagatggtcgaacttaagtactcccatctgttcatcggtacagaccacctgccagtgctgttcaaagtgtcccatggtagagagatcttactcaacttcattggggtaaccgtaaagccggagcagaagtacgtccacttcacatctacaacccatcagttcatacctatccccattggggacacactgccccccaggcaaatctatgaactctataacgggggctctgtaccagtaacatatgaagttcagacagatgtgctttcccaggtgcaggagaaaaattttgaccaccctattttttgttgtctcaaccccaagggtgaaatccaacctggaagcaccgcgcgagtcctgtggattttcagtcctattgaagctaagacatatacggtggatgtgcctatccacatcctgggctggaacagcgccctgattcatttccagggcgtgggatacaaccctcacatgatgggcgacacggcaccattccacaatatctccagttgggacaattcatccatccactcgagactcgtcgtgccggggcagaatgtcttcctttcacaatcacacatctccctcgggaatatacccgtgcagagcaagtgcagtcggttgctattcctgaataatatcagcaagaacgaggaaatcgcctttagttggcagcctagcccactcgactttggcgaggtgtccgttagcccgatgataggagtcgtggcacctgaggaaaccgtacctttcgttgtaacactgagggcaagtgtacatgcctccttttactccgcagatttggtgtgcaagttgtactcacagcagctgatgagacagtaccataaggagctgcaggagtggaaggacgagaaagtgcgacaagaagtagaatttacaatcacagatatgaaggtgaaaaagcgaacatgttgtacagcctgtgagcccgcccgcaagtacaagacgctccctcccatcaaaaaccagcagagtgtttctcgccctgcttcgtggaagctgcaaacacccaaggaggaagtgtcttggccgtgcccccaacctcctagccctggcatgctgtgtctcggcctgactgcccgagcacacgccactgattatttcctggctaacttcttttcagagttcccttgtcattttctccacagggaactgccaaagaggaaagcaccgagggaggagagtgagacaagtgaagaaaaaagccccaacaaatggggacccgtgagcaagcagaaaaagcagctgctggtggatatcctgaccaccatcattagaggtttgttggaggataagaattttcatgaggcagttgaccagtcccttgtggaacaggtgccttattttcgccagttctggaacgaacagagtaccaaatttatggaccagaaaaattccctgtacctgatgcccatcctgcctgtgccatcatcatcctgggaggatgggaaggggaaacaacctaaggaggataggccggagcactaccccggactgggtaagaaggaagagggggaggaagagaagggggaagaggaagaagaggagctggaggaagaagaggaggaggaagaggagaccgaggaggaagaacttggcaaggaagagattgaagagaaagaagaagaaagagacgaaaaagaagaaaaggtatcatgggcgggaattggacctactccacagccagagagtcaggagtcaatgcagtggcagtggcaacagcaactcaatgtgatggttaaagaagaacaagagcaagacgagaaagaggcgattcgtaggctccctgcgttcgcaaaccttcaggaggccctgctggagaatatgatccagaacattctggtggaggcttcccggggtgaagtcgtcctcacctcacgccccagagttatagccttgcccccattctgtgtgcctagaagcctgacgcccgacactctcttacctacacaacaggctgaagtcctgcacccggtggttcctctgcctaccgatctcccatag

SEQ ID NO: 183379 - DNA, 5778 bp, synthetic construct
  misc_feature 1..5778: note = Description of Artificial Sequence: Synthetic coding sequence
  source 1..5778: mol_type = other DNA
atgttcaccctgaccggctgccggctggtggagaagacccagaaggttgaaaatccttcagtatcatttgcgagctccttccctctgatccctttgctgctcagaggcaagtctgtccagaagaagcaggctgagagcaagtcccagatcaagcttcacactcagtctgccccattcgggctctgccctaaagacatgatgctcacacaagccccctcctctgtggtgagaagtcggaatagtaggaaccatacggtcaattcagggggcagttgtctgtcagcatcgactgtcgcaattcccgcgataaacgacagctcagcggccatgtctgcatgtagcactatcagcgcacagcccgcctccagcatggatacccagatgcactcaccaaagaagcaggagagagtcaataaaagagtcatttggggcatagaagtggcagaggagcttcattggaaggggtgggaactcgggaaagagaccacaaggaacctggtcttgaagaacaggtcactgaaactgcaaaagatgaaataccgccctccaaaaacgaagttttttttcactgtcatccctcaacccatcttccttagccctggcattaccctgacgctcccaatagtattcagacctttagaggccaaagagtacatggatcagctgtggttcgaaaaggctgagggaatgttctgtgtgggtctcagagcgacccttccctgccatcggctcatctgtaggccgccgtccctgcaacttccaatgtgcgccgtcggggacaccaccgaggcctttttctgcctagacaatgtgggagatctcccgaccttcttcacttgggaattttcatcccccttccaaatgctccccgccactggcctgctggaacccggacaagcgtctcagattaaggtaaccttccaaccactgaccgctgtgatctacgaagtgcaagccacctgttggtatggggccggcagccggcaacgctccagcatccaactgcaggcggtggcaaagtgcgcccagctattagtgagcataaaacacaagtgccccgaagatcaagatgctgaggggtttcagaaactgttgtatttcggctccgtggcagttgggtgcacgtccgaaagacagatccgactgcacaaccctagcgcagtgaacgctccattcagaatcgaaatcagtcccgatgaactggccgaagatcaggcattctcatgccccactgcgcatggtatcgtgctgcccggtgagaaaaaatgcgtttctgtcttctttcacccgaaaacactggatacaaggaccgtggattactgttcaataatgccctccgggtgtgcttcaaagacgcttctgaaagtggtgggcttttgtagaggccccgctgtgtcgcttcagcattactgcgtgaatttttcttgggttaacctgggggagaggtccgagcaacctttgtggatagaaaatcaatcagactgtacagcccactttcaattcgcaattgactgcctagaatcggtgtttaccattagaccagcgtttggcaccctagtaggcaaagcgagaatgacgctgcactgtgcctttcaaccaacccatccgatcatctgctttcgaagagttgcctgtctaatccatcaccaagatcccctgttcctagacttgatggggacctgccattctgactctaccaaacccgctattctcaagcctcagcatctcacatggtaccgcacacacctggcacgcggcctgacactgtatccgcccgatattttggatgccatgctaaaagagaaaaagctggcccaggaccagaacggcgccctcatgattccaatccaggatctggaggacatgcccgctccgcagtatccgtacattccgccaatgacagaattttttttcgacggcaccagtgacattactatttttccaccccccatctctgtcgaacccgtcgaggtggattttggcgcttgccccgggcccgaagcaccaaacccagtgcccctctgccttatgaatcacaccaaaggcaagattatggtcgtgtggacccgccgctcggactgtccattctgggttacccccgaatcctgcgacgtgcctccactgaagtctatggcgatgcggctgcactttcagcccccacaccccaattgtttgtacacagtggaattggaggcattcgccatttataaagtcctgcagtcttacagtaacattgaagaagattgtaccatgtgcccgagttggtgtctgacggtcagggctcgcggccacagttactttgccggctttgaacatcacatccctcaatatagtttggacgtgcctaaactgttccccgccgtaagctcaggtgagccaacctacaggtcattgctccttgtgaacaaggactgtaaattgctgactttcagcttagcaccacagcggggcagcgatgtcattttgaggcctaccagtggactggtggcacctggtgcccatcagataatcctcatctgtacctaccccgaagggagctcctggaagcaacatacattctacctgcagtgcaacgcgtctccacagtatctcaaagaagtgagcatgtactctagggaagagccacttcagctgaagcttgacacacacaaatctttatactttaagccaacatgggtggggtgttcctcaacttctccttttacttttcggaatccaagtcgcctccccctgcagtttgaatggagggtgtctgagcagcatcgcaaactcctggccgtccagccttcgcgcgggttaatccaaccaaatgaacgtctgactttaacctggaccttctctcccctcgaggaaacgaagtacttgtttcaggtagggatgtgggtctgggaagctggcctgagtcccaatgccaacccggcagcgaccacccactacatgttacgtttggtgggcgttgggctgactagcagtctctctgcaaaggagaaagagttggcgttcgggaatgtgttggtcaacagcaaacagagcagatttttggtgttgctgaatgacggtaactgcacgctatactatagattatacctggagcaaggctcacctgaagccgtggacaatcaccccctggccctccagttagacagaactgaaggatcaatgccgccgaggtcacaggacaccatttgccttactgcctgccctaagcagagatcccagtacagttggaccatcacttattcactgctctcccacagggacaataaggccggggaaaagcaagagctgtgttgtgttagcctcgtcgccgtctacccactgcttagtatcctggacgtctcttccatgggctcggccgagggtattacaaggaaacatctgtggagactgttcagcctggatcttctgaatagctatctcgaacgagatcccaccccttgcgaactcacatacaaggttccaacccgccattctatgagccagattccaccagtccttaccccactcaggctggactttaatttcggcgctgctcctttcaaggctcccccttccgtcgtgttcctggcgctcaaaaattccggtgtggtgtccctggactgggcttttctccttccctccgaccaacggatcgatgttgagctgtgggcagaacaggctgagctcaatagtaccgagctgcaccagatgcgggtgcaggataattgtttgttcagcatcagcccaaaggctggctctctgagccctgggcaggagcagatggtggagctcaagtatagtcatctgtttattgggactgaccatcttccagtgcttttcaaagtatcccacgggcgcgaaatcctcctcaatttcatcggtgtaaccgtcaagcctgagcagaagtacgttcatttcacaagtacaactcatcaatttatacccattccgatcggagatactctccctcccaggcagatatatgagctttataacggcgggtctgtgccagtgacctacgaggtacaaaccgacgtgcttagtcaggtgcaggaaaagaacttcgatcatcccatcttctgctgtctcaatcctaagggggagattcagcctggtagtacagcgcgggtcctttggattttctcgcccatcgaagcaaagacatacaccgtggatgtccctatccacatactgggctggaactctgccttgattcatttccagggagtgggttacaatccgcacatgatgggcgatactgccccgttccataacatttctagctgggacaatagtagtatccactctagactggtggtgccaggacagaacgtctttctatcacagtctcatatctctctcggtaatattccggttcagtcaaaatgttcccggctgctctttctcaataacatctcaaaaaatgaggagatcgccttctcctggcagcccagcccacttgattttggggaggtctctgtgagccctatgatcggcgtagtggcaccggaggagacagtcccattcgtcgtgaccttacgggcgagcgtgcacgccagcttctattcagccgatctggtctgcaaactgtactcccagcagctgatgaggcaataccacaaagaactgcaggagtggaaggacgaaaaggtgcgccaagaggtggaattcacaatcaccgatatgaaagtaaagaagcggacatgctgtaccgcatgcgagcccgccaggaagtataaaaccctaccgccgatcaagaatcaacaatcggtctcgaggccagcctcctggaaactgcaaacgcccaaggaagaagtgagctggccttgccctcagcctccctcccctggtatgctgtgtctgggccttactgccagggcccatgcaactgattatttcctggctaactttttttctgaattcccttgtcacttcctacatagggaacttcccaaacgcaaagccccccgggaagagtccgagacttctgaggagaaaagtcctaacaagtgggggcctgtgtctaaacaaaagaaacagctgctcgtggacattcttacgacaattatcaggggcctactagaggacaaaaactttcacgaggctgttgaccagtcactggtggaacaggtgccgtatttcagacagttttggaacgaacagagcacaaaatttatggaccagaagaactctctgtatctgatgcctatcctcccagttccatcttcctcttgggaagacggaaagggaaagcagcctaaagaagacaggcctgagcattaccctggacttggcaagaaggaggagggggaagaggaaaagggagaggaggaagaagaggagttggaggaggaagaagaagaagaggaagaaaccgaagaggaggaactcgggaaagaagagattgaagaaaaggaagaggagagagatgaaaaagaagagaaagtctcatgggctggcatcggccccaccccccaacctgagtctcaagagagcatgcagtggcaatggcagcagcagctgaatgtcatggtgaaagaggaacaggaacaagatgagaaagaggccattcgcagactacctgcatttgccaatctccaagaagctctgttagagaacatgattcagaatatactagttgaggccagccgtggggaagtagtgctgacgagccgcccacgagttatagctctcccccccttctgcgttccccgcagtctgactcctgacactctactcccaacccagcaagccgaggtcctgcaccctgtagtccctctgccaacagacctcccctag

SEQ ID NO: 183380 - DNA, 816 bp, synthetic construct
  misc_feature 1..816: note = Description of Artificial Sequence: Synthetic coding sequence
  source 1..816: mol_type = other DNA
atgaccctgcactgcgccttccagcccacccaccccatcatctgcttcaggagagtggcctgcttgatccaccaccaggatcccctctttttggacctcatgggaacctgtcatagcgatagcacgaagcctgccattctgaagccgcagcacttaacgtggtaccggacccacttggctcgggggctaactctgtacccccccgatatattggatgccatgctgaaggagaagaaactagcccaggatcagaacggtgccctaatgattcccattcaggacctagaggacatgcctgcaccccaatatccatacattcccccgatgacggaattctttttcgatgggactagtgatattacaatattccccccgccaatctccgttgagcctgtcgaggtcgatttcggagcctgtccgggcccagaagccccgaatcctgtgcccctgtgcctgatgaaccacactaaggggaaaataatggtggtctggacccgtcgcagcgactgtcccttttgggtcactcctgagtcctgtgacgtcccaccgctgaagtccatggccatgagactccacttccaaccaccccatcccaactgcttatacaccgtggagcttgaagcgtttgccatctacaaggtgtgcgctaggaatgagagagaagaatgcggcgtaagtgcacgcagtctgagcggactggttggatggcaagaagtgactgaggggagtttccggctgcaccccctgcgggcacgcctctccctggggtggacggttacacccatgtcccttagccccccaaagttgctcgcctag

SEQ ID NO: 183381 - DNA, 543 bp, synthetic construct
  misc_feature 1..543: note = Description of Artificial Sequence: Synthetic coding sequence
  source 1..543: mol_type = other DNA
atggccgccctggacctgcgggccgagctggacagcctggtgctgcaactgctgggtgacctggaagagctggaaggaaaaaggacagtgctgaatgcccgcgtggaggaaggctggctgtccttagcaaaggctcggtatgccatgggagcaaagtctgttggaccacttcagtatgcctcacatatggaaccacaggtttgtttacatgcgagcgaagcccaggaaggactccagaagttcaaagtagtacgcgccggcgtacacgcgcccgaagaggtaggaccccgggaagcgggactgaggcgcagaaaagggcctactaaaactcccgagccagaatcgtccgaggcacctcaggaccccctgaattggttcggcatactcgtaccacacagcctgcgtcaggcccaggcatcctttagagacggcttgcagctggcggctgacattgccagtcttcagaacaggatagactggggcaggagccagctgagaggtctccaggagaaactcaagcagttagagccaggggcagcatag

SEQ ID NO: 183382 - DNA, 567 bp, synthetic construct
  misc_feature 1..567: note = Description of Artificial Sequence: Synthetic coding sequence
  source 1..567: mol_type = other DNA
atgggcacccccctggacggcggcagccgggtgcccatcggctgcccagccaagctgcggcgcgtgacaagaaagaaggtcgctccggatctcgaaggttggctgagcttggctaaagcccgctacgctatgggggctaagtccgtggggcctctgcagtatgcaagtcacatggaaccacaggtgtgtcttcacgccagcgaggctcaggaaggattgcagaagtttaaggtggttcgcgcaggtgtgcatgcccccgaggaagtgggcccacgggaggctggattaaggagacgcaaaggcccgacaaagactcccgagcctgagtcctccgaagctccacaggatcccctcaactggtttggtatcctggtaccccatagcctgagacaggcacaggccagtttccgggacggagtcctggaggctaagaagcgaaaatgctttcttgagagggtgatccaatgcgtggttagtcccgccgcggagcaggaggccgaggatgagtcatgtccagaggattgggcagctgccgtacctgcggagacgtccgccaaggcaatttag

SEQ ID NO: 183383 - DNA, 855 bp, synthetic construct
  misc_feature 1..855: note = Description of Artificial Sequence: Synthetic coding sequence
  source 1..855: mol_type = other DNA
atgagcgacaacaaggagcggaagagccagggcttccccaaggaggacaaccaagacacaagctctctggccgatgctgtggagaaagttgccaaacagcagcagagccaagcgtctgaaattgagaaaaataagaaggtcttgttcaacctgaaaaatgaactgcacgagttagagaaagagatcgcggctatatctgccgagactaaagagactgagcggcaaatctaccaacaggattctgctattgagaacacgaaactccactgtgatagcttggaaacacagattaaaagtctgcattccgagaatgtcaaactcaagttcgatatagagacggcccaggaagactttgaggagcatatgattaaatacaatgcctattatgcaaagataaaggcacacaagaactcactaggagaagtcgaatccaaatggagttttatgactgagcttcacgagaagcgcgatttcgtgaaaaagctgaagacaatgaaagaagagttgatgcaagaccttcagaacccaggcggaaacaggataacacaggtgcaagaggacattaccaacctaaaggacaaaatcatcacggtgaaggagagtatcattgagaaaacctgttttctggaggaggaaaaaaaaacacatgagaaactgaggaaggagatcgagagtctggcaccaagcccacggctggaatgtagttccgccatttctgctcattgtaagctttgtctcccaggctcaaggcacagcccggccagtgccagcggtgttgccggaacaaccggagcatgtcaccatacacaacttatcttctgtattttcagtcgggatggtgtcagcccttgttag

SEQ ID NO: 183384 - DNA, 822 bp, synthetic construct
  misc_feature 1..822: note = Description of Artificial Sequence: Synthetic coding sequence
  source 1..822: mol_type = other DNA
atgagcgacaacaaggagcggaagagccagggcttccccaaggaggataatcaggacacttcttctctagctgacgcggtggaaaaggttgccaagcagcagcagtctcaggccagtgaaattgaaaaaaacaagaaagttttgttcaacttgaaaaacgaactgcacgaactggagaaagagattgcggcgatctccgccgagaccaaagagaccgaacggcagatttatcaacaggactcagccattgagaatactaaattgcactgcgactccttggagactcagatcaaatcactgcactccgagaacgtgaagctaaagttcgatatcgagaccgctcaggaagatttcgaggagcatatgattaagtacaatgcttactacgcaaagatcaaagctcacaagaactccttgggagaagtggaatctaagtggtctttcatgacagagctccacgagaagcgtgactttgtcaagaagctcaagaccatgaaagaagagttgatgcaagacttacaaaaccctggcggtaatcggatcacacaagtgcaggaggacatcacaaatttgaaagacaagataattaccgtgaaggaatccatcattgagaaaacctgttttttggaggaagagaagaaaacgcatgagaagctccggaaagaaatagaggtgcagcacaaaaggtatgatgccatcttgaagcgcctgcattgtcaggtgaacaaattacagtcgaataggagacagtggcagtggaatattcagcagctcgagaaaaccgctgcagagcttcgcaaatgcataggaatgcaggagtag

SEQ ID NO: 183385 - DNA, 1536 bp, synthetic construct
  misc_feature 1..1536: note = Description of Artificial Sequence: Synthetic coding sequence
  source 1..1536: mol_type = other DNA
atgagcaaggtggcccggagcagcagcgagagcgacgtgcagctgtgggaaactgaggaagacgatatgactgaaggagacctgggctatggcctgggccgtaagcccggcgggatctacgaaattgagttctcacacagatccagaaaaaggtcagacggaaaaaatttctcgcctccgccatttcctaggaagggagaggaaaggaacgaagcctcttttcaatacagcaagcataaatcacagcaggataccttcccccaggtgtctcgcatcagcaattacagacggcagtcttcaacagtggattctaacagtgagttgtctaacgaggagctgaggcagtgtctgaacgagactttggaggaggttgagatgttgaagaccgagttggaagcctctcagcggcagctcagaggaaaggaagaagccctcaagatactgcagtccatggccatcctaggcaaggccacctcccatacacaggccgtgcttcagaaaaccatggagcagaatcgctccctggagaaagagatcaacgcccttcagtgggaaattgaattcgatcataataggtttaagaacatagaagagtcctggatccagaaatatgatagacttaactgtgaaaatgccgtgttaaaggagaacttaaaagtgaagaccgaagagatcaagatgctgaagtccgataacgccgtcctgaatcagcggtacctggaggctctggcgatgctcgatatcaaacaacagaagatggctcaagagaacatgtgctgtgacaagtccggcttcgctgaggcatcagggttggagctggcagtgctcggcgcatgcttgtgtcatgggccaggtgggaatccctgctcctgtgccaggatggcagccagcacaagaaaactcctgctccaacttaagcaagagctggagattcttcagaagtcaaaggaagaggcctatgtgatggcagacgcgtttcgcatagccttcgagcagcagttgatgcggaagaatgatcaggcactccagttaactcagatggacaagatgcataagaaggctacaaaatggatgaactggaaacacctcaaagaagacggcttcccttctcctagatccaaaaaaacgtttggtcagcggttgctgggtatgctgccatccgagaactcctcaaagcgcatggaagaccaggacagcccccaggaggttctgaagatgctcatcgaccttctcaatgataaggaagaagcactggcacatcagcgtaaggtgtcttatatgctcgcccgggcattagaagataaagacacagcctctaacgaaaataaagagaaaaatccaattaaagaaaacttcccctttaacaacccctggagaaaaacatccgaattcagcgtcctgggggatcccatacacagcagcgtctgcatactgaactcggtgggttgcatctgctccatacagcactcgcagatcgaccccaactatcgcacgctaaagaggtcacattcactgccatccagcataattttttag

SEQ ID NO: 183386 - DNA, 1536 bp, synthetic construct
  misc_feature 1..1536: note = Description of Artificial Sequence: Synthetic coding sequence
  source 1..1536: mol_type = other DNA
atgagcaaggtggcccggagcagcagcgagagcgacgtgcagctgtgggagacagaagaagacgatatgactgagggcgacctggggtatgggctgggtcgaaaacctggcggtatatatgagatagaattttctcacagatccaggaagcgtagcgacggcaaaaacttcagtccaccacctttccctcgtaaaggcgaggaacgtaatgaagcttcctttcagtattccaagcataagtctcaacaggatacctttccgcaggtttctagaatcagcaactatcgccggcagagctctacggtagattcaaattcagaactatcaaacgaagaactgagacagtgcctgaatgagaccttggaggaggtcgaaatgctgaagactgagctggaggccagtcagcgccaacttcgtggcaaggaggaagccctgaagatcctgcaaagcatggcgattctgggcaaagcaacatcacacacgcaggcggtactgcagaagactatggagcagaaccgctctctggaaaaagagattaacgctttgcagtgggaaatcgagtttgaccacaatagatttaagaacattgaagaatcctggatccaaaagtacgaccgactcaattgtgagaatgctgtgctgaaagagaatcttaaggtcaagaccgaagaaataaaaatgctgaagagcgataacgccgtgctgaatcaaagatatcttgaagccttggcaatgcttgacattaaacagcagaagatggcccaggagaatatgtgttgtgacaaatcaggattcgcagaagcctccggcctggaactggcagttcttggagcctgtttatgccatgggcctggcgggaatccatgtagctgcgctcggatggccgccagcacacgcaaactgctgctgcagctcaagcaggaactggaaattctgcagaaatctaaggaggaggcatacgtaatggcagatgcattccgaatcgcgtttgagcagcagctgatgcgaaagaatgaccaagccctccagctgacccaaatggacaaaatgcataaaaaggctaccaagtggatgaattggaaacacctcaaggaagatggtttcccatcgccccgctctaaaaagacattcgggcagcgtttgctcggcatgcttccttccgagaactctagtaagagaatggaggaccaggactcaccgcaggaggtgctgaaaatgcttattgatctgcttaacgataaggaggaagcgttggcccaccagaggaaggtgagctatatgctagcacgcgctttagaagacaaagacactgccagtaacgagaacaaggagaagaatcccatcaaagaaaattttccctttaataatccctggaggaagacctctgaattttcagtgctgggagatccgatccattcctcggtttgtatcctgaattctgttggctgcatttgctctattcagcactctcagattgatcccaattaccggacactgaaaaggagccatagcttacccagctccataattttttag

SEQ ID NO: 183387 - DNA, 1161 bp, synthetic construct
  misc_feature 1..1161: note = Description of Artificial Sequence: Synthetic coding sequence
  source 1..1161: mol_type = other DNA
atgctgaagaccgagctggaggccagccagcggcagctgcggggcaaggaggaagccctgaagattctacagtctatggctattctcggcaaggccacctcccatacacaggcggtgctgcagaaaactatggaacagaatcggtcgctcgagaaagagataaatgccctgcaatgggaaatcgagtttgaccataatagatttaaaaacatcgaagaatcatggatccagaagtacgaccggcttaattgtgagaatgctgttctaaaggagaatctgaaggtgaaaaccgaggaaataaagatgcttaagtctgacaatgccgtcttaaaccagcgttacctggaggccctggccatgctggatatcaaacagcaaaagatggcccaggaaaatatgtgctgcgacaagagcggcttcgcagaggccagcggtctcgagctggctgtcctgggggcctgtctttgccacggtccaggaggcaatccctgtagttgcgcccgtatggcggcttctacccggaagctgctgctgcagctaaaacaggaattggagattctgcagaaatccaaagaggaagcttatgtcatggctgacgccttcagaatagcctttgaacagcagctcatgaggaagaacgaccaagctctgcagttgacccagatggacaaaatgcataagaaagccactaaatggatgaattggaagcacctcaaggaagatggctttccatccccacgctccaagaagaccttcggccagcgcttactaggaatgctaccatcagagaattcttccaagaggatggaggaccaggatagccctcaagaggttcttaaaatgctcatcgacttattgaacgacaaggaggaagctctggcccaccaacgtaaagtaagttatatgctggctcgcgccttggaggataaagacactgctagtaacgagaataaagaaaaaaaccccatcaaagagaatttcccattcaataatccatggcggaagacaagtgagttttctgtgctaggagacccgattcactcctcagtttgtatactgaatagtgttggatgcatctgcagcattcagcactcacagattgatcctaattatcgaactctgaagcgttcacattctctaccatcaagcattatcttttag

SEQ ID NO: 183388 - DNA, 3465 bp, synthetic construct
  misc_feature 1..3465: note = Description of Artificial Sequence: Synthetic coding sequence
  source 1..3465: mol_type = other DNA
atgcaggccatggagggcgaggtgctgctgcccgccctgtacgaggaagaagaagaagaggaggaagaggaagaggaagttgaagaagaggaggaacaagtgcagaaggggggctcagttggttcgctgtccgtgaacaagcataggggactgtcgttaaccgaaaccgagttggaagagcttagggcccaggtattacagctggtagcagagctggaagagactagagaacttgctggccaacacgaggacgattctctagagctgcaaggcttgttagaggatgagaggctggcgtccgcccaacaagccgaggtgtttacaaaacagatccagcaacttcagggcgaactgagaagcctgagagaagaaatttccctgttagaacacgaaaaagaatctgaattaaaggaaattgaacaagagctgcacctggcccaggcagaaatccaatctttacggcaggcagctgaggactcagccaccgaacatgagtccgacatcgcttccctgcaggaagacctgtgtcggatgcagaatgaactggaggatatggagagaatcagaggcgattatgagatggaaatcgcaagcctccgagccgaaatggagatgaagagtagcgagcccagcggaagcctgggcctgagtgattattccgggttacaggaagaactgcaggagctgcgtgaacgctatcatttcctcaatgaggaataccgggcgttgcaggagtctaactcaagtttaaccgggcagttagccgacctcgagtccgagaggacccagagagcaaccgagcggtggctgcaatctcagactctgtctatgacctcggctgagtcccagacatctgagatggattttctcgagccagatcccgaaatgcagctactgcggcagcagctgcgagacgctgaagaacagatgcatggcatgaagaataagtgccaagagctgtgttgtgaacttgaggagcttcaacatcaccggcaagtatctgaagaagaacagcggcggcttcagcgggagctgaaatgcgcccaaaacgaggttctacggttccaaacatcccactccgtcacgcagaacgaagagttaaaatcaaggttgtgcacattgcagaagaagtacgatacctctcaggatgaacagaatgagcttttgaagatgcagctgcagttgcagaccgagctgagacagctgaaggttatgaagagtactcttgtggagaaccaatccgagaaagagctcctctgtcgtctgcaaaagctgcacctccagcaccagaatgtgacatgcgagaaggagaaactactagagcgacagcagcagctgcaggaggaattacaatgtcacgaagctgaactacaacacctgagggacaccgtggcctctttcaaagaatccaacgaaaaggataccgagacccacgctcagctgcaagaaatgaaacagttatatcaggcttccaaggacgagctggagagacaaaagcacatgtacgaccagttggagcaagacctgctcctctgccagctcgagctcaaggagctgaaggcttcccatcctatccccgaggataaagggaagtgtgcaaataaatgcgacactctgctgagccggttgactgaactgcaggagaagtacaaagcatcacagaaggagatgggacagctgcagatggaacaatgcgaactcctggaggaccagaggaggatgcaggaggagcagggccagctgcaggaagagctgcatcgcctgacactgcccctcccaaagtccggcctgttgttaaagagccaggaattactgacaaagctcgaggatctctgcgagctgcagctgctgtaccagggcatgcaagaggagcagaagaaattgattcaaaaccaggattgtgttttgaaggaacaactggaaatccacgaagagctccgacggttcaaagagtcacattttcaagaggtgctggaaaatccagacgacagcaagctggcaaaatcttccaagtgcaaccgaaacaaacaaagtaagctgctgatggaacagatgcaggcattgcaggtgatgtacgatgccggccaagccaagcaggagctgttgcaacaggagcaaggtagactcttagaggaacggaagcgccttcaggctgatctgcaactctgtttagaggaaatgcaattgctgcaggtgcagtcccctagcattaagatgtcccttgagagttacggaaagagttatggcagtatggtcccctccaacgagaattgtagaaaaacctacgatacaaccgttgatgataacgagagctactacaagtcctacacgagcacccagacctcatctaagagcttcctgaagagctatgattctagcacctctgcttccgaggcctatggaaaatcctactgcactaccagtaatagttctatcacttacaaaaagagttacggtagtacatcctcttctgatacctgtcagaagtctttcgtcagctcatgtacagatgaagaaccagccgaaccagaggatatggaaaggttcgaggagatggtagtcaaggtgctgatcaagctgcaggcagtccaggcaatgtatcagatcagtcaggaggagcatagtcagttacaagagcagatggaaaaactgctggcgaagcagaaggatttgaaggaagagcttgacgcttgtgagcgtgaattcaaggaatgcatggaatgtctggaaaaaccaatggccccccagaatgataagaatgagatcaaggaactccagaccaaacttagggagctgcagctccagtaccaggcttccatggacgagcagggtcgattactggtggtccaagaacagctggagggtcagttgcagtgctgtcaggaggaactaagacagctccgggaaaagagaccttcagtcgtcaaagaggcaagaggaaagaatgcaaataagaatatgaacaagaatgctaatggagtgaagatgaagaaggtcaccaaaccctgttctgatacctccgagtctgacctagagacgaggaagtccctggaagttgtattgtactacaaggcaagccagcggaagctggatggtctggctaaggaggaggaaaaaaaagaggaaatggaagaagagaagaagcaggtgaaggaagaagcaaaagagcaatgcggggacgagttagtggctgagcctgcggaccctgaggaagcgaaatctacagaagaccaggaagaaaatgaagaagacaaagaggaggaggagaaggaggaagattccgaagaagaagaggacgatgccgactcatctttggagagcccagaggagaacaatcctttaaggctttccgagtcgaaaaagagctcccccactccaaacccacccatattctccctgcctctggtgggacttgtggtcatatctgccctgttgtggtgttggtgggccgaaaccagcagctag

SEQ ID NO: 183389 - DNA, 2874 bp, synthetic construct
  misc_feature 1..2874: note = Description of Artificial Sequence: Synthetic coding sequence
  source 1..2874: mol_type = other DNA
ctgcgggccctggagggcgaggtgctgctgcccgccctgtacgaggaggaggaagaggaagaggaggaagaagaggaggtggaagaagaggaggagcaggtccaaaagggcggatccgttggcagcctgtctgttaacaagcatcggggcctttccctcaccgagacagagctagaggagctgagagcgcaggtgctgcagcttgtagccgaactagaggagacacgcgagctggctggccagcacgaggacgattcattagagctccaggggttgctcgaggacgagcgccttgcaagcgcccaacaggcggaggtgtttactaagcaaatacaacagctgcagggcgaactgcgttcactcagggaggaaatctctctactggaacatgagaaagaaagcgaattgaaagagatcgagcaggagctgcaccttgcgcaagctgagatccagtccctgcggcaagcggctgaggacagcgccaccgagcatgaatccgatattgcgagtttgcaagaggacctttgtagaatgcagaatgagctggaggatatggagaggatcagaggagactacgagatggagattgccagcctgcgggccgagatggaaatgaaaagcagtgagccttcgggtagcctggggctgagcgattactcaggcttgcaggaggagctgcaggaactgagggaacggtaccacttcctgaatgaagaataccgggccctgcaggaaagcaattccagtctgactgggcagcttgccgacctggagagcgaaaggacccagagagctacagagcggtggttgcagagccagacactgtcaatgaccagcgctgagtcacagacttccgagatggacttcttggaaccggacccagaaatgcagctgttgaggcagcaactccgtgatgccgaagaacaaatgcacggtatgaaaaataaatgccaggagttatgctgtgagctggaggagctgcaacatcatcgtcaggttagtgaagaagaacaacgacggctccaacgcgaattgaaatgtgcccagaacgaggtgcttagattccaaacatcccactcagtcactcagaatgaggagctaaagtcccgactctgcaccctccagaaaaaatatgacaccagccaagacgaacagaacgagctgctgaagatgcagctgcaactgcagactgaactgagacagctaaaggtgatgaagagtactcttgtcgaaaaccagtccgaaaaagaactcttgtgccggttgcagaaattacatttgcagcaccaaaatgtgacgtgcgagaaggaaaagctcctggagagacagcagcaactgcaagaagaacttcaatgtcatgaagccgaacttcagcacctgagggatactgtggcgtcttttaaagagtctaacgaaaaagacacagaaactcacgcacaattgcaggagatgaaacaattgtatcaggcaagcaaagacgaactcgagcgacaaaaacacatgtatgatcaactggagcaggacctgctgctctgtcaactggagttaaaggaattaaaagcttcacatcctatacccgaggacaaaggaaagtgtgccaacaaatgcgacacgctgctatctaggctgactgaactgcaggagaaatataaggcttcacagaaggaaatggggcaactgcaaatggaacagtgcgagctcctggaggaccagcgtagaatgcaggaggagcaagggcagctgcaggaggagctacatcgcctcacactgccactgccaaaaagtggtcttctcctgaagagccaggagctgctcaccaaacttgaggatttgtgcgaactgcagctcctctatcagggtatgcaagaggaacagaaaaaactgatacagaaccaggattgcgtcctgaaagagcagttagagatccacgaggaactgaggaggttcaaggagagtcactttcaggaagtattggaaaaccccgacgacagcaagcttgcaaagtcctccaagtgcaatagaaacaaacaaagtaaactcctgatggaacaaatgcaggcgctccaggttatgtatgatgcggggcaggctaaacaggagctgctgcaacaggaacagggccggctgctggaggagagaaagcgccttcaagctgacttacagttgtgtttagaagaaatgcagctgctgcaggttcaatcaccctctattaaaatgtcgcttgagtcatatgggaaatcctatggcagtatggtgccatcaaacgagaactgtcgcaaaacatacgatactactgttgacgataatgagtcatactacaaatcatacacatccacccagacttcctctaaaagcttcctgaaatcttatgactcctcaacatcagcatctgaggcttacggtaagtcttactgtacaacgagcaattcatctatcacctacaagaaaagctatggatcaaccagcagtagcgatacgtgccagaaaagcttcgtttcatcctgcacagacgaagagcccgctgaacctgaggatatggaaagattcgaggaaatggttgttaaggtgcttattaaactgcaagcagtgcaggctatgtatcaaatctctcaggaggaacacagccagttacaggaacagatggaaaagttacttgcgaaacagaaggatctcaaggaggagcttgacgcctgtgaaagggagttcaaggagtgcatggagtgtctggagaagcccatggctcctcagaatgacaagaatgaaaacatgttcgggttgtggaagcccatggtgttcttggccatcgctgccgtggctctgtatgtgttgccgaatatgcgccaacaggagtcagaattttgcctaatggagtag

SEQ ID NO: 183390 - DNA, 1305 bp, synthetic construct
  misc_feature 1..1305: note = Description of Artificial Sequence: Synthetic coding sequence
  source 1..1305: mol_type = other DNA
atggaggccggcgccggcgccggcgccggcgccgccggctggagctgtcccggccctggccccactgtcactacactggggagttatgaagcatcagaagggtgcgagaggaagaaagggcagcgttggggttccttggagcgcaggggtatgcaggccatggagggcgaggtactgctccccgctctatacgaggaagaggaagaggaggaggaagaggaagaggaggtcgaagaggaagaggagcaagtccaaaagggcggctccgtcggctcactctcagtgaataagcaccggggattgtcactgacagaaaccgaactagaagagcttagagcccaggtcctgcagcttgtggctgaactggaggaaactcgagaactcgccgggcaacatgaggacgactctctggagttacagggcctcctcgaggatgagcgccttgctagtgcacaacaggcagaggtgttcacaaagcagatccagcagctccagggcgagctccgcagtctgagagaggagattagtctgctggaacacgagaaggaaagcgaactcaaagagattgagcaggaattgcacctggcgcaggcggaaatacagagcttgcgacaagcagcagaggacagcgccacagagcatgagtccgatattgccagcttgcaagaagatctgtgccggatgcagaatgaactggaggatatggagcgcatccgaggagactacgaaatggaaatcgcttcactgcgagccgagatggagatgaaatcgtctgagccatctgaggagctacaagaattacgggaacgataccatttcctcaacgaggagtacagggcacttcaagaatctaactcatctctcacaggtcaactggccgatctggagtccgaaaggacacaacgcgccacagagaggtggttgcagtcacagacactctccatgacctcagctgagagtcagacctccgagatggattttttggaacctgatcctgaaatgcagctactacggcagcaacttcgggatgcagaggagcaaatgcacggtatgaagaataagtgccaggaactctgttgcgaactggaagagctgcagcaccatagacaggtctcggaggaagagcaacggcgcctacagagagaactcaagtgcgcccaaaacgaggtgctgcgctttcagactagccactctgtgacccaatcatcgcctacacctaatccccccatcttttccctcccactggtgggcctggtggtcatcagtgctcttctctggtgttggtgggcagagacctccagctag

SEQ ID NO: 183391 - DNA, 3474 bp, synthetic construct
  misc_feature 1..3474: note = Description of Artificial Sequence: Synthetic coding sequence
  source 1..3474: mol_type = other DNA
ctgcgggccctggagggcgaggtgctgctgcccgccctgtacgaggaagaggaggaagaggaagaggaggaagaagaggtcgaagaggaagaagagcaggtgcagaagggagggtccgttggctccctgtctgtcaataaacatcgtgggctctctcttaccgaaacagaactggaggagctgagagcacaggtgctccagcttgtagcagaattggaggagacacgtgaattggctggccaacacgaagacgattcactcgagctgcaaggcttactagaggatgaaagactggcctcagcacagcaggcagaggttttcactaaacagattcagcagttgcagggcgaactgcggagcctccgtgaggaaatatcactcctggagcacgaaaaagaaagcgaattgaaagaaattgaacaggaacttcatttagcacaggccgaaatccaaagtctccggcaggcggccgaggacagcgcaaccgagcacgaatctgacatcgcatccctgcaggaggacctctgtcggatgcaaaacgagctcgaagatatggagcgaatcaggggggactacgagatggaaatcgcctcattacgcgcggaaatggagatgaagtctagtgagccctccgggagtctgggcctgagcgactactcaggcctccaggaggagctgcaggagttgcgagaacgctaccacttcctgaatgaggagtatagggccttacaggagtcaaattcttcactcacagggcaactggctgacctggaatcggagcgtactcagcgagctaccgaacggtggctccagtcccaaaccctatcaatgacatcggctgaaagccagaccagcgaaatggatttcctggagccagatcccgagatgcagctactgcgccagcagcttagagacgccgaggaacagatgcatggcatgaaaaacaaatgccaggaactgtgctgcgagcttgaagaacttcagcaccatcgccaggtcagcgaagaagaacagagaagactacagcgagagctcaaatgcgctcagaacgaggtcctgagattccagacctctcattctgtgacccagaacgaggagctgaaaagcaggctgtgtaccctacagaagaagtatgatacgagccaggatgagcagaacgagctccttaagatgcagctccagctgcaaaccgaactccgtcagctgaaagtcatgaaatcaacacttgtggaaaatcagagcgagaaggagctgctgtgcaggttgcagaagctccacctccagcatcaaaacgttacctgcgaaaaggagaaactgctggaacgccagcagcagcttcaagaagagctgcagtgccatgaggcggaacttcagcacctgcgagatactgtggcatccttcaaagaaagtaatgagaaggataccgagacccacgcccagctccaagagatgaaacaactgtaccaagctagcaaagacgagctcgaaagacagaagcacatgtacgatcagctcgaacaagacctgttgctttgccaactagagcttaaagagttgaaagcatctcaccctatccctgaagataagggtaaatgcgcaaataaatgtgacacacttctgagccgcttgactgagctgcaggagaaatacaaggcatcacagaaagagatggggcaattgcagatggaacagtgtgaacttctggaagatcaaagaagaatgcaagaggaacagggacagctgcaggaggaacttcatagattgactttgcctcttcctaaaagcggcttgctgcttaaaagccaggaactccttaccaaactagaagatttatgtgaactgcagctgctgtaccagggaatgcaggaggagcagaaaaagctaatccaaaaccaggactgcgtgttaaaggaacagctggaaattcatgaagaactacggcgctttaaagaaagccattttcaggaagtgcttgagaatccagatgactccaagctggcaaagtctagtaagtgcaaccgcaacaagcagtccaaacttttaatggagcagatgcaggctctgcaggtcatgtatgatgccggacaggccaagcaagaacttctgcagcaggaacaaggccgattattggaggaacgaaagcgcctgcaggccgatcttcagctttgtctggaggaaatgcagctgctccaagtgcagtctccttccatcaaaatgtctctggaaagttatggcaagtcctatggctccatggtcccgtccaacgagaactgtcgaaagacatatgacacaactgtggatgataacgagtcctactacaaatcctatacaagcacgcaaacgagcagcaagagcttcctaaaatcctatgattcttcaactagcgcctccgaggcctatggcaagagctactgtacgacgtctaattcctcaatcacatataaaaagtcttacggctccacctcatcttctgatacgtgccagaagtcctttgtgtctagctgcactgacgaagaaccagccgagcccgaggatatggaaagattcgaagaaatggtggtcaaagttctcataaagctccaggctgtgcaggcaatgtaccagatttcccaagaagaacattcccagctgcaggagcagatggaaaaacttctggccaaacagaaagacctgaaagaagagctggatgcttgtgaaagagaatttaaagaatgtatggagtgcctcgaaaaaccgatggcaccgcagaacgacaagaatgagataaaggaacttcaaaccaagttgcgcgagctacagctgcaatatcaggcctctatggacgagcagggccgcctgttggtagtccaggagcagctggaagggcaattgcaatgttgtcaagaagaattgcgccaattgagagaaaagcggccaagcgtggtcaaggaggcaaggggcaaaaacgcgaacaaaaatatgaacaagaacgccaatggagtaaagatgaagaaggtgaccaaaccttgctccgataccagtgaatctgatcttgagacaaggaagagccttgaagtggtgttgtattataaggcttcacagcgtaagttggacgggctggccaaagaagaggaaaagaaagaggagatggaggaagagaaaaagcaagttaaggaggaggccaaggagcaatgtggcgacgaactggtggccgagcctgctgatcctgaggaagcgaagtccactgaagatcaagaggagaacgaggaagataaagaggaggaagaaaaggaagaggatagcgaagaggaggaggatgatgccgacagctccctggaatctcccgaagagaataatccactgaggcttagtgagtcaaagaagaatatgttcggtctgtggaagcccatggtgtttctagccattgccgccgtagctctttacgtgttgccaaatatgagacaacaggagtcggagttttgtctcatggagtag

SEQ ID NO: 183392 - DNA, 309 bp, synthetic construct
  misc_feature 1..309: note = Description of Artificial Sequence: Synthetic coding sequence
  source 1..309: mol_type = other DNA
atgcaggccatggagggcgaggtgctgctgcccgccctgtacgaggaagaagaagaggaagaagaagaggaagaagaggttgaggaggaagaagagcaggtccagaaaggaggatccgttggctcattatccgtcaataaacaccgagggttgtcactgaccgagacagaactggaagagcttagggctcaagtcctccaactggttgctgaactggaagagacccgcgagttagcaggccagcacgaggacgattccttggaactccagggtctgctggaagatgagcgtttggcttccgcccagtag

SEQ ID NO: 183393 - DNA, 1341 bp, synthetic construct
  misc_feature 1..1341: note = Description of Artificial Sequence: Synthetic coding sequence
  source 1..1341: mol_type = other DNA
atggaggccggcgccggcgccggcgccggcgccgccggctggagctgtcctggccctggccccaccgtcaccaccctcggaagctacgaggccagcgaggggtgtgagcgaaagaagggccaacgatgggggagtctggaacggagggggatgcaagctatggaaggcgaagtcttgcttcctgccctgtatgaagaagaggaggaagaggaagaagaagaggaagaggtcgaagaggaagaagaacaggtccaaaagggaggttcagtcggctccttatccgttaacaaacacagagggctgtccctgacggaaactgaactggaagaactgcgggcccaagtgttgcagctcgtcgccgaactcgaggagacgcgcgaactggcaggacagcatgaagacgactcactagaactgcagggtttgcttgaggacgagcggctagccagcgctcagcaggcagaggtatttaccaaacagatacagcagcttcagggcgagttaaggtctctccgcgaggagatctccttgcttgaacacgaaaaggaaagcgagttgaaagagatcgaacaggagctccatctggcacaggctgaaatccagtctctgcgtcaggctgccgaggattctgcaacagagcatgaatccgacattgcctctctgcaggaggacctgtgtaggatgcaaaacgagctggaagatatggagagaatcaggggcgactacgagatggaaatcgcatccttacgggctgagatggaaatgaaatctagcgaaccttctggttctctagggctctccgattactctggattgcaggaggagctgcaggagctcagggaacgctatcattttttaaacgaagagtacagggcacttcaggagtccaatagcagcttgacagggcagctcgccgatctggagagcgagcggacacaaagagcaaccgagcggtggttacagagccaaacactctctatgacttccgccgagtcccagacttccgaaatggatttcctggagcccgatcccgagatgcagctcctgaggcagcagctgcgcgatgccgaggaacagatgcacggaatgaaaaataagtgtcaggagttatgttgcgagctggaggagctgcagcaccatagacaagttagtgaagaagagcaacggcggctgcagagagaattaaagtgcgctcagaatgaagtactccgattccagaccagccactcagtaactcagagttcacccacccccaaccctccgatctttagcctgcccttggtggggctggtggttatctccgcacttctgtggtgctggtgggcagaaacatctagttag

SEQ ID NO: 183394 - DNA, 21 bp, synthetic construct
  misc_feature 1..21: note = Description of Artificial Sequence: Synthetic coding sequence
  source 1..21: mol_type = other DNA
atgcaggccatggagggctag

SEQ ID NO: 183395 - DNA, 414 bp, synthetic construct
  misc_feature 1..414: note = Description of Artificial Sequence: Synthetic coding sequence
  source 1..414: mol_type = other DNA
atgcaggccatggagggcgaggtgctgctgcccgccctgtacgaggaagaggaagaggaagaggaggaagaggaggaagttgaagaggaggaagagcaggtccagaagggtgggagcgtgggctccctgtcggtgaataaacaccgcggactcagcctgacagagaccgagctggaggaactccgggctcaggttctacaactggttgcggaactggaagagacaagggagctggctggccagcatgaagatgactcgcttgagctgcaggggctcttggaagatgaaagactggcaagcgcccagcaggccgaggtgttcacaaaacagattcagcaactgcagggcgagttgcgaagcctgcgggaagagatcagcctgctcgagcacgagaaggagagcgaactgaagtag

SEQ ID NO: 183396 - DNA, 192 bp, synthetic construct
  misc_feature 1..192: note = Description of Artificial Sequence: Synthetic coding sequence
  source 1..192: mol_type = other DNA
atgcaggccatggagggcgaggtgctgctgcccgccctgtacgaggaagaagaagaagaggaggaagaggaagaggaggtcgaagaagaggaggaacaggtgcaaaagggaggctctgtgggatccctgagcgtcaataaacatcggggactatccctaaccgagacagagctcgaggaactccgagcctag

SEQ ID NO: 183397 - DNA, 870 bp, synthetic construct
  misc_feature 1..870: note = Description of Artificial Sequence: Synthetic coding sequence
  source 1..870: mol_type = other DNA
atggccggcgccggccggggcgccgccgtgagccgggtgcaggccggccctggttctccccgcagggcaagggggagacaacaagtacagcccctcggaaagcagagacccgccccttggcctgggcttcgaagtaaggaaaagaagaaagtcaactgcaagcctaagaatcaagacgaacaggagatcccattccgcctacgcgagataatgagaagtaggcaggagatgaaaaatccaatcagtaataagaaacgcaaaaaagctgctcaagtcaccttccgaaaaaccttagagaaagaagcgaagggcgaggagcccgatatagccgttccaaagttcaagcaaagaaaaggtgagtccgacggagcctatattcatagaatgcagcaagaagcccagcatgtgctttttttgagtaagaaccaggccatcagacagcccgaagtgcaggctgctccaaaggagaagtccgaacagaagaaagctaaaaaggcctttcaaaagcgaagactggacaaggtgcggagaaagaaggaggagaaggcagctgatcggcttgaacaggagctgcttagggatacagtcaagtttggggaggttgtgctgcaacctcccgaactaacggcacgaccacagaggtccgtgagcaaagaccagcccggccgaagaagccagatgctccggatgctactgagcccgggtggcgtgtcacagcctctcactgccagtcttgcgcggcagagaattgtggaggaagagcgggagcgcgccgtgcaggcttacagagcactcaaacaacgccagcagcagcttcatggggagcgaccgcacctgacatctagaaagaaacccgaaccccagctctag

SEQ ID NO: 183398 - DNA, 1656 bp, synthetic construct
  misc_feature 1..1656: note = Description of Artificial Sequence: Synthetic coding sequence
  source 1..1656: mol_type = other DNA
atgcccctgagcaccgccggcatcctgagcagcagcagcgccgcctcaaacagatctagaaataaggcccgctaccgcaccaaagccgttagcagtgaggtggacgagtcactctttggtgacatcaagtcacccgcccagggccaatctgattctccaattgtgttgctgcgtgacaagcacactttacagaaaacactgaccgcactcggcctggatcgcaaaccggaaaccattcaacttatcaccagggatatggtgagagaacttatagtgccaactgaagacccttccggggaaagcctgattatcagtccggaagaattcgaaagaatcaaatgggcttctcacgtactgactagagaagaactggaagcaagagaccaggccttcaagaaggaaaaagaagcaactatggacgccgtaatgactcgaaaaaaaatcatgaagcagaaggaaatggtgtggaataacaacaagaagctgagtgatctggaggaagtcgccaaggaaagagctcagaatctgcttcagcgcgctaataagcttcgaatggaacaggaggaggaactaaaagacatgtccaaaattatcttgaatgcaaaatgccatgccataagagatgcacagatcctcgaaaaacaacagattcaaaaggagctggacacagaggagaaacgtctggaccagatgatggaggttgaaaggcagaaatctattcagcgacaggaggagttagagaggaagcggagagaggaacgtatccgcgggcgaagacagatagttgagcagatggaaaagaatcaggaggagaggtctctactagcagagcagagagagcaggagaaggagcagatgctcgagtatatggagcagctgcaggaggaagacctcaaggacatggaaaggagacaacaacagaaactaaaaatgcaggccgaaattaaacgcattaatgacgagaaccaaaagcagaaggccgagcttctggcccaagagaagctcgccgaccaaatggtaatggagttcaccaagaagaaaatggcccgcgaggctgaattcgaagccgaacaagagcgaattagaagagaaaaggagaaggagattgctagactgcgagctatgcaggagaaggcacaggactatcaggccgagcaggacgcactacgtgctaaacgcaatcaggaggtagcggatcgcgaatggcgtcgcaaagagaaggagaacgctagaaagaagatggaaaccgaggcggaattgagaaagagccggctcgaacaggttgcatttaaagaacacgccctggccgtccaggtacagcgggaccgcgacgagttcgagcgcatccttcgggcccagcgagaacagattgagaaggagcggctggaggaggagaagaaagccacaggacgcctccaacacgcaaacgaactcagaagacaggttagagagaatcagcagaaggaggtccaaaacaggatagctacttttgaggaagggcgcaggctcaaggaggaagcccagaaaaggagggagagaattgacgagattaagaggaaaaagctggaggagctgcgtgcaacaggcctccccgaaaaatactgtatagaagcagaaagaaaagccaacatcttacccgccactagcgtaaactag

SEQ ID NO: 183399 - DNA, 1401 bp, synthetic construct
  misc_feature 1..1401: note = Description of Artificial Sequence: Synthetic coding sequence
  source 1..1401: mol_type = other DNA
atggtgcgggagctgatcgtgcccaccgaggaccccagcggcgagtcccttattatttctcctgaggagtttgagcgcatcaagtgggcaagccatgtattaactagagaagaactggaggccagggaccaagccttcaagaaggagaaggaagccacaatggatgccgttatgactcggaaaaaaataatgaagcagaaagagatggtctggaacaataataagaagttatcagatctggaggaagtagccaaagagagagcccagaatctgttgcagcgagccaataagctgagaatggagcaggaggaggaactgaaagacatgtccaaaataatactcaatgctaagtgtcacgcaatcagagatgctcaaatccttgagaagcagcagattcaaaaggagttggacactgaagaaaagcgtttagaccagatgatggaggtggaaaggcagaaatcaatacaaaggcaggaggagctggagagaaaacgcagggaagagcggataagaggacggcggcaaattgtggaacagatggagaagaaccaagaagagcggtctttattagctgagcagcgcgagcaagaaaaggagcaaatgctcgagtacatggaacaattgcaggaagaggatcttaaagacatggagcgcaggcagcagcagaaactgaaaatgcaggctgagatcaaacggatcaatgacgagaatcagaagcagaaagcagaactgctggcgcaggagaaattagccgaccaaatggtgatggagtttacaaagaagaagatggctcgggaggcggagtttgaagccgagcaggaacggatcaggcgtgaaaaggagaaagagatagcccgtctacgcgctatgcaggagaaggcccaggattatcaggctgagcaagatgcccttagggccaaacggaatcaggaggttgctgatagggagtggagaaggaaagagaaagagaatgctcggaaaaaaatggagactgaagcggaactgaggaaatccaggctggaacaagttgcttttaaggaacatgcactggccgtgcaggtccaaagagatcgggatgagttcgaaagaatcctccgcgcacagagagagcagatagagaaagaacggttggaggaagagaaaaaagcaaccggcagattgcagcacgcaaacgagctgaggcgccaggtccgggagaatcaacagaaagaggtgcagaatcggatagccactttcgaagaagggagaaggttgaaagaggaagcccagaagagacgggaacggatagatgaaataaaaagaaagaaactggaagaactccgtgccaccgggcttccggaaaaatactgcatcgaggcagaaagaaaagcaaacatactgccggccacaagtgtgaattag

SEQ ID NO: 183400 - DNA, 1884 bp, synthetic construct
  misc_feature 1..1884: note = Description of Artificial Sequence: Synthetic coding sequence
  source 1..1884: mol_type = other DNA
atggaggaggccgaccggatcctgatccacagcctgcggcaggccggcaccgcagttcctcccgatgtccagacccttcgggccttcacaaccgagctggtagtcgaggcagtggtaagatgccttagggttatcaacccagccgtcggctccggactgagtccactgctgcccctcgccatgtcagctagattccgcctagcgatgtccctggcccaagcgtgtatggatttggggtatcccctcgagctgggctatcaaaattttctgtatccctccgaaccggatttgcgcgacctgctacttttcctggccgaacgactgccaacagatgccagtgaggacgccgatcagcctgccggggatagcgcaatccttcttcgtgctattggctctcaaatcagagatcagctggctctcccctgggtgccaccgcacctacggacccccaaactccagcatctacagggtagcgcgttacaaaaaccttttcacgccagccgcctcgtggtgcctgagctgtctagtagaggtgaacccagggaatttcaggccagcccactgctgctccctgtgccaacacaggtaccacagcccgtcgggcgggtggcttcccttttggaacatcacgctctacaactctgccaacagaccgggcgagatcggcccggcgatgaagattgggtgcatcgcacctcacgcttgccgccccaggaagacacccgggcacaacggcaacggctgcagaagcagttaaccgagcacttacgccaaagttgggggctgttgggcgctcccatacaagctcgtgacctcggggagctactgcaggcctggggggctggcgcgaagacgggtgctcccaagggtagtcgcttcacccactccgaaaagttcacatttcacctagagcctcaggcacaggccacacaagtgagcgatgtgccagcaacctctcgccggcccgagcaggtcacctgggcagcacaagagcaggaattggagtcgcttcgcgaacagttagagggtgtcaatcgatccatcgaagaggtcgaggccgatatgaaaacgctgggcgtgagctttgtacaggctgagtccgaatgccggcactctaaactttcaacagccgaacgcgaacaagcacttcgactgaaaagccgagccgttgaacttcttccagacggaacagctaatctggccaagttgcaattggtggtggagaacagtgcccaacgggtgatccatctggcagggcagtgggagaagcaccgggtccctctgttggcggaatacagacaccttcgcaagttgcaggattgtagggaattggaatcatcacgccgtctggctgagatccaggagcttcaccagtcagtgagggctgcggctgaagaggcaaggcggaaggaagaggtctacaaacagttgatgtccgagttagaaaccctccccagggatgtgtcgcgtctcgcttacacccagcggattctggaaattgtgggtaatattcgaaagcagaaagaagagataaccaaaatcctgtctgataccaaagagctgcagaaggaaattaattcactgagtggaaagctggatcgtaccttcgcagtgactgacgaactcgtgtttaaggacgctaaaaaggatgacgctgttagaaaggcttacaaatatctggctgcccttcatgagaattgttcacagctgatccagactatcgaagacactggtacgatcatgcgggaagttagggatctggaagagcaaatcgaaactgaactggggaagaagactctgtctaacttggagaaaatccgcgaggattaccgagcactgaggcaggagaacgccggcctcctgggacgcgtgagagaggcttag

SEQ ID NO: 183401 - DNA, 1743 bp, synthetic construct
  misc_feature 1..1743: note = Description of Artificial Sequence: Synthetic coding sequence
  source 1..1743: mol_type = other DNA
atggaggaggccgaccggatcctgatccacagcctgcggcaggccgggacagctgtgcctccggacgtacagacactgcgcgcctttacaaccgaactggtggtggaggcagtcgtcagatgcttgagggtcatcaaccccgcggtcggcagtggtctgagccccttgctgccgctggcgatgtcagccagatttagactggcaatgtctctggctcaggcatgtatggatcttggctaccccctggaactgggctaccagaattttctatacccatcagagcccgatctgcgagacctgctgctgttcctggccgagaggctgcctacagacgcatctgaagatgcagaccagccagcgggcgacagtgcaatcctgctgagagccattgggtcccagatccgagaccagcttgcccttccctgggttccgccgcacctccgcactcccaaacttcaacatctgcagggaagtgccctgcagaagccatttcatgcctctcgactggttgtccccgagctttcctcacgcggcgagccacgggaatttcaggccagccccctcctgttgcccgtgccgacccaggtccctcagcccgtgggtagagtggccagtctgctcgaacaccatgccctgcagctttgtcagcagactggtcgtgatcggccgggcgacgaagactgggtccaccggacctcgcggctacctccccaggaagataccagggcacagcgccagagactgcagaaacagctgacggagcacctgcggcagtcctggggattgttgggagcaccaatacaggcaagggatcttggcgagcttctccaagcttggggcgccggcgccaaaactggcgccccaaagggaagcaggttcacccactccgaaaagtttacgtttcaccttgagcctcaggctcaggccacacaggtctccgatgtgcctgcaacgagtagaagacctgaacaagtcacgtgggcagcccaggagcaggagctggagagcctgcgggagcaactcgaaggcgtgaaccgttccatcgaggaggtcgaggccgatatgaagactctcggggtcagcttcgtccaagctgagtcagagtgccgccatagcaagctgagtactgctgaacgggaacaggccctgcgtctcaaatcccgcgccgttgaattactccccgatgggacggccaacttggccaaactgcaattggttgtggaaaacagcgctcagcgcgttatccacctggccgggcagtgggagaagcaccgcgtgccactgctcgccgaatacaggcatctgcgaaaactgcaggactgccgggagctcgagtcctcccgacgcttggctgagatacaggagctccaccaaagtgtcagggcggccgccgaagaggctcgccgcaaggaggaggtctacaagcaacttatgagcgaattggaaacactgcctcgcgatgtgagccgcctggcctacacacagcgcatcctggagattgtcggcaatatcaggaagcagaaggaagaaataaccaaaatcctttctgacacaaaggaactacaaaaggagataaatagcctgtctggaaagctcgaccgaaccttcgcggtaacagacgaactcgtgtttaaggacgccaaaaaagatgacgccgtacgtaaagcatataaatacctggctgcactgcacttcatcggagacggaacagtgggatgggggccatggatacccaataagtag

SEQ ID NO: 183402 - DNA, 603 bp, synthetic construct
  misc_feature 1..603: note = Description of Artificial Sequence: Synthetic coding sequence
  source 1..603: mol_type = other DNA
atggacgacaagaagaagaagcggagccccaagccctgcctggcccaacctgcccaggcacctggaacgcttcgcagagtgcccgtacccacatcccactccggcagcctggccctgggtttgccacacctgccttctcccaaacagcgcgcaaagttcaagcgggtcggcaaagaaaagtgccgcccagtcctcgccgggggcggatcgggctccgctgggacccctctccagcatagctttctaacagaggtgactgacgtctatgagatggagggcggtttgttaaacctcctgaacgacttccatagcggacgcttgcaggccttcgggaaagaatgcagctttgagcagctcgagcacgtcagggaaatgcaggaaaagttggcccgcctccacttttctctcgatgtttgcggggaagaggaggacgacgaggaggaggaagatggcgtcaccgagggactgcccgaggaacaaaaaaagacaatggctgatcggaaccttgaccagctgctgtccaatctcgaggacttatctaacagcatccagaaactgcacctcgcggaaaacgcagagcccgaagaacagagtgctgcctag

SEQ ID NO: 183403 - DNA, 690 bp, synthetic construct
  misc_feature 1..690: note = Description of Artificial Sequence: Synthetic coding sequence
  source 1..690: mol_type = other DNA
atgtgggccgccggccggtggggccccaccttccccagcagctacgcaggtttttcggccgattgtaggcctcgtagccgaccttctagcgattcatgtagtgtccctatgaccggcgcaaggggacaggggctggaggtggtgaggtcaccatctcctcccctgccgctgagttgttccaattcaacgcgctcactactgtcacccttgggccatcaaagtttccagtttgatgaggatgacggagatggggaggacgaagaagatgtagacgatgaggaagatgtggacgaagatgctcacgattcagaagccaaggtggcttctcttcgcggaatggagctgcaaggctgtgcttcgacacaggtggaaagcgaaaataatcaagaggagcaaaaacaagttaggcttccagagagcagactgaccccgtgggaggtgtggtttattggtaaagagaaagaggagagggatcggctgcagctgaaggccctcgaggaactcaatcagcagctcgaaaagcgaaaggagatggaagagagagaaaaacggaagatcatagccgaggagaagcacaaggaatgggtccagaagaaaaatgagcaggtgagacgcggaaagtggatccatacactgacctccctgcttcagaatatctcatcatactatacgtccctgcctaggttttag

SEQ ID NO: 183404 - DNA, 1122 bp, synthetic construct
  misc_feature 1..1122: note = Description of Artificial Sequence: Synthetic coding sequence
  source 1..1122: mol_type = other DNA
atgtgggccgccggccggtggggccccaccttccccagcagctacgcgggtttctccgccgattgtcgcccccgctcaagaccatcctcagattcttgcagcgtgcctatgacaggcgctaggggccagggccttgaggttgttagatcgccatccccacccttgccactgagctgctccaactcaacacgatcactcttatcacctctgggacaccaaagtttccaatttgacgaagatgacggagacggggaggacgaggaggatgtggacgacgaagaagatgtagatgaggacgcccatgattccgaggccaaggtcgcatcgctgaggggcatggaactccaaggctgcgcgtccacgcaggtggaatccgagaataatcaagaagagcagaagcaggtgcgcctccctgagagtagactcacaccttgggaagtgtggtttatcggaaaggaaaaagaagaaagggatcggctccagctgaaggccttggaggaacttaaccagcagctggaaaaacgaaaggagatggaggaaagagaaaagaggaagataattgccgaagaaaagcacaaagaatgggtccagaagaaaaacgagcagaagcgaaaagagagagaacagaaaattaataaagaaatggaggagaaggctgcaaaggaattagagaaggagtacttgcaggagaaagcaaaggagaaatatcaggagtggcttaagaagaaaaatgcagaggagtgcgaacgcaagaagaaggagaaagaaaaagagaagcaacagcaggccgagatccaggaaaagaaagagatagcagagaagaaattccaggaatggcttgaaaatgctaagcacaaaccaagaccggcggccaaatcctatgggtacgccaatgggaaactgaccggattctattcaggtaactcctatcctgaacccgccttttataaccccattccttggaagccgattcatatgcccccacccaaggaagctaaagacctgtctggtcgcaagtctaagcgacctgtgatctcacagccccataagtccagctccttagtcatccacaaagccagatccaacctttgcttaggaacactttgcaggatacaacgttag

SEQ ID NO: 183405 - DNA, 2268 bp, synthetic construct
  misc_feature 1..2268: note = Description of Artificial Sequence: Synthetic coding sequence
  source 1..2268: mol_type = other DNA
atggagtacatcttccccaacaccggcgtgctgtggagctggctgatcaacatcctatgtaaccgccgcatagtgtggttcacaagttcccagctgcccagaggtccaccagcttccagtgggggtcacagctttcatacactgagagaaaggtccgagagtcgcctgtttgtggagtcctatgccgctgcatggcagccgcctggtacttcaggcggtgctagctgctgcagtagcctgagtgctcaggttatgagcagtgaattcctcgcagagctgcattgggaggacggctttgccattccagtggctaatgaggaaaacaaactccttgaggaccagctgtccaagcttaaggatgagcgcgcatccctacaggacgagctgcgagaatacgaggagagaattaattccatgaccagccattttaagaacgtgaagcaggagttgtcaatcacccagagcctgtgcaaagctagggaaagggagaccgaatccgaagaacatttcaaggctatcgcccagcgggaactcggacgtgtgaaggacgagatccagagacttgaaaatgaaatggctagtatcctcgagaaaaagagcgacaaggagaacggtatctttaaggcgacacagaaactggatggcttgaaatgtcagatgaattgggatcagcaggccctcgaagcatggctggaggagtctgcccataaagacagcgatgcactcaccctccagaaatacgcccagcaggacgacaacaaaattcgggcactgacactgcaattggagaggctaacgctcgaatgtaaccaaaagcgtaaaatcctggacaatgaactcaccgaaaccatctcggcccagctggaacttgataaagcagctcaagatttccgcaaaatccacaacgaaaggcaggaacttatcaagcagtgggaaaataccattgaacagatgcaaaagcgcgatggggacatagataattgtgccctggagctcgctaggatcaaacaggaaacgagggagaaagaaaatctagttaaggagaaaattaagttcctggaatctgagataggtaataacacagaatttgagaagcgcatttctgtggcagatcgcaagctgctgaagtgccggacggcctatcaggaccatgagacctcaagaatacagctgaagggcgaactggactcacttaaggctacagtaaacaggacttcctctgatcttgaggctttgagaaagaatataagcaaaattaaaaaagatatccacgaagagacagcacgattgcaaaaaaccaaaaaccataacgagattattcaaaccaaactgaaggagatcacagaaaaaacaatgtccgtggaggaaaaggcaactaatctcgaagacatgctcaaggaagaggagaaggacgtcaaagaggtggacgtccagctcaacctcattaagggtgtcctttttaaaaaggcccaggagttacagactgagaccatgaaggagaaggctgtgctgagtgagatcgaagggacgcggtcgagccttaagcatttgaaccaccagcttcagaagttagatttcgagactctgaagcaacaggaaatcatgtacagtcaggattttcacattcaacaggttgagcgcagaatgtcacggctgaaaggggaaatcaactccgaagagaaacaggctctggaagcaaagattgtcgaattgaggaagtctctggaggagaaaaagagcacatgtggactgctggagacccagattaaaaagttgcacaacgacctttattttatcaaaaaagctcactccaaaaattctgacgaaaagcagtctttaatgactaagatcaacgaactgaacctgttcattgacaggtcagaaaaggaactggacaaggccaagggcttcaagcaagatctgatgatcgaggataatctgttaaaattggaagttaaacgaacccgcgaaatgcttcactcaaaggctgaggaggtgctaagtctggaaaagaggaaacagcagctttacacggcgatggaagagaggaccgaggagatcaaggtgcataaaaccatgctcgccagccagataagatatgtagatcaagagagagaaaacatttcaactgagttcagagagaggctgtcgaaaatcgaaaaattgaaaaaccgctacgaaattttaacagtggtgatgttgccccctgaaggcgaagaggaaaaaactcaggcttactatgtaatcaaagtcatgagcatgagctag

SEQ ID NO: 183406 - DNA, 2826 bp, synthetic construct
  misc_feature 1..2826: note = Description of Artificial Sequence: Synthetic coding sequence
  source 1..2826: mol_type = other DNA
atgagcagcgagttcctggccgagctgcactgggaggacggcttcgcaattcccgtggctaatgaggaaaacaagctgcttgaggaccagctgtctaagttgaaggatgaacgcgcttccctgcaggatgagctgcgcgaatatgaggagaggatcaattccatgacgagtcatttcaagaacgtgaagcaagagctgtctataacccagtctctgtgtaaggcacgagagagggaaacagaatccgaagaacacttcaaggccatagctcagcgcgaactggggagagtgaaggatgaaattcaacggctcgaaaacgagatggctagcatcttggaaaagaagtcagataaagaaaacggcatcttcaaggccacacagaagctcgatgggcttaagtgtcagatgaactgggaccagcaagccctggaagcatggcttgaagaatctgcccataaggactctgacgccctgactctgcagaagtacgcgcagcaggacgacaataagatccgagctttaacactccagctggagaggcttactctcgaatgcaatcaaaaacgaaagatactggataacgaactaaccgagaccataagcgcacaactggagttggacaaggcggcccaagactttcggaaaattcacaacgagcgccaggaacttatcaagcagtgggagaatactatcgagcaaatgcagaagcgagatggcgacatcgacaactgcgccctggaactggcgaggatcaagcaggagactagggagaaggagaacctggtgaaggaaaaaatcaaattcctagaatcggaaatcggtaataatacagaattcgaaaagcggatttcagtggcggaccgcaagctgctgaagtgcagaaccgcataccaagatcacgaaacatcacgcattcaactcaagggggaacttgactccctgaaggcgacggtcaaccggacctcctctgacctagaggccctgcgtaaaaacatttcaaaaataaagaaggacatacacgaggagacagcacggctccagaaaactaaaaatcataatgaaatcattcaaaccaagctgaaggaaattacagaaaagacaatgtctgtcgaggagaaggctaccaacctggaggatatgctgaaggaggaggagaaggacgtgaaggaagtggacgtgcaacttaatttgataaaaggcgtgctttttaaaaaagcccaggagctgcagactgagactatgaaggaaaaagcggtgctttctgagatcgagggcactcggagttctctgaaacacctgaaccaccagctgcaaaaactggacttcgagacgctgaagcaacaggagattatgtatagtcaggacttccacatacagcaggtcgagcggagaatgtcacggttaaagggcgaaatcaatagcgaagagaaacaggcccttgaagctaagattgtcgagctaaggaaatccttagaggaaaaaaagtctacttgtggcctcctggaaactcagattaaaaagctgcataatgacttgtactttatcaaaaaggcccacagcaagaattcagacgaaaagcaatccctgatgactaagattaatgagctaaatctgttcattgaccggtcagaaaaagagttagacaaagctaaggggttcaaacaggatctgatgatcgaggacaacctgctgaaacttgaggtgaaacggactcgcgaaatgctgcatagcaaagctgaggaagtgctgtccttggagaagcgaaaacagcagctctataccgccatggaagagcgaactgaggaaataaaggtccacaagacgatgctcgcttcacagatccgttacgtcgatcaggagcgggagaacatctcaaccgaatttagagaaaggctgtccaaaatcgagaagctgaagaacaggtacgaaatcttgacagttgtgatgcttcccccagaaggggaggaagagaagacacaggcttattacgtcattaaagccgcacaggagaaagaagaacttcagcgggagggagattgcctcgacgctaaaattaataaggcagagaaggaaatctatgccctggaaaatacacttcaggtactgaatagttgcaacaacaactataaacagtcattcaagaaggtaacgccctcgagcgatgagtacgagttgaagatccagttagaagagcagaagagagccgttgacgagaagtatagatataaacaaaggcagatcagagaactgcaggaagacatccaaagcatggaaaatacccttgacgtcattgagcacttagcgaacaacgtcaaggagaaactgagtgagaaacaggcctacagcttccagctctcaaaggagactgaagaacagaagcccaagcttgaaagagtcaccaaacagtgcgccaagttgacgaaggagattcggttgctgaaggataccaaagacgaaaccatggaagaacaagacatcaagctccgtgagatgaagcaatttcacaaagttatcgatgagatgctggtcgacattatagaagagaatacagaaattcgaatcatcttgcagacgtactttcaacagtcaggactggagttacctaccgccagcactaaaggaagtcgccaaagctcccgctctcctagccatacatccctcagtgccaggtcttcaagaagtaccagcacctccacctcacagtccagtataaaagttctggaactgaagttccctgcaagtagctcactcgtgggatcccccagccgcccatcctcagcatcctcgtcgagctcaaatgtgaagtctaagaagtcgagtaagtag

SEQ ID NO: 183407 - DNA, 1740 bp, synthetic construct
  misc_feature 1..1740: note = Description of Artificial Sequence: Synthetic coding sequence
  source 1..1740: mol_type = other DNA
atggccgagcccggcggcgccgccggccggagccaccccgaggacgggagcgctagcgaaggcgagaaggagggcaacaacgaaagccacatggtgtcacctccggagaaggacgatgggcagaaaggggaagaggccgtgggctcaactgaacaccctgaagaggtcacaacccaggctgaagcggctattgaggagggagaggtcgaaaccgaaggcgaagccgccgtagaaggggaagaggaggctgtcagctatggcgacgcggaatcagaagaggaatactactataccgagaccagctcacccgaggggcagattagcgctgcagacacgacatacccctatttctcgccgccccaggagctccctggagaggaggcttacgatagcgtgtccggtgaggcaggcctgcagggattccagcaggaggccaccgggccccccgagtcaagggaaagaagggtgacttccccagagcccagccatggagttctgggcccctcagagcagatggggcaggtgacctctggacctgcggtgggccgtctgaccggaagcactgaggaaccccaaggacaggttctccctatgggtgtgcagcaccggttccgcctctcccacgggtccgacattgagtctagcgatttagaggagtttgtttctcaggagcccgtgatcccccccggtgtacctgatgcacaccctagagaaggcgatcttccagtgtttcaggaccagatacagcaacctagcacggaagaaggcgctatggctgaaagggtggagagcgaagggtccgacgaggaggctgaggatgaaggcagccagttggttgtcttagacccagaccaccctcttatggtcagatttcaagcggcactgaaaaattatctgaaccggcagatcgaaaagttaaagctggacttgcaggagttggtcgtggctacaaaacaaagccgtgctcaaaggcaggagctgggcgtgaatctgtacgaggtccagcaacatttggtgcacctccagaagctacttgaaaaaagccatgatagacacgcaatggcgagctctgaacgtcgacagaaagaagaagaactgcaggccgctagagccttatacacgaagacatgcgctgccgcaaacgaagagaggaaaaaactggcggctctgcagactgaaatggagaacctggctttgcatctcttctatatgcagaacatcgatcaggatatgagggacgacattagggtgatgacacaggtggtcaaaaaggcagaaaccgagagaattagggcagagattgagaaaaaaaaacaggatctttatgtggaccaactcaccactcgcgcgcagcagctggaagaagacatagcgctcttcgaggcacagtatctggcccaggccgaggacacaaggatcctccgaaaagctgtttctgaagcctgcaccgaaatcgatgccatcagcgtcgagaaacggaggattatgcagcagtgggccagtagtcttgtcggaatgaaacacagggacgaggcccaccgcgcagtccttgaagccctgagtgtttctttagaaagatttcccagtcagaacattaataccgcaaggagccggctgtctacaacatggcacagcgccggaatcctcctgagagggtcgtttctgccaggcgccagcagggccttcgcttcagtttgctacggcggcgctgctgtggataatagaattcgggagtgttag

SEQ ID NO: 183408 - DNA, 1437 bp, synthetic construct
  misc_feature 1..1437: note = Description of Artificial Sequence: Synthetic coding sequence
  source 1..1437: mol_type = other DNA
atggccgagcccggcggcgccgccggccggagccaccccgaggacggctccgcctcagagggggagaaggagggcaacaacgagtcccacatggtgtctccacccgaaaaggacgacggccagaagggagaagaagctgtaggttccaccgagcaccctgaagaggttacaacccaggctgaggctgccattgaggagggcgaggttgagacggagggagaggccgccgttgaaggggaagaagaggccgtgagctatggagacgccgagtcggaggaggagtattactacaccgaaacttcaagccctgaagggcagatcagcgcggccgacacaacctatccttacttctcccctccacaagagctacctggagaggaggcttatgacagcgtgtccggcgaggctggactccaggggttccaacaagaggctacaggtcctccagaatctcgggagagacgtgttacctcccctgagccctcacatggggttctgggacccagcgagcagatgggtcaagtgacctcaggacctgccgtcgggaggctgaccgggtcaacagaggagccgcaggggcaggtgctgcccatgggtgtacagcacaggttccgtctctctcatggcagcgatatcgagagtagcgatctggaagaattcgtctctcaagagcctgtcatcccaccgggagtcccagatgcccacccgagagaaggtgatctaccggtttttcaggaccagattcagcagccgagtaccgaagaaggcgccatggccgagagggtagaatccgaggggtcagatgaagaagccgaggacgaaggctcacagctggtggtgctggaccccgaccacccgctgatggtgaggttccaggcagccctgaagaattacctgaacaggcagattgaaaaactgaagttagacttgcaagagctggtggttgctactaaacagagccgcgctcaacgccaggagttgggcgtgaacttgtatgaagtgcaacagcacttagtgcacttgcaaaaactattggagaaatcccacgacagacatgccatggctagctccgaacgcagacagaaagaggaagagcttcaagccgctcgggcgttatatacaaagacctgcgcagcggccaacgaggaaagaaaaaagcttgccgcacttcagacagagatggaaaacctggcgctccaccttttctatatgcaaaatattgatcaggacatgcgagatgatatcagagtcatgacacaagtggtgaagaaggctgagactgagcgcatacgtgctgagatcgaaaaaaagaagcagggagttggggacactggcgcggccttcattccgaagaccacgcaaggcgatcaggtttccggccgcgggaagaagaagcccgggactgtcgtggcccgggtatcccccgccgaactatag

SEQ ID NO: 183409 - DNA, 3093 bp, synthetic construct
  misc_feature 1..3093: note = Description of Artificial Sequence: Synthetic coding sequence
  source 1..3093: mol_type = other DNA
atggccgagcccggcggcgccgccggccggagccaccccgaggacgggagcgcctcagagggagaaaaggaaggcaacaatgagtcccacatggtcagcccacccgagaaggacgatggccaaaaaggggaggaagcggtgggaagcaccgagcatcctgaggaagtgacaacccaagctgaggctgcgatcgaggagggtgaagtcgaaacagagggtgaagccgctgtggaaggagaggaagaggcagtgagctatggagacgccgagtcggaggaagagtactattatactgagacatctagccctgaaggtcagatatcagctgctgatacgacctacccatacttcagccctcctcaagagctgcccggcgaggaagcctacgactctgttagtggggaggctggactccaggggtttcagcaggaagctacgggaccaccagagagccgcgaaaggagggttacttcccccgagccaagccatggagttttgggcccttcagaacagatgggacaggtgacaagtggaccagccgttggccgcttgaccggctcaaccgaagaaccgcagggacaggtgcttcccatgggggttcagcatagattcagactgagccatggcagcgacattgagtcatccgacctcgaggagttcgtttctcaggagcctgtaatacctcccggggttcctgacgcacatcctcgcgagggcgaccttccggtgtttcaggatcagattcagcagccatccacagaagaaggcgccatggccgagcgagtggaaagcgagggctccgatgaggaggcagaggacgagggaagccagctcgtcgtgctggaccccgaccatcccctgatggttcgctttcaggccgcactgaagaactatttgaatcggcagatcgaaaaattgaagctcgacttgcaggaactggtggtggccactaagcagagtcgggcccagcgacaggaattgggagttaatctgtacgaagtgcaacagcacctcgtgcacctacaaaagctgctggagaagagccacgaccgccatgctatggcctctagcgaacggaggcaaaaggaagaggagcttcaggccgcgcgggcgctctacaccaagacatgcgcagccgcgaatgaagagcgcaagaaactcgcagctctccaaactgagatggagaatctggcactgcatctcttctatatgcagaatatcgaccaggacatgagggatgacatccgggtcatgacacaggttgtgaagaaggctgaaaccgaacggatacgcgcagaaattgaaaagaagaagcaggatctctacgtcgatcagcttaccactcgggcccagcagttggaggaggacatagcgctgttcgaggctcaatatctcgcccaagcagaagatactagaattcttcgcaaggctgtatcagaagcctgcactgaaatcgatgccatctcggtggaaaagagaaggataatgcagcagtgggcttcaagtctggtgggaatgaagcaccgcgatgaggctcatcgcgccgtcctggaggccctacgggggtgccagcaccaagctaagtcaacagatggcgagatcgaggcttacaagaaatccataatgaaggaggaagaaaaaaatgagaaactggcgagcatcctcaatcgcacagagaccgaggccaccctcctgcagaaactgaccacacagtgtttgaccaaacaggtggcactgcagtctcaattcaatacctaccggcttaccctgcaggacacagaagatgctctttcgcaggaccagctggagcagatgattctgacagaggaactgcaagcaatcagacaggcaattcagggtgagttggaactacgccgcaagactgacgctgccatccgtgagaaactccaagagcacatgacaagtaataagacaacaaagtattttaaccagctgatcctgcgcctgcagaaagagaaaaccaacatgatgacccatctttctaaaatcaatggagacatcgcacaaactacactagatattacgcacactagttcacgcctagatgcacatcagaaaaccctcgtggagctcgaccaggacgtgaaaaaggtgaatgaacttatcaccaattcgcagtctgaaataagccgccgcacaattctaattgagagaaagcaaggtctaataaattttttgaataaacaactcgagcgaatggtcagcgaactggggggcgaggaagtggggcccctcgaactggagattaagcgactatcaaagctgattgacgagcatgatggaaaggccgtacaggctcaggtcacctggctgagactgcaacaagaaatggtaaaagtgacgcaagagcaggaggagcaactagccagcttagatgccagtaagaaagagttgcatatcatggaacagaagaaacttcgcgtggagagtaagatagaacaggagaagaaggagcagaaggaaatagagcaccacatgaaagacctcgacaacgaccttaagaaactcaacatgctgatgaataagaatcgctgctcatccgaggagctagagcagaacaatcgagtgacagagaacgagtttgtacgcagtctaaaagcctctgagcgggagacgatcaagatgcaggataagctgaatcagctgtcggaagagaaggcaactttgctgaatcagcttgtcgaggctgagcatcagatcatgctgtgggagaaaaaaatacaactggcaaaagaaatgcgaagcagtgtggactccgagatcgggcagaccgaaatcagggccatgaaaggggagatacatcggatgaagaaatattgtcgaaccacacaggatgctcatcgccacgtgcacgagcagcatggaacacacgcaggcacatgtaccaagaatactgggcgggctcaagctagggccaggaccaccagagatgcccggggccacgtgcatgaacagcacggcacgcgggccggtacttgcaccaacaacacagggcgcgcccaggcccgcgctcgaacacgtgatgccaggaggcatgtccatgagcaccggacccacactgctcgggcctag

SEQ ID NO: 183410 - DNA, 3429 bp, synthetic construct
  misc_feature 1..3429: note = Description of Artificial Sequence: Synthetic coding sequence
  source 1..3429: mol_type = other DNA
atggccgagcccggcggcgccgccggccggagccaccccgaggacggcagcgccagcgagggggagaaggaaggaaacaatgaaagtcatatggtaagtcctcccgagaaggacgacggccagaagggggaggaggcagtgggctctaccgagcacccagaggaggtcactacgcaggccgaagccgccattgaagaaggcgaagtggagactgagggcgaggcagcggtggagggcgaagaagaagccgtgagttatggcgacgctgagagcgaagaagagtactactatactgaaacatcctctcctgagggccagatcagcgcagccgacacaacttacccttatttctctccacctcaggagctccccggtgaagaggcttatgattcagtgagcggtgaggccggattgcagggttttcagcaagaggccaccggtccgcccgagtctagggaaagaagagttacaagtccagagccatcccatggtgtgctgggacccagcgaacaaatgggacaggtgacaagcggacccgcggtgggccggctcactggctcaaccgaagaacctcaggggcaggtcttgccaatgggagttcagcatagatttaggctctcgcacggttctgatatcgagagtagtgaccttgaagagttcgtatcgcaggaacctgtgatcccccctggcgtgccagacgcacacccccgcgaaggggacctccccgtctttcaggatcagatccagcagcccagtaccgaagaaggcgcgatggccgagcgagttgagtcagagggcagtgatgaagaagccgaagacgaggggtcgcaactggtcgtactggatccagaccacccactcatggtgcgtttccaggccgcattgaagaattacctcaatcgacagatcgagaaactgaagttggacctgcaagaactcgtcgtggccacaaaacagtcacgggctcaacggcaggagttgggcgtaaatctttacgaagtacagcagcatctagtccatctacagaagctccttgaaaaaagccacgaccgtcacgccatggccagcagtgaaaggcgtcagaaggaagaggaattacaagccgctagggcactgtacaccaagacatgtgctgcagccaacgaggagcgcaaaaagctggctgccctgcaaaccgagatggagaacttggcactgcatcttttctatatgcaaaacatcgaccaagacatgcgggacgacatacgcgtgatgacccaggtcgtcaaaaaggctgaaacggaacgaatccgcgcggaaatcgagaagaaaaaacaggacctgtacgttgaccaactcaccacccgtgcccagcagctggaggaagatattgcattattcgaagctcagtatctcgcacaagccgaggatacgagaatattaaggaaagcagtcagcgaggcatgcacagagatagacgcaatctctgtcgaaaaaagacgaattatgcagcagtgggctagctcactcgtcggtatgaagcaccgtgacgaggcacaccgggctgtcctcgaggcccttcgtggctgccagcatcaggccaagagtaccgacggtgagattgaagcctataaaaaatctattatgaaagaagaggaaaagaacgagaagctcgccagtattctgaacagaacagagaccgaagccacccttctgcaaaagttgacaacacagtgcctcactaagcaggtggccctgcagagtcagttcaacacctaccggttgactctgcaggatactgaggatgccctgtcacaggatcaactcgagcaaatgatactaactgaggaactgcaggctatacgccaggctattcaaggcgagcttgagctgagaagaaaaacagacgctgccatcagagagaaattgcaggagcacatgacctctaacaagacaaccaaatacttcaaccagcttattctgcgcctgcagaaggagaagaccaacatgatgactcaccttagtaagatcaatggtgatatcgcccaaacgactctggacataacacatacctcgtcacgtcttgacgcccaccaaaagacactggtagagctggaccaagacgtcaaaaaagtgaatgaactcattaccaattcgcagtccgagatttctagacgcacaatcctgattgagagaaagcagggactgattaactttctgaacaagcagctggaacgtatggtgtccgagctgggcggagaggaagttggtccactcgaactggaaatcaaaagattgagcaaactgatcgacgaacacgacggtaaagctgtacaagctcaggtaacttggctgaggctgcagcaggagatggttaaagtgacgcaggaacaagaagagcagctcgctagtctggatgcatctaagaaggagctccatattatggagcagaaaaaactgcgcgtggagagcaagattgagcaggagaaaaaggaacagaaggaaattgaacaccatatgaaagatcttgacaatgacctgaaaaaattaaatatgctcatgaataagaaccgatgctcttccgaagagctcgagcagaacaaccgtgtgacggaaaatgagttcgtcaggagtcttaaggcgtccgaaagagagactataaaaatgcaggacaaattaaaccaactttcagaggaaaaagcaaccctgttgaatcagctggtcgaagcggaacaccaaatcatgctctgggaaaaaaagatccaactagcaaaggaaatgagatcctcggtcgatagcgaaatcggacagactgagattagagccatgaaaggagaaatacaccgcatgaaggttcgcctggggcaactgctaaagcagcaggagaagatgatccgagccatggagctagctgtcgccagacgggaaaccgtgactacccaggccgaagggcagagaaaaatggatagaaaggctctgacacgcaccgatttccaccacaagcagctagagctgcggcggaaaattcgcgatgtacggaaggcgaccgatgaatgcaccaagaccgtactcgagttggaggaaacacagagaaacgtgagctcttcgctgttagaaaagcaggagaaactctccgtgatccaagcagatttcgacactctggaagccgatctgacacgcctgggggccctgaaacgacagaacctctctgagatcgttgccctccagacacgattgaaacacttacaggcagtgaaggaggggagatacgtatttcttttcagaagcaagcaatcccttgtgctcgaaaggcagcgccttgataagagactagccctgatcgctacaatcctggatagagttagagatgaatatccgcaattccaggaagcacttcataaagtgtcccagatgattgcgaacaagctggaatcgcctggtccatcatag

SEQ ID NO: 183411 - DNA, 921 bp, synthetic construct
  misc_feature 1..921: note = Description of Artificial Sequence: Synthetic coding sequence
  source 1..921: mol_type = other DNA
atggccgaggtgagcatcgaccagagcaagctgcccggcgtgaaggaggtctgtagagatttcgcagttctcgaagatcacaccctcgcccactccctgcaggagcaggaaatagagcaccacttagcgagtaacgtgcagcggaacagacttgttcaacacgacctccaggtggctaagcagcttcaggaggaagatctgaaggcgcaggctcagctccagaagcgttacaaagatctcgagcagcaagactgtgagatcgcacaggagatccaggagaagctggctatcgaagcagaaaggaggcggatacaggaaaagaaagacgaagatattgctcggctgctgcaggagaaggaactccaggaggagaagaaaagaaaaaaacactttcccgagtttcctgctactcgcgcctatgccgactcctactattatgaagatggcgggatgaaaccacgagttatgaaggaggctgtatccaccccaagcagaatggcacaccgcgatcaggaatggtatgatgccgaaatcgccagaaagttacaggaggaagaactcctagccacccaggtggatatgcgcgctgcccaagtggcccaggacgaggagattgccaggttactcatggctgaggaaaagaaggcatataagaaggccaaggaacgcgaaaagtctagccttgacaagcgaaaacaggaccccgaatggaaaccaaagacagccaaggctgcaaacagcaagtcaaaagagtccgacgagccacaccattctaaaaacgagcgaccagccagacctccaccaccaatcatgaccgacggggaggacgccgactacacccactttactaaccaacagtcttccacacggcacttttctaaaagcgaaagctcacataagggctttcactataaacactag

SEQ ID NO: 183412 - DNA, 1449 bp, synthetic construct
  misc_feature 1..1449: note = Description of Artificial Sequence: Synthetic coding sequence
  source 1..1449: mol_type = other DNA
atggccgaggtgagcatcgaccagagcaagctgcccggcgtgaaggaggtctgcagagacttcgcggtccttgaagatcacaccctcgctcattccctgcaagaacaagagattgaacatcacttagcttccaacgttcagcgcaaccggctggtccagcacgatctccaggtggccaagcagctgcaggaggaggatctgaaggcacaggcccagctgcagaaacgctataaagacctggagcagcaggactgtgagatcgcccaggagattcaggagaaacttgccattgaggccgagaggcgccgaatccaggaaaaaaaggacgaggatatcgcaagactgctgcaagaaaaagagctccaggaggaaaagaagcggaagaagcatttcccagaattccccgccactcgcgcgtatgcggattcttactattacgaggacggggaccagccaggaagtcgcagagccagggagctgggatcggggttcagcagaccctgtagactgcagcgggacggtaaaaccgtgaaacacaaaaaggagaagcccgaacacccattggaaaatcttgaagaacccgaacagcattgctcttcaaagcgaagtctctcgtcttcaagttctggaaagggccgagacaatccgcatattaacaacgaacagcacgagcggaaacggagcacccaggaacgtcccaggcgcccgcttctccctacaatatccggcgaggtgtttctttcgacagaatgtgatgactgggaaaccaaaatcaaccaccagacccgaaactgggagaaacaatccagacatcaggataggctgtcaccgaagagctctcagaaggcgggccttcactgcaaggaagtggtctatggtagagaccacggacagggcgagcaccgcaaacgcagacacaggccgagaacgcctccattctccgagtcagaagagcagttgcacctgcatgacgcagggatgaaaccacgggtcatgaaggaagctgtttccacaccctcaagaatggctcacagagaccaggagtggtacgacgcagaaattgcaaggaaattacaggaagaggaactgctagccacgcaggtcgatatgcgcgctgcgcaggtcgcgcaggacgaagaaattgctaggctgcttatggctgaagaaaaaaaggcctacaagaaggctaaggagcgagaaaagagttccctcgacaaacggaagcaagatccggagtggaaaccaaaaacggcgaaggctgctaattctaaaagtaaagagtccgatgagccccaccattcaaaaaatgaacgcccagcccgtccccctcctcctattatgacagacggagaggatgcagactacacgcactttaccaatcagcagagctcgactaggcacttcagtaaatccgaatcatcacacaaagggtttcattacaagcattag

SEQ ID NO: 183413 - DNA, 1425 bp, synthetic construct
  misc_feature 1..1425: note = Description of Artificial Sequence: Synthetic coding sequence
  source 1..1425: mol_type = other DNA
atggccgacagcgccagcgagagcgacaccgacggcgccggcggcaacagctcctcttctgccgccatgcagtcgtcatgtagttcaacaagtggaggcggaggaggagggggaggaggggggggaggtggtaaaagcgggggcatagtgatctctccctttcgcctagaggaactcactaaccgactagcgagcctgcagcaagagaacaaagtcctcaaaatcgaactagaaacctataaattgaagtgtaaagcccttcaagaggagaatcgcgatttgcggaaggccagtgtgaccatccaagcgagagcggagcaagaggaagaattcattagcaataccctgtttaagaagatccaagcactgcagaaagaaaaagagactctcgccgtcaactatgagaaagaagaggaattcttaacaaacgagctgtccaggaagttgatgcagctgcagcacgaaaaggctgagctggaacagcatctcgagcaggagcaagagtttcaggtcaataagcttatgaagaaaattaagaaactcgaaaatgacacaatcagtaagcaacttaccctcgaacaattgcgaagagagaagattgatttggaaaacaccctggaacaagagcaggaggctctggtgaaccgtctgtggaagcgaatggacaagcttgaagctgagaaaaggattttgcaagaaaagttggaccaaccagtgtcggctcctccatcccctcgggacataagtatggaaattgattcacctgagaatatgatgagacacatcagattcctcaaaaatgaagtggaaaggctgaaaaagcagctccgagctgctcagttacagcattctgagaagatggcccagtatttggaggaggagaggcatatgcgagaagagaacctgcggctgcagcgcaaacttcagcgcgaaatggagagaagggaggctctgtgccgccagctcagcgaaagcgaaagcagcctggagatggacgatgaaagatatttcaacgagatgtctgcccaggggctgcggcccagaacagtttcgtcccccatcccttatacaccatcgccaagtagctccagaccaatttctcccggtctgtcttacgcaagtcatacggtgggattcacaccacctacttctctgacacgggcaggaatgtcctactataacagccctgggctccacgttcagcatatggggacctcccacgggatcacacgcccctctccccgcaggtccaacagcccagacaagttcaagcgacctacccctcctccatctccgaacacccagaccccagtgcagcctccaccacctccacccccgcctccaatgcagcccaccgtgccttctgcggcaaccagtcagcccaccccatcccagcatagtgctcacccttcgtctcaaccttag

SEQ ID NO: 183414 - DNA, 2055 bp, synthetic construct
  misc_feature 1..2055: note = Description of Artificial Sequence: Synthetic coding sequence
  source 1..2055: mol_type = other DNA
atgaacccccccgccgccttcctggccggccggcagaacatcggcagtgaggtcgagatatcaactattgagaaacagaggaaagaactgcagctactgatcggtgaattaaaagatcgcgataaagagttgaatgatatggtggcagtccatcagcagcaattgttgtcctgggaggaggacaggcaaaaagtactcaccttggaagagagatgcagcaaacttgaaggggaattgcacaaacgaacagagatcataagatccctaaccaagaaggttaaggctctggagtccaatcagatggagtgccagactgcactgcagaagacccaattgcaattgcaggagatggctcagaaggccacccattcaagtttgctttccgaggatctcgaagcccgaaatgagacgctgtctaataccttggtggagttgtcagctcaggtcgggcaactgcaggctcgggagcaggccctgaccaccatgatcaaactcaaagataaagacatcattgaagcagtgaaccacattgctgattgtagtggcaagtttaaaatgttggagcacgcccttagagatgctaaaatggctgagacttgtatcgtaaaggagaagcaggactacaaacagaaactgaaggccctgaagattgaagttaataaactcaaagaagacctaaatgagaaaaccacagagaataatgaacagagagaggaaattatacgattgaagcaggaaaagtcatgcttgcacgacgagctcttatttaccgtggagcgcgagaagcgaaaagacgagctgttgaacattgccaagtctaagcaggaacgaactaacagcgagctccataacttgcgacaaatctatgttaagcagcagtcagatctacaatttctgaatttcaacgtggagaactctcaagagctcatccaaatgtatgacagcaaaatggaagagtctaaagccctcgatagctcccgcgacatgtgcctttcggacctcgaaaacaatcaccctaaggtagacattaagagggaaaaaaaccagaaatctttgttcaaagaccagaagttcgaggcaatgctggtccagcagaaccgttctgataaaagttcctgtgatgaatgtaaagagaagaagcagcagattgataccgtgttcggcgagaaaagcgttattactctgtcgagtatcttcacgaaagatctggtggagaagcacaatctgccttggtctcttggcggaaaaacgcaaattgaaccagaaaacaagattactctgtgcaagatccatactaaatctcccaaatgccatggaacgggagtgcaaaacgagggtaagcagccatccgagaccccaaccctcagcgacgagaaacagtggcatgatgtttcagtgtacttaggcctgactaattgtccttcttccaagcatccagagaagttagatgttgagtgccaggaccagatggagagaagcgaaatttcgtgttgccaaaaaaacgaggcttgcctgggcgaatctgggatgtgtgacagtaagtgctgccacccatctaactttatcatcgaggcccccggccacatgagcgacgtcgagtggatgagtatctttaaacccagtaaaatgcaacgaatcgtaagactcaaaagtgggtgtacgtgctccgaatctatatgcggtacacaacacgacagtcccgcatccgaacttatcgccattcaggactctcacagtcttggttcctctaagtccgcactgcgggaggatgaaactgaatcaagcagcaacaagaaaaactctccaacatcactgcttatctacaaggatgctcccgcctttaacgagaaagccagcatcgtgctgccaagccaggatgattttagtcctactagcaaacttcagagattgttggctgaatcacgacaaatggttactgacttagagctgtccacccttctcccgatcagtcacgagaacctgaccggtagtgccacaaacaagtccgaagtgcccgaggagagcgcgcagaaaaatacgttcgtttcttactag

SEQ ID NO: 183415 - DNA, 1338 bp, synthetic construct
  misc_feature 1..1338: note = Description of Artificial Sequence: Synthetic coding sequence
  source 1..1338: mol_type = other DNA
atgcccaacagcagccccaaggaccccaccaccgccagcggcaacgggtccaaggttgagcgtgagaaaagaaaggatgaactgctgaacattgccaagtcaaagcaggaacgaactaattccgagctacacaaccttcggcagatctacgttaagcaacaatccgaccttcagttcttgaactttaatgtggaaaacagtcaggagctaatccagatgtatgactctaaaatggaagagtccaaggcgctcgatagttcccgagatatgtgccttagtgacctagaaaataaccaccccaaagtggatatcaagcgggagaagaaccagaaatcattgttcaaggaccagaaatttgaggccatgctcgtgcagcaaaacagatccgacaagtcctcatgcgacgaatgtaaggaaaaaaagcagcaaatcgacacagtgttcggagaaaaatcagtgattaccctgagctcaatttttacgaaagatttggtggagaagcataacctgccttggtcccttggtgggaagacgcagatcgagcctgaaaataaaattaccttgtgcaagatacatacaaaaagtcctaaatgccacggaacaggagtgcaaaacgaggggaaacagccatccgagacacccacccttagtgatgaaaaacaatggcatgatgtctcagtgtatctgggactcacaaattgcccttcatcaaagcaccctgaaaagcttgacgtcgagtgccaggatcaaatggagagatcggaaatatcatgctgccagaaaaacgaggcttgcttaggtgaatcaggcatgtgtgattctaagtgctgtcacccatcaaattttattatcgaggcccccgggcacatgtccgacgtcgagtggatgagtatttttaagcccagtaagatgcagagaattgtgcgactgaaaagcgggtgtacttgtagcgagagcatatgtggaacccagcatgatagcccggcctccgaacttatcgctatccaggattcccatagtctgggatcaagtaaaagtgctctgcgagaggacgaaaccgagtcttctagcaacaaaaagaactctcccacctcgctgcttatctataaggacgctcccgcattcaatgaaaaggccagcattgtgcttccgagtcaggacgacttctctcctacaagtaagttgcagaggctgctggcggagtccaggcagatggtcacagaccttgaactgtccacactgctgccgatatcccacgagaacctgactgggagtgctactaataagagcgaggtgccagaggagtcggcccagaagaacacattcgtgtcatattag

SEQ ID NO: 183416 - DNA, 2049 bp, synthetic construct
  misc_feature 1..2049: note = Description of Artificial Sequence: Synthetic coding sequence
  source 1..2049: mol_type = other DNA
atgaacccccccgccgccttcctggccggccggcagaacatcggctctgaggtggagatctcgactatcgaaaagcagagaaaagagttgcagctcctcatcggagagctcaaggatagggacaaggagctaaacgacatggttgccgttcaccagcagcagttactctcttgggaggaagaccgccagaaggtgctgacattagaggagagatgttcaaagctggagggagaacttcataagcggaccgagattattcgctcattgactaagaaggtgaaggcactggagtccaatcaaatggagtgtcaaacagccctgcaaaagactcagcttcagctccaagagatggcgcagaaggccacccacagcagcctgctatccgaagacttggaggctcggaacgagacattgtcgaatactttagttgaactttctgcgcaggtcggtcagctccaggctagagagcaggcgttgactactatgatcaagttgaaagataaggatatcatagaagctgtgaatcatatcgccgactgctccggaaagttcaagatgttagagcacgctctgagggatgcgaaaatggctgaaacatgtatcgtgaaggagaagcaggattataaacagaagctgaaggccctgaagatcgaggtgaataagcttaaggaagatcttaatgaaaagaccacagaaaataacgaacaacgcgaggaaatcatcagactgaaacaggaaaagagttgtctgcacgatgaacttctgttcacagtggaaagagagaagcggaaggatgagttactgaatatcgccaaatccaaacaggagagaactaatagtgaactgcacaatctgaggcaaatctacgtgaagcagcagtccgacctgcagttcctaaactttaacgtggagaattcacaggagctcattcagatgtacgattccaagatggaagaatcgaaagcactggactcctcccgcgacatgtgccttagtgatctcgagaacaatcaccctaaagtggacatcaaaagagagaagaaccagaagtcactcttcaaggaccagaagttcgaggcgatgcttgtccagcagaatagaagcgacaagagttcctgcgacgagtgtaaggaaaaaaagcagcagattgacacagttttcggcgagaagagcgtcataactttgtcgtcaatctttaccaaagatctcgttgaaaaacataacttgccctggtccctgggaggtaagacacagatcgaacctgagaataaaattacactgtgcaaaatacacaccaagagccctaaatgtcacggcacaggagtacagaatgaaggaaaacagccgagtgaaacaccaaccctgtccgatgagaagcagtggcatgacgtgagcgtctatctgggcctcactaattgtccgtcaagcaagcaccccgagaaacttgacgtggagtgccaggatcaaatggagcggagcgaaatctcctgctgccagaaaaatgaggcgtgcctgggagagtccggtatgtgtgattcgaagtgctgccaccccagtaactttattatagaagccccaggccacatgagtgatgtggaatggatgtcaattttcaagcccagtaagatgcagcggattgtgagactgaagtcagggtgcacatgctctgaaagtatctgcggaactcaacatgactcccctgcctcggagcttatcgccatccaggactctcactctctgggctcgtcaaagagcgcactccgagaggatgagacagagtcgtcctctaataaaaaaaactctcccaccagtttgttgatatacaaggatgcgccagcctttaatgagaaggcttctatcgtcttgccctctcaggacgacttttcccctacaagtaagcttcagcgtttgctagctgagagcagacagatggttaccgatttggaattgtcaactctcctgccaatatctcacgaaaatctcacgggctctgctaccaacatttctcatctttgcgggcgccagaaggccgatactaacactgagtag

SEQ ID NO: 183417 - DNA, 1494 bp, synthetic construct
  misc_feature 1..1494: note = Description of Artificial Sequence: Synthetic coding sequence
  source 1..1494: mol_type = other DNA
atgcccaagaaggagaagatggccaagacccccctgagcgacgagaagcagcttctgcttttccagcagaagttgctggccgaggaggaaatggcaaaaaagaaagagcgtttgctgtcccagtttctgaaggacaagctggctaaggaagagcacaactcggccttgaacctcaacaagatcaacacccagtggcgcaccgtgctgcgagaagtgaagactagagaattgcacaaggacatcgaaatactgtctcagacttttgaaagggttgttgactgcaaggataatgttatcaagtcacttgcgaaggacctatccgaggccgaagaacagtacgcacatgctctgcgatcgcacctgcacaatgtcgaccagcttctggccttgcagcggcaccgtctgtcattgctggaggagagctacaacatggagctcgaggccctaacaaaggagtttgagacggagcgcaagaccattattgatcagcatgagaaagaaattcattatctccaagacatattcatggccatggagcagaattatatcgatagcgaatacgagtccaagttggaattccagtcaatgtggaacgatctgaagaatatgaacctcgaagagaagcattttctgcgcctccacctggagaatcgagtggaagatttatggcggaaatttcaggatgtcttaaagaattacacagacgcaaccgaagaccggaaagccgcctttgagaccctacaggtgaaagatgagaagtctagtaaagaaattgaggttcagatgaagaagatccaaaagctgcaggacgcgatcacaatctccaaaggcaagattatgattcactcccgcgagtctgaggacgagaacagatatatcaggaacgacaaggagctcgtgttggtgcagctgaggaagctgaaggcccagcggacacaggcccgagcagcgtcccaaaagaacctggtgcgcctgactctggaatccaatgccacacttaaggccctccgcaaaatagtggataagggggagaagatcctgaaattggccgagatatgtcggaaattcgagacggaggaagagaaagtcctacccttctatagtagcgtactgactcctaaagagcaggaagggatccagaaaaataacctggaggaactgaccgaggaactgacgaaagtgatggtagattacataggcatggagaacttctggaagagatataataaggtgaagctggagcagttatccctgcaacatcggagggctcaacttctcgacattaacggtaaactgcgagaaatgttgaagcaatatctggatggcatcagcgtaagcgacgaggtgctgtctcagctgaaccctctgttcatcgtcaactatcagagcaatttgttgcagccactcagtatacggatcgcccatcctggcagcacctccccttctgctccctggagggatcagagacgctcctttttcctcggctcctcatag

SEQ ID NO: 183418 - DNA, 1455 bp, synthetic construct
  misc_feature 1..1455: note = Description of Artificial Sequence: Synthetic coding sequence
  source 1..1455: mol_type = other DNA
atgcccaagaaggagaagatggccaagacccccctgagcgacgagaagcagctgctcctgttccagcagaaactattagccgaggaggagatggccaagaaaaaagagcgtcttctgagtcagttcttgaaagacaagctggctaaagaggaacacaactccgccctgaatctcaataaaatcaatacacagtggaggacagtgctgagggaggtcaagacacgggagttgcataaagacatcgagattctcagccagaccttcgagagagttgtggattgtaaggacaacgtgattaaatccctagcgaaggacttgtcagaggcagaggagcagtacgctcacgcgctgaggtcccatctgcataatgtcgaccaacttctggcccttcagaggcacaggctgagcctcctcgaggagtcttacaatatggaattggaggccctgactaaggagtttgaaacagagcggaaaacaataatcgatcagcacgaaaaggagattcattacctgcaggatatatttatggctatggaacagaactacattgactctgagtacgagagcaagcttgagtttcaaagtatgtggaacgatctcaagaacatgaatctcgaagaaaaacacttcctgcgccttcacttagagaaccgcgtggaggatttgtggagaaagttccaggacgtcctgaagaactatactgatgccaccgaggatagaaaggcagcgtttgaaacactgcaggttaaggacgagaaatccagcaaggaaatagaagtccaaatgaaaaaaatacagaagctgcaggatgccatcaccatcagcaaaggaaagattatgatccattcccgggaatcggaagacgaaaatcgttatatcaggaacgacaaagagctggtgctggtgcagctccgcaagcttaaagcccagcgcacccaagcccgcgctgcctcgcaaaagaatctagttcgcctcaccttagagtccaacgcaacactgaaggcattacgcaagatcgtagacaagggggagaagatactgaaactggccgaaatatgtcgtaaattcgagaccgaagaggagaaagtgttacccttttatagttctgtcctgacacccaaggaacaggaggggattcagaaaaataatctcgaagaacttaccgaagagcttactaaggtgatggtggattatatcggcatggagaacttttggaagcgctacaataaagttaagttagaacagttgagtttacagcaccgaagggcccagttactagacatcaacggaaaactgcgagaaatgctgaagcaatacctggatgggatcagcgtctcagatgaagtgttaagccagctcaaccccctatttattgtcaattatcagtctaacctgcttcagcccctgtccatcagaatagcacaccccggagacaagcaacacccaacaacttag

SEQ ID NO: 183419 - DNA, 3240 bp, synthetic construct
  misc_feature 1..3240: note = Description of Artificial Sequence: Synthetic coding sequence
  source 1..3240: mol_type = other DNA
atggagagcaacttcaacaccgagagcagcagcaccttcaccctgcaatcaagttccgagactttgtttagtattcagctccttgactttaaaacctcattgctagaggccttggaagagttacgcatgcgtagggaagctgaaatacattacgaggagcaaatcggaaagatcatagtcgagacccaggaattgaagtggcagaaagaaaccctgcagaatcagaaagaaaccctggctgagcagcataaggaggccatggctgtgtttaagaaacaactccagatgaaaatgtgcgcgctggaagaagaaaagggaaaatatcagctggccaccgaaatcaaggagaaggaaattgagggattgaaggaaacactgaaggccttacaagtgtccaagtacagcttacagaaaaaggtgtcagagatggagcagaaggtgcagctccatttgctcgctaaagaagattaccacaagcagttatccgagattgaaaagtattatgcaactatcacagggcagtttggactggtgaaagagaatcatgagaagctggaacaaaacgtcagagaggccatccagtccaataagcgcctaagtgccttaaacaagaaacaggaggccgaaatctgctcattgaagaaggaacttaaaaaggcagcatccgacctgatcaagtctaaggtgacatgccagtataagatgggcgaagaaaacattaacctgactatcaaggagcagaaattccaagagttacaagagcggctgaatatggaattagagctgaatgaaaaaataaatgaggaaatcacccatatccaggaggagaagcaagacatcattatcagttttcagcatatgcagcagctgcttaggcaacagatccaggcaaatacagaaatggaggctgagttgaaggtgctaaaagaaaacaatcagacgcttgagagggataacgagctgcagagagagaaggtaaaagagaatgaggagaaatttctcaacctccagaacgagcatgagaaagctctgggaacttggaaacgccatgctgaggagctcaatggagaaatcaacaagataaagaatgagctgagctccttaaaggaaacccacatcaaattgcaagagcactacaacaagctgtgcaaccagaaaacattcgaagaggacaaaaaatttcaaaacgttcccgaggtgaataatgaaaattctgaaatgagcaccgagaagtctgagaacactatcattcagaaatataacactgaacaggagattcgtgaggaaaacatggagaatttctgttcagacactgaatatcgagaaaaagaggagaagaaggaaggctcattcattgaggaaataatcatcgacgatctacaactttttgagaagtcctttaagaacgaaattgacaccgtcgtgagccaagacgagaaccagagcgagattagcctaagcaagaccctttctttggataaagaagtgatatctcagggccagacgtccaacgtaactgataaccggaagtctgtgaccaccgaaattaaggataaaatctgcctcgaaaaggataacgggtgtacagagtttaaatctcctaacaaccatttcgttgtactcgacacagctattgaaacagagaaaattcacctggaacggacgcgcggcttggatgtgcaccataccgacgtgaatctggaggtggaaaacaacaaaacctccttcaatagcattctcaacgagaccgctcataacacataccataacaacaacaaagatgtgagcgaaaatgaaccatttaaacaattccggcttctgccaggtacccgcgagcacgcactcgaaaaggaaattaccaatagcgaccagaccaaggctgatcttgatagcagcttagacatcaagaagaatccagtcccctgtcagaagtacagcctccgcaactccagtaatgtgatgctcgacgacaagcaatgcaaaattaagcagatccagctcctgaccaagaagtcagagtgttccattctcctctccaagcagacaagcgactttctccaggtttgcaatgacacattagagaagagcgagttaactgtgccgtgcgacatcgtgattgatcatcacgtgtcttacgccgcattcagcgcaaattctaagttgctgctgaagaatagtgacaaaaatgtgcactccatgtccatgttagtgaagcccaatagctcacccggaggaaagacaatgtgtaagaacatgagcgacatgcagaattcccagtttaataactgcctgggatatctggagaatactaatgtgaatatttcccacttacacctgaacaatgaaaattcccacgctagccaggccaaggacgtgaaaacagctgtccacatgaagacctgtaccgagactgaattcagtaataagaagaatcaaattgacgaaaatcaggtgaccgaggctactaaaaacgacttgttcctttttgtgagtattaacgagagacaacatactttgctgaataatacagagaaaactgagtccctgaatgacatagtgtctggaaaaatgttttcagaggggcagttggaggagagccattctttccacattgaaccttccggggacttggttaatcggtctggccgctccacatttgatctgtccacttctgataagaaaaccgagaagacccccgtatacatgaatttctccgatcccggcccttggagcaaagttaaccatattgagagtcaaactgcctcatccagcactccttgtattagtcttctgttaaaagaacgtcccctcgacccttccgagaataaaaagattatttcaatggccctgtgcaaaaacattggtgtcgacgatgtcgggaaggacatcggaccagatacaacgagcatcaaccgggtggccgacacactaaacaactggtccattcatccagaccctaaaggggagccgagtgaggaaaagaatgccatggcgaagacattctacgattcaagcttccctaccgagcatgtcaagaccaagcctctaatctctacgcctttgcaatcgcacctccaggcaatcaagacaactaagaatactagcggagatgacgattggcagagcctgatcaccaatcagctgaataagtccgagaatctgctgtcactcgagaatgataatcagcccaaaaaaaggaaagcagaagaaaccctggagaagaacaatcgcctcaaatag

SEQ ID NO: 183420 - DNA, 1617 bp, synthetic construct
  misc_feature 1..1617: note = Description of Artificial Sequence: Synthetic coding sequence
  source 1..1617: mol_type = other DNA
atgctgcagatcggcgaggacgtggactacctgctgatcccccgggaggtccggctggctggaggtgtgtggagggtcatttccaaacctgcaaccaaggaggccgagttccgggaacggctgacacagttcctggaagaagaaggccgcaccctcgaggatgttgcccgcatcatggagaagtcgactccccatccaccgcagccacctaaaaaaccgaaagaaccacgtgtgaggcgtcgggtgcaacagatggtgacacctccccctcgcctcgttgttggtacatacgacagttctaacgcctccgactccgagttctcggattttgagaccagcagggacaaatccaggcaaggacctaggagagggaaaaaagtaagaaagatgccagtgtcctatttgggttctaagttccttggttctgatttagagagcgaggatgacgaagaactcgtcgaagcctttctgcggcgccaggagaagcagccctctgctccgcccgcgcggaggagagtgaaccttccagtgcccatgtttgaagataacctggggccacaactgtccaaggcggacaggtggcgggagtacgtctcccaggtctcttggggtaagctaaaacggcgtgtgaaagggtgggccccgcgcgctgggccaggagtgggcgaggcaagactcgcatcaactgctgtcgagagcgccggcgtgtcaagtgcccccgagggaacaagccctggggataggctggggaacgctggcgacgtatgtgtcccgcaggcctcccctcgccgttggagacctaaaattaactgggcatcctttcgtaggcgtcggaaagagcagacggcaccaactggacagggagctgacatagaggcagaccagggcggcgaagccgccgacagccagcgggaggaggcgatcgctgaccaacgagaaggcgctgcaggcaaccagcgcgcgggcgcccccgccgaccagggagctgaggcagcagataaccagagagaggaggcagccgataatcaacgcgcgggtgccccagccgaggagggtgctgaggcagccgataatcagcgtgaagaggcggcagataatcagagagccgaggcacctgctgatcagcggagccaaggcacagataatcatagggaagaagccgctgataatcagcgcgcagaggctcctgccgatcaggggagcgaggttacagacaatcagcgcgaagaggcggtccatgatcagcgcgaaagagccccagcagtgcaaggcgccgacaaccaaagggcccaggcccgagcggggcagagagccgaggccgcgcataaccagcgagctggagcacctgggattcaggaagccgaggtgagcgcagcccaaggaacgacgggtaccgcccctggcgcgcgagcccgcaagcaggtaaagaccgtgaggttccaaacgccaggacgattttcatggttctgtaagcgccgtcgagctttctggcacacgccaaggctccctacgctccctaagagggtccctcgcgccggcgaagcccgcaatcttcgggttctgagagcggaggcccgcgcagaggccgagcagggggagcaggaggaccagctgtag

SEQ ID NO: 183421 - DNA, 975 bp, synthetic construct
  misc_feature 1..975: note = Description of Artificial Sequence: Synthetic coding sequence
  source 1..975: mol_type = other DNA
atgctgcagatcggcgaggacgtggactacctgctgatcccccgggaagtgcgcctggccggcggagtgtggcgcgtcatcagcaagcctgcgaccaaggaggcagaattcagagagagactgacccaatttctggaggaagagggtcgcaccctcgaggatgttgcaagaataatggagaaatcgactcctcatcccccccagccacctaaaaaacccaaggaacctcgagtgcgaaggcgagttcagcaaatggtgacacccccgccgaggcttgtcgttggcacctatgatagctcgaacgcttcagatagcgagttttcagacttcgagactagcagggataaaagtcggcagggaccccgtagaggcaagaaagtgagaaagatgcctgtaagctatctaggttctaaattcctcggttccgatcttgagtccgaggacgacgaggagctcgtagaagctttcttgcgccggcagggcctccaagtcatcagagggcaaggacctcagctaaccagggggcagagactgcagattatcagagggaagcgcctacagatcatccgggggcagggtccccagctgcggagaggccagaggctccaaatcacgaggggaaagcgcctccagatcatcagaggccagcgccctcaactgactaggggccacagggcccaaatcactaccggaaagcgcctgcaaattatcaggggacggcgccctcagcttactcgggggcagcgacttcagattataaagggcaagagaccctatatgactagagggaagggaccccagttgtccagggtgcaaattatccgcgggcaccgccctggactcgctagaggccagagactgcatatcatccggggccagggccctcaggtatctcgaaagctcaagagtcaactccccaaggggccacaggaacaactgcaggagccgggccctgggaataggagtagacagtag

SEQ ID NO: 183422 - DNA, 5532 bp, synthetic construct
  misc_feature 1..5532: note = Description of Artificial Sequence: Synthetic coding sequence
  source 1..5532: mol_type = other DNA
atggagaacgagatcttcacccccctgctggagcagttcatgacctcgcccctcgtcacgtgggtcaaaaccttcggacctcttgccgccgggaacgggacaaatctggatgaatacgtggccttggtcgatggagtgtttctgaaccaggtgatgttgcagattaaccccaagctggaatctcaaagggtgaacaaaaaagtgaacaacgatgcatctctgcgcatgcataatctgagcatcttagttcgccagatcaagttctactaccaggaaacactgcagcagctgatcatgatgtccctgccaaacgtcctcatcatcggtaagaacccatttagcgagcagggtaccgaggaagttaagaaactactgctccttctcttaggttgcgcggtccagtgccagaagaaagaggagtttatcgagcgtattcaaggcctggacttcgacaccaaagccgctgtggctgctcacattcaagaggtcacacacaaccaggagaatgtcttcgacctgcagtggatggaggtgactgacatgagtcaggaagacattgaaccgctcctgaagaatatggcactccatctgaaaaggctgatcgatgagagggatgagcattctgagacaatcatagagctctccgaggagcgcgacggtttgcatttccttcctcacgcttcttcatctgcccagtctccttgtggtagtccgggaatgaaacgaaccgagtcccgacagcatctgtcagtggagctcgcagacgccaaagcaaaaattcggagactgagacaggaattggaggagaaaacagagcagctcctggactgcaaacaggagctcgaacagatggagatcgagctgaagagactgcagcaggagaacatgaacctcctgtctgacgcccgatctgcccggatgtacagggacgagcttgatgctctccgcgaaaaggccgtgagggtagataagctggaatccgaagtgtcaaggtacaaggaaagacttcacgacatcgagttctacaaggccagagtggaagagctcaaggaagataaccaagtcctgctagagactaagaccatgctggaagaccagctggagggcactagggctaggtccgacaagttgcatgagttggagaaggagaatttgcagcttaaggctaagttgcatgatatggaaatggaaagggatatggaccggaagaaaatcgaggaactgatggaagagaatatgaccctggagatggcccagaaacaatctatggatgagtcattacacctcgggtgggaactcgagcagatctctcgcacctccgagctgtccgaggccccccagaaatccctcgggcacgaagtcaacgagttgacctcttcccgcctcctgaaacttgagatggaaaatcagtccctgaccaagactgtagaagagcttcggacaaccgtggattcggtcgaagggaatgccagtaaaatcttgaagatggaaaaggaaaatcagcggctatctaagaaggtggagatcctggaaaacgagatcgtacaggaaaagcagtctcttcagaattgccagaatctgagcaaagatctgatgaaagagaaggcccaactggagaaaaccatcgaaaccctgagagaaaactctgaacggcagataaagattctggaacaggagaacgagcatcttaaccaaactgtatcaagcctccgacaaaggtctcagattagcgctgaagcccgggtcaaggatatagaaaaagaaaacaaaatcctgcatgagtctatcaaggaaacgtcctctaagctcagcaaaattgaatttgaaaaaaggcagatcaaaaaagaattagagcactacaaggagaagggcgaaagggccgaggaactcgaaaatgaactgcaccaccttgaaaaggagaatgagctgcttcaaaagaaaatcacgaaccttaagattacatgtgaaaaaatcgaagctttggagcaagagaattcagaacttgaacgcgaaaaccgcaaattgaagaagacactggactcttttaaaaatctgacctttcagctcgagtcgctcgaaaaggaaaatagccagttagatgaggagaaccttgagctgagacggaacgttgaatcactgaaatgtgcttcaatgaagatggctcagctccagctcgagaataaagagctggaaagcgaaaaggaacagctgaaaaagggcctcgaactcctgaaggcttcatttaaaaaaactgaacggctggaggtgtcataccagggcctggacattgaaaatcagcggctccagaaaacgctggaaaacagtaacaagaagattcaacaacttgagtcagaactccaggatcttgagatggagaaccagacactgcagaagaacctcgaggaactaaaaatcagtagcaagcgactggaacagctggagaaggagaataaatcccttgagcaagagacttctcagcttgagaaagacaagaagcagctggagaaagagaataaacgcctcagacagcaggctgaaattaaagatacaaccctggaagaaaacaacgtcaaaatcgggaatctggagaaggagaacaagacactgtctaaagagatcggaatctacaaggagtcctgtgtacggcttaaggagcttgagaaggagaacaaggagctcgtgaaacgtgctaccattgacatcaaaaccctcgtcacactgcgcgaagaccttgtcagtgagaaactgaagacccagcagatgaataacgacttggagaaattgactcacgagctggagaagatagggcttaataaggagaggcttctgcatgatgagcagtctactgatgacagtagatataagctgctagagtccaagctggagagcaccctgaaaaaatccctcgagataaaggaggagaagattgcagctctggaggcccgcttagaggagtccactaactacaaccagcaacttcgtcaggaactgaagacagttaaaaagaattatgaggccctgaagcaaagacaggatgaggagcggatggtgcaatccagcccgcccatcagcggtgaggataacaagtgggaaagggagagtcaggaaaccacaagagagcttctgaaggtgaaagaccggctgatcgaggtggaaagaaacaatgccactctgcaggctgagaagcaagctcttaagacacagcttaaacaactagaaacgcaaaataataacctgcaggcccagattctggccttacagcgccagacggtctctttgcaagaacagaatactaccttgcagacccaaaacgctaagctgcaggtcgaaaattccaccctgaacagtcaaagcacctccctcatgaaccagaacgctcagcttctaatccagcagagctcactggaaaatgaaaatgaaagtgtgatcaaagaaagggaagacttgaaatccttatatgacagtttgatcaaggatcatgaaaaattagagttattacatgagaggcaggcctcagagtatgagagcctgatctcaaaacacgggactttaaaatcagcccacaagaatctggaggttgagcaccgcgacctcgaggacaggtataatcagctacttaaacagaagggtcagctggaggaccttgaaaaaatgctgaaggttgagcaggaaaaaatgttgttggaaaataagaatcacgagaccgttgccgcggagtataaaaaactatgcggagagaatgatcgccttaatcacacatactctcagctactgaaggagaccgaagtgttgcagaccgatcataaaaacctgaagtcacttctgaataactcgaaacttgaacaaacgaggcttgaagcagagttcagtaaactgaaagaacagtaccagcagctggacattaccagcaccaagctgaacaatcagtgtgagctgctcagtcagctcaagggtaatcttgaagaagaaaacagacacctcttggatcagattcaaaccctgatgctccagaatcggaccttactggagcaaaacatggaatctaaagacctctttcatgtggagcagcgccagtatattgataaattgaacgagttgagaaggcagaaagagaaactcgaggagaagatcatggaccagtataagttctacgatccctcgccaccacgacgtcgtggcaattggattacattaaagatgcgtaaattgattaagagcaaaaaggacatcaacagagagagacagaagtcactgacgcttactcccacacggtccgattctagtgagggctttctccagctgccacatcaggacagccaggactctagttcagtggggtcgaattccctggaagacgggcagacgctcggtaccaagaagagttccacgatgaacgatctagtccaatctatggtcttggcagggcagtggactggctctacagagaatctggaagttcctgatgacatttccactggcaaaaggcggaaagagctgggagcaatggcctttagcacaactgcaattaacttcagtacagtcaactctagcgctggattccgttccaagcagctcgtcaataacaaagacaccacatcatttgaggacatttccccacagggagtgtctgacgatagttcaactgggtctcgcgtccatgcctctcgtcctgcctccctagattccggccgtacgagcacctctaatagcaacaacaatgcatccctgcatgaggtaaaggcgggcgccgtgaataatcaatctaggcctcagtcccacagctcaggcgagttttccctgttgcacgatcatgaggcctggtcgtcaagcgggtcctctcccatccaatacttaaagcggcagaccaggagctctcctgtgctccaacataagatttcggaaaccctagaaagccgccaccacaagataaagacaggttcccccggatccgaggttgtcaccttgcagcagtttcttgaggagtccaacaagctgaccagtgtgcagataaagagcagctctcaggaaaacttgctggacgaagtaatgaaatccctgtctgtgtcctccgacttcctaggaaaggataagcccgtgtcgtgcgggctcgccaggagcgtgtctggaaaaactcccggagacttctatgacagacgcacaacgaaaccagagtttttgagaccagggccacggaaaaccgaggacacctactttatttccagtgccgggaagcctactcctggtacccaggggaagatcaaactggttaaagaatctagtctctcccgccaatctaaggatagtaatccatacgcaacgctcccaagagcatcaagtgtcataagcaccgcagaagggacgaccagacgtacctctattcatgactttttaactaaggacagccggcttcccatctctgtggactctccccctgccgccgctgattcaaatacgactgccgctagcaacgtggacaaagtccaggagtccaggaacagcaagtcaaggagccgggagcaacagtcctcatag

SEQ ID NO: 183423 - DNA, 5613 bp, synthetic construct
  misc_feature 1..5613: note = Description of Artificial Sequence: Synthetic coding sequence
  source 1..5613: mol_type = other DNA
atggagaacgagatcttcacccccctgctggagcagttcatgaccagtcctctcgtaacgtgggtgaagaccttcggcccgcttgctgccggaaacggaactaacctggatgaatacgtggcccttgttgacggcgtcttcctgaaccaggtgatgctccagatcaaccccaagcttgagtcccagcgagtgaataagaaagtgaacaacgatgcatcgttgcgcatgcataacttgagcatcctcgtgagacagattaaattctactaccaagagacgctgcagcagctcatcatgatgagccttcccaacgtgctgatcatcggcaaaaacccctttagtgaacaaggaaccgaggaggtaaagaagctgctgctcctgctgttgggatgcgctgtgcagtgtcagaaaaaagaggagttcatcgagagaattcagggtctggattttgacacaaaagcagccgtggcagcccacatccaggaggttacccacaaccaggaaaacgtcttcgacctgcagtggatggaagtcacagacatgtcacaggaggatattgagccgttactcaaaaatatggcactgcacctcaagagacttattgacgagcgagatgagcattccgagacaatcatcgagctatctgaagagcgagacggactgcactttctgcctcatgcgtcctccagtgcccagagcccatgcgggtctccgggcatgaaacgcaccgaaagccgccaacatctgtctgtcgagcttgcggatgcgaaggccaaaatcagacgactgcgccaggaactcgaagagaagaccgagcaacttcttgattgcaagcaggaactggagcagatggaaatagagctgaagcgccttcaacaagagaacatgaacttgctatcagatgctcggtccgcccgcatgtacagggatgaactggatgctctgagagagaaagcagtgcgggtggacaagctggagtcagaggtgtctagatacaaagaacggcttcatgatatcgagttttacaaagctcgggtcgaggaactgaaggaagacaatcaggtgctgcttgagaccaagacgatgctcgaggaccagctggaaggcaccagagcccgttctgacaaacttcacgaactggaaaaggaaaatcttcagcttaaagccaagctgcatgacatggaaatggagcgcgacatggacagaaagaaaattgaggaactcatggaggagaacatgactctcgagatggcccagaagcagagcatggatgagagcctccatctgggatgggagctggagcaaatctcccggactagtgagttatctgaggcaccgcagaaatccctggggcacgaggttaacgagctgacgagctctcgactgctcaaactggaaatggagaatcagagcctgactaagacagttgaagagctcagaacgactgttgatagtgttgaagggaatgcatccaagattttaaaaatggagaaggagaaccaacggttgtcgaagaaggttgagatcctggagaatgagattgtccaggagaagcagagcctccaaaactgccagaatctatcaaaggacctgatgaaggagaaggcacagttggaaaaaacaattgagactctgcgggagaacagcgagcggcaaattaaaatcctggaacaggaaaacgagcatctgaatcagactgtttcgagtttgcgccaaaggagtcagatctcggcggaggcacgagtcaaagatatcgagaaagagaacaagatcctgcacgaaagtatcaaagaaacatcctcaaagctttctaagattgagttcgagaagcgacagatcaagaaagaattagaacactataaagagaaaggggagcgtgccgaagaattggaaaacgagttgcaccatctggaaaaggaaaatgagctcctgcagaaaaagattaccaatcttaagattacctgcgagaagattgaagcccttgagcaggaaaattccgagctggaaagggaaaaccggaaacttaagaagaccttggactctttcaagaacctcacatttcagctggagagcttggagaaagagaactcacagctggatgaggaaaatctggagcttagacgaaatgtggagtccctgaaatgcgcctcaatgaaaatggctcagctccaactcgagaataaggagctggagagtgaaaaagagcagctcaagaagggcctggaactgctgaaagcttcgttcaaaaagacagaaagactagaggtgagctaccagggcttggatatcgaaaaccagaggctgcagaaaacactcgaaaatagtaacaagaaaatccaacagctggaaagcgaactgcaggacctagaaatggagaaccagacactccaaaaaaatctggaggaactaaaaattagtagcaaacggctggagcaactcgaaaaagaaaataagtccctggagcaggaaacatctcaactagaaaaggataaaaagcagctggagaaggaaaataagcgcttacggcagcaggctgaaataaaggatacgaccttggaggagaataacgtgaaaataggcaacttagaaaaggagaataaaacgctctccaaggaaattgggatctataaggaatcatgcgtccggcttaaagagctcgaaaaggagaataaggagctcgtgaaacgcgccactatcgacatcaagaccttggtgaccctccgcgaggatctggtgtctgagaaactgaaaacccagcagatgaataatgacctggagaagctgacacatgaactggagaaaattggtctcaacaaagagcgcctgctccatgacgaacagtctacagacgacaggtacaaactcctggagtccaagttggaaagtactctcaaaaagtcattggagattaaggaggaaaagattgcggcactggaagctcgactggaggaaagcactaattacaatcagcagctgcgccaagagcttaaaactgtgaaaaaaaactatgaagctctgaagcagaggcaagacgaagaaagaatggtgcagagttctccccccatttctggcgaagacaacaagtgggaaagagagtcccaggagacaacccgtgaattgctgaaggtgaaagacagactcatcgaagttgaacgcaataatgcaaccctccaggcggaaaaacaggcattaaagactcagctgaaacagctcgaaacccaaaataacaatttgcaggcccagatcctggccttgcagcggcagacagtttctctgcaggagcaaaatacaaccttgcaaacccagaacgccaagctgcaggtggaaaacagcaccctcaacagccagtcaacaagtttgatgaaccagaatgcccaactgcttattcaacagtcaagcctagaaaacgaaaatgagagcgtgataaaagaacgagaggacctgaagtcattgtacgactcactcataaaagatcatgagaagctagagctcctgcatgagagacaggcctccgaatacgagtccttgatctctaagcatggcaccttgaaaagtgcacacaagaatcttgaagtggagcatagagacctcgaagatagatataaccaattgttaaagcagaagggccaactggaggacctcgaaaaaatgctgaaggtggaacaagagaagatgctcctggaaaacaaaaaccacgagacagtggcagccgagtacaagaaactctgcggggagaacgataggttgaatcatacttattctcagctgctcaaggagacggaggtgttgcaaaccgatcataagaacttgaagagccttctgaacaattctaaactagaacagacacgactggaagccgaattttcaaagctcaaggagcagtatcagcagctcgatattacctctaccaaattaaacaaccagtgcgagctactgtctcagctgaaagggaaccttgaagaagagaataggcacctgttggatcagattcagaccttgatgttacagaatcgcaccctgctggagcaaaatatggagagcaaagacctcttccacgtagagcaacggcagtatattgataagttaaacgaacttcgccggcaaaaggagaaattggaggagaagatcatggatcaatataagttttatgacccttcaccgccacgtcgacgcggtaactggattactctgaagatgcggaaacttattaagtcaaaaaaagatattaaccgggagcgccagaagagcctgaccctcacccccactaggtcagacagttccgagggctttctccagctgccccaccaggattcccaggactcgagtagtgttggctcaaattcactggaggatggtcagaccctgggaactaaaaaaagcagtatggttgctctgaaacgcctgccctttcttcgtaaccggcctaaggacaaggataaaatgaaagcatgttacagacgtagtatgtcgatgaatgatctggtgcaaagcatggtccttgcgggccaatggaccgggagtaccgagaacctggaggtgcctgacgacattagcaccggcaagaggcgtaaagagctcggggccatggcctttagcacgactgccatcaacttttccacagttaactcttccgccggcttcaggtccaaacagctcgtgaacaacaaggacacgaccagttttgaagacatctctccacaaggcgttagtgatgattcctccaccggatctcgagttcacgcctcccgccctgcctcactggactctgggcggacaagcacctccaacagtaacaataacgcttccctccacgaggttaaggcaggcgcggtgaataaccaaagtagaccccagtcgcacagcagcggtgagttcagtttgctccatgatcatgaggcttggtcatcctccggatcttccccaattcagtacttgaagcggcagaccagatctagccccgtcctccagcataaaatctctgaaacactcgaatcccggcaccacaagataaaaaccgggagtccaggatccgaggtggtaacgctgcagcagttcctcgaggagtcaaataagttgacttctgtgcagataaaatcttcttcccaggaaaatctgctggatgaagtcatgaaaagcctctctgtgtccagcgatttcctcggtaaggacaagccggtttcttgcggcctggcacgctccgtgagtggcaaaacacctggagatttctacgatcggaggaccaccaaaccagagtttcttagacccgggcctagaaagaccgaggacacttattttatcagcagcgccggaaaacctacccccggaacacaggggaaaatcaagctagtgaaggaatccagccttagcaggcaaagcaaggactcgaacccttacgcgaccttgccacgcgccagcagtgtcattagcactgccgaggggactactcggcgaacatcaattcatgattttttgacaaaagatagccggttgcccatatcagttgactccccgccagccgctgcagattccaacactaccgctgccagcaatgtagacaaagtgcaagagagcaggaacagcaagagcagaagccgggagcaacagtcttcttag

SEQ ID NO: 183424 - DNA, 2667 bp, synthetic construct
  misc_feature 1..2667: note = Description of Artificial Sequence: Synthetic coding sequence
  source 1..2667: mol_type = other DNA
ctgctggagagcaagctggagagcaccctgaagaagagcctggagataaaggaggagaaaatcgccgccctggaagcccggctggaggagtcaacaaattacaaccagcaacttcgtcaggaactgaagacggtgaaaaaaaactacgaggccctcaagcagcggcaagacgaagaacgtatggtacaaagctctcctccaatctcaggggaggacaacaagtgggaaagggagtcgcaagagaccacccgagagctgctcaaagtgaaggaccgactcatcgaggtggaaaggaataacgctacactccaggcagagaagcaggccttgaagacacagctgaagcaattggaaactcagaacaacaacttgcaggcacaaattcttgcactgcagcgacagacagtatcactccaggaacagaataccaccctgcagacacagaatgcgaagctccaagtggaaaattctacgctaaattcgcagtctacttctctgatgaaccagaatgcccagctgttgattcagcagagctcgttggagaacgaaaacgagtccgttataaaggaaagggaagacttaaaatccttgtacgattcgctgattaaggaccatgagaagttagagctactacacgagagacaagcctccgaatacgagtctctgatttccaagcacgggaccctgaaatctgctcacaagaatctggaagttgaacatcgagacttagaagatcggtacaatcagctcctaaaacagaagggacaactcgaagatctggagaaaatgctgaaagtggagcaggaaaagatgttgctggagaataaaaatcatgagaccgttgccgccgaatataaaaagttgtgcggtgagaacgaccgtcttaatcatacgtacagccagttactgaaagaaactgaggtgctccagacagatcacaagaacctgaaatcattactcaataattccaaactcgagcagacccggctggaggccgaattctcaaagctaaaagaacaatatcagcagctggatatcaccagcacgaaactgaataaccagtgcgagctgctgtcccagttaaaaggaaaccttgaggaagagaaccggcacctgctggaccagattcagaccctcatgctgcagaatcggacacttctcgaacaaaatatggaatccaaggacctgttccatgtggaacagcgccaatatatcgataaactcaacgagctgcgcaggcagaaagagaagctggaagaaaaaatcatggaccaatataagttttacgacccttccccaccaaggaggcgcgggaattggattaccctgaagatgagaaagttgatcaagagcaagaaggacatcaatcgagagcgacaaaaatctttaaccctcactccaacgcgctccgactccagcgagggcttcctgcagttaccgcaccaggacagccaggattcctcctcagtggggagcaacagtctggaggatggtcagactctgggaacgaagaagagcagcaccatgaatgaccttgtgcaaagcatggtgctggccggccaatggacgggctctacagaaaacttagaggtacctgacgatatcagcacagggaaaaggcgaaaagaactgggggcaatggctttctccactaccgccatcaacttctcaacagtcaattcatctgccgggttccgaagtaagcaactggttaacaataaggataccactagcttcgaagatatatcccctcaaggcgtcagtgacgattcctccactggcagtcgcgttcatgcatcacgccctgccagtttggattcagggaggacaagtacaagcaatagtaataataacgcctctctgcacgaggtgaaagcaggcgctgtaaataaccaaagtcggccgcagtcacactcttccggtgaattctcattgcttcatgaccacgaagcatggtctagttctggctcatctccaatccaatatctaaagagacagacaagaagttccccggttctgcagcacaaaattagtgagacgctagaatcacgccaccataagattaaaaccggctctccaggtagtgaggtggtgacactgcagcagttcttagaggaatcaaacaaactcacatcagtgcagataaagtcttccagtcaggagaatctgctcgatgaggtcatgaagtcattgtctgtgtcctctgactttctgggaaaggataagccagtatcatgcggcctggcgcgctcggtcagtggcaagacccctggcgatttctacgatcgacggaccacaaaaccagaattcttaaggcctggccctagaaaaaccgaggacacatatttcatctccagcgccggtaaacctacccccggtacacaaggaaagatcaagcttgtcaaggaatcaagcctcagtcgccaatctaaggactcgaatccttatgcaaccttgcctagggcgtcatccgttatctcaactgctgaggggacgactaggcgcacatccatccacgattttttaacgaaagactcaaggctcccgatctcagttgatagcccacccgcagcggcagacagtaataccacggccgccagtaacgtagataaggtgcaggagagccggaactcaaagagcagaagcagagaacagcagtcctcttag

SEQ ID NO: 183425 - DNA, 5391 bp, synthetic construct
  misc_feature 1..5391: note = Description of Artificial Sequence: Synthetic coding sequence
  source 1..5391: mol_type = other DNA
atggagaacgagatcttcacccccctgctggagcagttcatgaccagtccgctagtcacctgggtcaagaccttcgggcccctagctgctggcaacggtaccaacctcgatgagtatgtggcccttgtagacggcgtattcttaaatcaggtcatgctgcagatcaacccgaagttggagtcccaacgcgtcaacaagaaggtcaacaatgatgctagtctaagaatgcacaaccttagcatcctcgtccgccaaataaagttctattaccaggagaccctgcagcagctcatcatgatgagcctgcctaacgtcctcataataggcaagaaccctttctctgaacagggcacagaagaggtgaagaagttgttattgcttttgctgggttgtgctgtacaatgtcaaaaaaaagaggaatttattgagcgcattcagggcttagatttcgacactaaagctgcggtcgccgcccacattcaggaggtaacgcacaaccaggagaatgtttttgatctgcagtggatggaggtgacagatatgagccaagaagacattgaacccctcctcaaaaacatggctctgcacctgaagcgcttgattgacgaacgcgatgaacatagcgaaaccattattgaactctccgaagaaagggatggacttcactttctgccccacgcctctagcagtgcacagagcccatgcggaagccccgggatgaaaagaacggaaagcagacagcacctgtccgttgagctggccgacgccaaggccaagattaggcgcctccgtcaggagttggaagagaaaacggagcagcttctggactgcaagcaggaactggagcaaatggaaatcgagctgaagagactacaacaagaaaatatgaatctcttgtctgacgccaggtcggcgagaatgtaccgcgacgagctggacgcactgagggagaaagctgtgcgggtcgataagctcgagtcggaggtgagtcgatataaggagcggctccacgacatcgagttttacaaggccagagtcgaagagctgaaagaggacaatcaagttcttctcgagactaagacaatgctcgaagaccagctggaggggacaagagccaggtccgacaaattacatgagcttgagaaagagaatctgcagctgaaggccaagttacacgatatggagatggaacgtgacatggaccgtaaaaaaatagaggaactcatggaggagaatatgacattggagatggcacaaaagcagagcatggacgaatctcttcacctgggttgggagctggagcagatatccaggacttcagaactgtcggaagctccacagaagtctctgggccacgaagtcaatgaactgaccagctcccgcctcctaaaactagaaatggagaatcagtccttgaccaagaccgtggaagagctcagaacaaccgttgactcagtagagggaaatgcttctaagatccttaaaatggagaaagaaaatcagcgactgagcaagaaggtggagatattggagaatgagatcgtgcaggagaaacagagtctccagaattgccagaatttgtcgaaagacctgatgaaagaaaaggctcaacttgaaaaaacaattgaaacccttcgagaaaactctgaacggcagattaagattctcgaacaggaaaacgagcacctgaaccaaaccgtgtcatctctgagacagcgctcccagatcagcgcagaagcacgcgtaaaagatattgagaaagaaaacaagatactgcatgaatcaattaaagagacttcttccaagcttagcaagatcgaatttgaaaaacgacagatcaaaaaagaattagagcactataaagaaaaaggtgaacgagccgaagaacttgagaacgagctgcatcacctagaaaaagaaaatgaactgctgcagaaaaagatcaccaatcttaagataacttgcgaaaagatcgaggcccttgagcaggaaaactccgagttggagcgggagaacagaaagctcaagaaaaccctcgattccttcaaaaacctcactttccagttggaatccttggagaaagaaaatagccaactggacgaggagaatctcgaactcagaaggaatgttgagtccctgaagtgtgccagcatgaagatggcccagcttcaactggaaaacaaggaactcgaatccgaaaaggagcagttaaaaaaaggtctcgagctcttgaaggcgtcctttaaaaaaactgagaggcttgaagtgtcataccagggacttgatatagaaaatcaaagactgcagaagacgctggaaaactccaataaaaaaattcagcagctggaaagcgagctacaggatctggagatggaaaaccagacacttcagaaaaatctcgaggaacttaaaatttcctctaaacgtttggaacagcttgagaaggagaacaaatctttggagcaggaaacgagccagctagagaaggataagaaacaattggagaaggaaaataaacgtttacgccagcaagcggaaatcaaagacactactctcgaggaaaacaatgtgaagattggcaatctggagaaagaaaacaagacattgtcaaaagaaatcggaatatacaaggagagttgcgtacggctgaaagagttggaaaaggaaaataaggagttagtgaagcgagcaacgatcgacattaaaaccctggtgactttaagggaggatctggtctccgagaagttgaagacccaacaaatgaacaatgacctcgagaagctcacacacgaactcgagaagatcgggcttaacaaggagagactcctccatgatgaacaatctacagatgataggtacaagctgctcgaaagcaaactcgagagtaccctgaaaaagagtttggagataaaggaggaaaagatcgctgccttggaagctaggctcgaagaatcgaccaactacaatcaacagctccgacaggagctcaaaacagtcaagaaaaactacgaagcgctgaaacagcgccaagacgaagaacgcatggtacaatcgagccctcctattagtggcgaagacaataagtgggagcgtgagagccaggaaactacgcgagaactcctgaaggtcaaggatcgcctgatcgaagtcgagaggaataacgctacgttgcaagccgagaaacaggctttgaagactcagcttaagcagcttgagacgcagaataacaacctgcaggctcagatcctcgctctgcagcggcagacagtatccttacaggaacagaacaccacattgcaaacccagaatgcaaagctgcaggtcgagaactccaccctgaacagtcagagcacatccctcatgaaccagaatgcacagctgttgattcaacaatcctcattagaaaacgagaatgagagcgtgatcaaagagagggaggaccttaaatcactgtacgacagccttattaaagatcatgagaagctggaactccttcacgaacggcaagcctcggagtatgagagtctgatttctaagcatggcacgcttaagagcgcccacaaaaatctggaggtcgagcacagagatctcgaagataggtataaccagcttctgaaacagaaggggcagttggaagacctggaaaagatgttgaaggtagagcaagaaaagatgctcctagagaacaagaatcatgagacggtcgccgccgagtacaagaagctgtgtggcgagaatgatagattaaatcatacatattcacaactgttaaaggagactgaagtgctgcagaccgatcacaagaatctgaaatctctgttgaacaatagcaaactggagcagacacgcctggaagcagagttttctaagctcaaagagcagtaccaacaactggacatcacgtctaccaaactcaataaccagtgcgagttgctgtcccagcttaagggaaacctggaggaagagaatcggcacctgcttgaccagatacagactctgatgctgcaaaataggaccctactggaacaaaacatggaatctaaagacctcttccacgtggagcaacggcaatatatcgacaaactgaacgaattacgaaggcagaaggagaaattggaagagaagatcatggatcaatataagttttacgatcctagccccccccggcggcgcggaaattggattactctgaaaatgagaaagctcattaaatcaaagaaggacataaacagggagcggcagaagtccctgactctgaccccaacaagaagcgactcaagcgaaggattcctccagttgccccaccaggattcccaggactcatccagtgtggggtctaattccctagaagatggccaaacactgggaacaaagaaaagttccatggttgctctgaaaaggctgccattcctgcggaaccgtccgaaagataaggataagatgaaggcatgttatcgccgcagcatgagcatgaatgatctcgtgcaatctatggtgctcgccggtcaatggaccggctctacagagaacttagaggtgcctgatgatatctccaccggtaaaaggagaaaagagctcggcgccatggctttttccacaaccgcgatcaacttttccactgtcaatagttcagcaggattccgatcaaaacagctcgttaataacaaagacactacttccttcgaggatatatccccacagggggtctcagatgacagctctactggcagtcgggttcatgcatcacgtcccgcttcgcttgattcaggccggacctctacatctaacagcaataacaatgcctctctgcacgaggtgaaggctggtgcagtcaacaaccagagccggccccagagccattctagtggcgaattctccctcctccacgatcacgaggcatggtcaagtagcggatctagcccgatccagtatctgaagaggcaaactcgatcgtcccccgtcctgcagcataagataagcgagacattggagagccggcatcataagatcaagactggcagtcctggtagcgaggtggtgacattgcagcagttcttagaagagagtaacaagctgacctccgtgcagattaagagcagtagtcaggagaatctccttgacgaagtcatgaagtccttgagcgtcagctctgactttctcgggaaagacaagccagtaagctgcgggttagcatctgtcatttctaccgctgaaggcacaaccaggcggacctcaatacatgacttcctcacaaaggactcacgcctgcctatcagtgtagacagtccccccgcagccgctgattcaaatacaaccgcagcctctaatgtggataaggtgcaggagtccaggaatagtaagagccggagccgtgagcagcaaagctcatag

SEQ ID NO: 183426 - DNA, 1119 bp, synthetic construct
  misc_feature 1..1119: note = Description of Artificial Sequence: Synthetic coding sequence
  source 1..1119: mol_type = other DNA
atggaccagtacaagttctacgaccccagccccccccggcggcggggaaactggatcacattgaagatgaggaagctcatcaagtcaaaaaaggacattaatagggagcggcaaaaaagccttactttaaccccgacacggtccgattcttctgaagggttcctccagctccctcatcaggattcccaggacagttcctctgtgggcagtaacagcctcgaggacgggcagacactcggcacgaagaagtcctcaaataccacctcatttgaggatatcagcccgcagggggtgagcgacgattcttccaccgggagtcgtgtgcatgctggcgccgtcaacaatcagagccgccctcagagtcactcttcgggcgagttttccctgctccacgaccacgaagcctggtcctcctctggcagttctccaatacagtacttaaagcgccagacccggtcgagcccagtgctccaacacaaaatttcggaaacgctcgagtcccgacatcacaaaattaagactgggtccccgggcagcgaggtcgtgactttgcaacagtttctcgaggagtccaataagctcacttccgtgcaaatcaagtcttcttctcaggagaacttacttgacgaggttatgaagtctctctctgtgagttccgatttcctcggaaaagataagccggtatcctgcgggcttgccagatcagtgagtggaaaaacacctggcgacttttacgatcgccgtacaaccaaacccgagtttttacgccctggcccgcgaaagacagaagacacatacttcatatcctctgccggtaagccaaccccagggacacagggcaagatcaagctggtgaaggaatcttccttgtcacggcaatccaaggatagtaacccctacgcaacactgccaagagcttctagtgtgatcagcaccgctgagggaacaacacgccgcacctcgatccatgacttccttactaaagattctagactcccgatcagtgtggacagcccgcccgccgcagcagattctaataccaccgccgcctccaatgtagacaaggtgcaggagagcaggaactccaaaagccggtcccgtgagcagcaatcatcctag

SEQ ID NO: 183427 - DNA, 5616 bp, synthetic construct
  misc_feature 1..5616: note = Description of Artificial Sequence: Synthetic coding sequence
  source 1..5616: mol_type = other DNA
atggagaacgagatcttcacccccctgctggagcagttcatgacctcccctctagtgacttgggttaagacgtttggaccactggctgccggaaatggcactaatctggacgagtatgttgcactggtggacggcgtttttcttaatcaggtgatgttgcaaatcaaccccaaacttgagagccagcgagttaataagaaggtcaacaatgacgcttccttgagaatgcataacctgtccatcctggttagacagatcaagttctactatcaagagaccttgcagcagctgattatgatgagcctgcccaatgtgctgatcatcgggaagaatccttttagcgagcagggcactgaagaggttaaaaagttgcttctgctcctcctgggctgtgccgttcagtgccagaaaaaagaagaattcatcgaacggatccagggattggatttcgacactaaagccgctgtggcagcacacattcaggaagtcacacacaaccaggagaatgtgtttgacctgcagtggatggaagttactgatatgtctcaggaagatattgaaccgctcctcaagaacatggccttgcacctgaaacggctaatagatgaacgggatgagcattccgagacaatcatcgagttgtccgaggaacgggacgggttacatttcctgccccacgcaagctccagcgctcagtcaccatgcggctcacccgggatgaagcgaacagagtctaggcagcacctttccgttgaactcgctgacgccaaggcaaagatcaggagactgcggcaagagttggaagaaaagacagagcagctgttagattgcaaacaggagttggaacagatggagatcgaattaaaaaggctccagcaagagaatatgaatctgctttccgatgcgaggtccgctaggatgtaccgggacgaactggatgccctgagggaaaaggcagtgagagtagacaaacttgaatccgaggttagcagatacaaagagcgcctgcacgatatcgaattttataaagctagagtcgaggaattgaaggaggataatcaggtgctgctcgagactaaaacgatgctggaggatcagctggagggtacccgtgctcgcagcgataagttgcacgaactggagaaagagaatctgcaattaaaagccaagctgcatgatatggagatggaacgagacatggatagaaagaagattgaagagctaatggaagaaaacatgacactggaaatggctcaaaaacagtctatggacgaaagcctacacttgggctgggagcttgaacagatctcgcgcacaagtgagctctcagaggcccctcagaaaagtcttggccacgaagttaacgaactgacttcttcaaggctgctgaaactggaaatggagaatcaaagcctcacaaaaacagtcgaggagctcagaaccaccgttgattccgttgaaggtaatgcttctaaaatactcaaaatggaaaaagaaaaccagaggctgtcaaagaaggtggagattctcgaaaatgagattgtacaggagaagcaatcactccagaactgccagaaccttagcaaggacctgatgaaagagaaggcgcagctcgagaaaaccatcgaaaccctccgcgaaaacagtgaacgtcagataaagatcttggagcaagaaaacgagcacctgaatcagactgtttcatccttgagacagaggtcacagatttccgcggaggctagggtgaaagatatcgaaaaagaaaataaaattctgcacgagtccattaaggagacttcatctaaactgtctaagatcgagttcgagaagagacagataaaaaaggagttagaacattataaggagaaaggcgagcgagctgaggaactagagaacgagctgcatcacctggaaaaagaaaacgagctgttacagaaaaaaataactaacctgaagatcacatgtgaaaagatagaggctctggagcaggagaactccgagctcgagagggaaaatcgtaagctcaagaaaactctggatagcttcaagaacctgacctttcagctggaaagtctcgagaaagagaacagtcagctggatgaagaaaatcttgagttgcggcgcaatgtcgaaagcctgaagtgcgccagcatgaagatggcccagctgcaactcgaaaacaaagagctagaatcggaaaaggaacagttaaagaagggtctggaactgctcaaggctagcttcaagaagacggaacggttggaggtgtcgtaccagggcttggacatcgaaaatcagaggctccagaagaccctagaaaatagcaataaaaaaattcagcaactggaatccgagctccaggacctggagatggaaaaccaaacccttcagaagaatctggaagaacttaagatcagctcgaagagactggaacagctggagaaggagaacaagagccttgagcaagagacttctcagctcgagaaagataagaagcagctggagaaagagaataagaggctgaggcagcaggcagaaattaaagatacaactctggaagagaataatgttaaaattggaaatcttgaaaaagaaaataaaaccctctctaaggagattggtatatacaaagagtcatgcgttcgactcaaagaactggagaaggagaataaggagctggtgaaaagagccactattgacatcaaaacgttggttacacttcgagaggatctggtgtccgaaaaacttaagacccagcagatgaacaatgatctcgagaagttaacacacgaacttgagaagataggcctaaataaagaacgcctcctgcacgacgaacagtcaaccgacgactccaggtataagttgctggaatcaaagttggaaagtaccctgaagaagtccttggaaattaaagaggagaaaatagcagccttggaggcccgcctcgaagaaagtaccaattacaaccagcagctgcgtcaagagctaaagactgtgaaaaagaactatgaagccttgaaacaaagacaagacgaggaacgaatggtccagtcctcgcctcctattagtggtgaggataataagtgggagcgggagtcacaagaaaccactagggagttacttaaagttaaggaccgcctgattgaagtggagaggaataacgctacactgcaggctgaaaaacaggcactcaaaacacagcttaaacagttggagacgcagaataacaatctacaggctcagatccttgcactccaacggcagacagtgtccttacaggagcagaataccacactgcagacccagaatgctaaactgcaggtggaaaacagcaccctgaactcccaaagcacctccctgatgaatcaaaatgcccagctgctgattcaacaatccagtcttgagaacgaaaacgagagtgtcataaaggagcgcgaggaccttaagtcactttatgattcattgatcaaggatcacgaaaaattggagctgctccacgaacgccaggcctctgagtatgaaagcctaataagcaagcacggcacacttaaatcggcccacaaaaatctggaggtagaacaccgggacctagaagatcggtataatcagctgttaaaacagaaagggcagctggaggaccttgaaaaaatgttaaaggtggaacaggaaaagatgctcttggaaaacaagaatcacgaaacggttgccgctgaatataagaagctctgcggtgagaacgacaggctcaaccacacctattctcagctgcttaaggagacggaggtactgcaaacggatcataagaaccttaaatccctgctgaataattccaagctggaacagacccggttagaggcggagtttagtaagctgaaggaacagtatcagcagttggatataacatcaactaagctgaataaccagtgtgaacttctatcccagcttaagggaaacctcgaagaagagaaccggcatttgcttgaccagattcagaccctgatgcttcagaatcggacactactagagcagaatatggagtcaaaagacttatttcatgtggaacagcgacaatacatagataaactgaacgaactgaggaggcagaaagaaaagttggaagagaaaatcatggaccaatacaaattctatgatcctagcccccccagaaggagaggtaactggataactctgaaaatgcgcaaactcattaagagcaagaaggatatcaatcgcgagcgacagaaatccctgacccttacacccactagatcagattcatctgaggggtttttacagctgccgcatcaagacagccaggactcatccagcgtgggatcaaattctcttgaagatggccagaccctgggaacaaagaaatcttccatggtggcactgaagagactgcccttcctgagaaatagaccaaaggacaaggataagatgaaggcctgctatagaagatctatgagtatgaacgacctcgtccaatccatggtgttagctggacagtggaccgggagtacggagaatctggaagtgccagacgatattagcactgggaaacgtcgcaaggagctgggcgcaatggccttttctaccacagcgatcaatttcagtacagtgaatagttccgcaggatttaggagtaagcagctcgtgaacaacaaagacactacttctttcgaggatatttccccccaaggggtgtctgacgacagcagcacgggatctagagtccacgcctctcggcccgctagtctcgatagtggtaggacatccacttctaattccaacaataatgcatccttgcacgaggtcaaagctggcgccgttaacaaccagagccgtccacagtcccactcatcgggagagttcagcctgttacacgatcacgaagcctggagttcatccggcagttccccgatacagtacctgaaaagacagaccaggagctcacctgtactgcagcataagatttccgagacgctggagtcccgccatcataagatcaaaacaggatcccctggcagcgaggtcgtaaccttgcagcagttcttggaggaaagcaacaagctgacctccgtgcagattaaatctagctcacaggaaaacctcctggacgaggttatgaaatcattgagcgtctcctctgacttccttggcaaagacaagcccgtatcttgtgggttggcgagaagtgtaagcgggaaaacccctggggatttctatgacaggagaaccactaagcccgaattcttgaggcccggccccagaaagacagaagacacctactttatcagcagcgcagggaaaccaactcctgggacccagggcaaaatcaaactggtaaaggagtcatctctgtcgcggcagtcgaaagacagcaatccgtacgccacactgccccgcgcctcgtctgtgatatccaccgccgagggaacaactaggcggacctctattcacgatttcctcaccaaagatagcagacttcctatttcagtcgattctcctcccgccgctgctgacagtaatacaaccgctgcttctaatgtagataaggtgcaagagtcacgcaattctaagtccaggtccagggaacaacagtcgagctag

SEQ ID NO: 183428 - DNA, 420 bp, synthetic construct
  misc_feature 1..420: note = Description of Artificial Sequence: Synthetic coding sequence
  source 1..420: mol_type = other DNA
atgccctgcgccgcccggagccggagcagctggcggcggagctggacaaatactgcatgttggtccctttgtccatgcccggggccacgttccccttcccctgccccaatgcggcgggctcaatcctcgctgtgcctgagggatgagaccttagccggagggcagagacgcaagctttctagtcgctttcccgtggggcgcagctccgaatccttctctccaggtgataccccccgccagcgtttccggcaacggcaccccggcccactgggtgctcctgtgtctcacagcaaaggccccggggtggggtgggaaaacagtgcggagacattacaggaacatgagacagatgccaatcgagagggccccgaggtgcaagaaccagaaaagagaccactcacaccatccctatcccagtag

SEQ ID NO: 183429 - DNA, 4431 bp, synthetic construct
  misc_feature 1..4431: note = Description of Artificial Sequence: Synthetic coding sequence
  source 1..4431: mol_type = other DNA
atggagggcggcaagggcccccggctgcgggacttcctgagcggctccctggctacctgggccttgggtcttgcgggcttagttggggaagcagaggattctgagggtgaggaagaagaagaggaagaagagccaccgctttggcttgagaagagatttctgagactctctgatggggcgctgctcctgcgggtattagggatcatcgctccatcaagccgtgggggccctagaatgctcagagggctagacggtcccgccgcatggcgggtatggaacctaaaccacctatggggacgactacgcgatttctatcaagaggaacttcaactgttgattttgtccccaccccctgatctgcagacgctaggtttcgaccctctatcagaagaagctgtggaacagctggagggagtgctccggctgttgttaggcgctagcgttcaatgcgaacatagagagttatttatccgacatatccaggggctgtctcttgaggtccagagtgaactggcagccgccatccaggaggttactcagccgggcgctggtgttgttctggccctgtccgggcccgatccgggcgagctggcacccgcggagctcgaaatgcttagccgcagcctaatgggcaccctctctaaactggcgcgagaaagggatctgggtgcccagcggcttgccgagctcttactggagcgggagcccctttgtctgaggcctgaagctcccagtcgagcccccgcagaggggccatcacatcacctggcacttcagcttgctaatgctaaggcgcaactccggagattaagacaagaacttgaggaaaaggccgaattgctgctggactcacaggcagaagttcagggcctggaggctgagatccggcgcttgcggcaggaggctcaggccctgagtggccaagctaagagagctgaactgtaccgagaagaagccgaagcactccgagaacgcgcgggtaggctgccacgtctccaggaagaactgcggagatgcagggagcgtctgcaggccgcagaagcctacaaatcacagctggaagaagaaagggtgttgagtggcgtgttagaagcctctaaggcactgttggaagaacagctcgaggccgcaagagaaaggtgcgcacgcctgcacgagacccaacgagagaacctcctgctccgcaccagactaggcgaagcacacgccgaattggacagtctgagacaccaggtagatcaactggccgaagagaatgtggagcttgaattagaactccagagatcactcgaacccccacccgggtcacccggcgaagcacccttagcaggggccgcaccctcactgcaggatgaagtgagagaagctgaggccggccgccttcggaccctagagagagagaaccgtgagcttcgcggactgttgcaggttctgcaaggccagccgggtggacagcaccccttgctagaagccccaagagaagatccagtcctgcctgtgctggaagaagcaccccaaacccctgtggctttcgaccattctccccagggtttggtgcagaaggctcgcgacggaggcccgcaagcattagacctggcgccgccggccctcgacagtgtcctggaggcaagtgccgagtgtccacaggcgcctgatagtgatccacaggaagccgagagtccactgcaggccgccgccatggacccccaggcaagcgactggtctccccaagagtcaggttcccctgttgagacccaagaatcacctgagaaagctggacgacgaagctctcttcagtcccccgcaagcgtggccccaccccaaggcccaggtactaagatccaggcgccacagctgctagggggcgagaccgaggggagggaggcacctcagggagaactggtgccagaagcatggggactgagacaggagggtccagagcacaaaccagggccttccgagccatcttccgtgcagctcgaagagcaggagggcccaaaccagggtcttgatttggcaaccggccaggccgaagcacgagaacacgatcagaggctggagggcactgtacgggacccagcttggcagaagccacagcagaagagcgaaggagccctggaggtacaagtttgggagggacccatacccggtgagagcctggcctcaggagtggcggagcaggaggcgttgagggaggaggtcgctcagctgagacgtaaggcggaggcactcggtgacgagctcgaggcccaggcaagaaaactagaagcccagaacacagaagcagcccggctgtcgaaggaattggcccaggctcggcgggccgaggcagaggcccaccgtgaagccgaggcccaggcttgggaacaagctcggttgagagaggccgttgaagccgctggccaggaattggaatccgccagccaggaaagagaggccctggtagaggctctcgctgctgcggggagggaaagacgacagtgggagcgagagggttccaggttacgagctcagtccgaggccgctgaagagaggatgcaagtcctggaatctgaaggaaggcagcatctggaggaagcagagcgcgaaagaagggagaaagaggccctacaagccgagctggaaaaggccgtggtgagggggaaggagctgggggataggctggagcacctgcagagagagctggaacaggctgccctggaaaggcaggaattcttgcgcgaaaaggagtcacagcatcagcgctatcagggactggagcaaagattagaagccgaactgcaagccgctgccacaagcaaggaagaggcgcttatggagctgaagacacgagctctccagctcgaggaagagctatttcaactccggcaggggcctgccgggctggggcccaagaaaagagctgagccccagttggtggagacacaaaacgtcagactgatcgaagtggagagaagtaatgccatgttggtggctgagaaagccgctttgcagggccagctgcagcatcttgaagggcaactaggttctctgcagggccgagcccaggagctgctgctgcaaagccagcgcgcccaagaacatagcagccgcctccaggcagaaaagagtgtgctggaaattcagggtcaggaactccaccggaagttagaggtgctggaggaggaagtccgcgccgccagacaaagtcaagaagagacaaggggccagcagcaggcactgctgcgggatcacaaggccctcgctcagcttcagcggcggcaggaggcggagcttgaaggattactagttcgtcaccgtgacctaaaggccaacatgcgagctctagagttagctcaccgagaactgcaaggaaggcacgagcagctgcaggctcagcgggcatctgttgaagcccaggaggtagcactcctggcggagagagaacgcctgatgcaggatggtcacagacaacggggcctcgaagaggagctccggcggttgcagagcgagcacgaccgggctcagatgctgcttgctgaactgtcccgagagcgcggtgaacttcagggtgagcggggagagctgaggggtcgcctggccaggctggagctggagcgtgcccagctggagatgcagagtcagcagttacgggagtccaaccagcagctcgatctgagcgcctgcaggttgactactcagtgtgagctgctgactcaactccgctccgcccaggaagaggaaaataggcagctcctggccgaagtccaagccctcagtcgagagaatagagagctgctagaaagatccctggagtctcgggaccatcttcaccgggagcagagggagtacctggaccagctgaatgccctgagacgggaaaaacagaaacttgtagaaaagattatggatcaatatcgggtcttggaacctgtccccctgccacgcaccaagaaaggatcttggttagccgataaggtgaagaggctgatgcgacccaggcgagaaggcggccctcctggaggcctgcgcctaggggccgacggagctggctccaccgagtcattgggcggaccccctgaaactgagttgccagaggggcgagaggctgacgggaccggaagcccttcccccgccccaatgcgcagggcccagagcagcttgtgtcttagggacgaaaccctggccggtggtcaaaggagaaagctgagctctcggttccctgtcggcagatcgtccgaaagctttagtcccggcgatacaccccgccagcgttttcgccagaggcatcccgggcctctgggagcacccgtttctcattccaagggacctggcgtgggttgggaaaatagcgcggagaccctgcaggagcacgaaaccgatgcaaatcgggagggccccgaagtacaggaaccagagaagagacctttaaccccaagcctgagccagtag

SEQ ID NO: 183430 - DNA, 2139 bp, synthetic construct
  misc_feature 1..2139: note = Description of Artificial Sequence: Synthetic coding sequence
  source 1..2139: mol_type = other DNA
atggccggcgtggccgcccaccgggcccacccccccttcaccgcccacatgaaaaaccgggggctgagggaggaactggaaaaagccgtggtgcgagggaaagagctgggcgatagactggagcatctgcagcgagagctggaacaagctgccctggaaagacaagagttcttgcgcgagaaggaatctcaacaccagcgttatcagggccttgagcagaggcttgaggctgagctccaagcggctgctaccagtaaagaggaggccttgatggagctgaaaacgcgagctctacagctcgaggaggaactcttccagcttcgccaggggccggccggactgggccctaagaaaagagctgaaccgcagctcgtggagacccaaaatgtacgcctcatcgaggtggagcgatccaacgctatgttggtggctgagaaggccgcactccaaggccagctgcagcatctggagggccaattgggctcattacaagggcgcgctcaagagctgctgctccagtctcagcgggctcaggaacacagcagcagactgcaggccgaaaaatcagtacttgagattcagggccaggagctgcaccgaaagctggaagttcttgaggaagaggtccgggcagccaggcaaagtcaggaagagacaagaggacagcagcaggccctgctgcgggatcataaagctctggctcagctgcagaggcggcaggaagcagagctcgaaggcttactggtgcgccaccgggatctaaaggctaatatgagagcccttgagctggcccacagggaattgcagggcagacacgaacagttacaagcccaaagagcatcagtggaggcgcaggaagtcgcccttctggcagagcgggagagactgatgcaagacggccacagacagcgagggctggaggaggagcttagacggctccagtccgagcatgatagggctcagatgctgctcgcagaactatcccgtgagcggggagagttgcagggggagcgaggcgaactgcgcgggaggctagcaaggcttgaactcgagcgcgctcaactcgaaatgcagtcccagcagctacgtgaatctaatcagcagttagatttaagcgcctgtcgcctcactactcagtgtgaacttctaacccagctcagaagcgcacaggaagaagagaatagacaactgcttgccgaagtccaggccctgtcacgggagaacagggagctactggagagatcactggaatcccgagaccacctgcaccgtgagcagcgtgagtaccttgaccagctcaatgccctgcggcgggagaagcagaagctagttgaaaagattatggatcaataccgcgtgttggaaccagtgcccttaccgcgtactaaaaagggcagctggctcgctgacaaggggcccttgccacgccacccatgtgccggccctcgggctccctctgcatgcggaatgcgcccatggcaggctgggtctggaggtaactccgcccaaggatcccgatggggagaagctctgtcacatagcgctctgggtaccccgttaggcaatgattcagattccgcgatccaggctccttgggggcgcccctctcctaccgccaaggatctggtgtgggatgggcggacaccactgcggccctgtcggaacacaaagcagatgccgacagaacgagccctgcgctatagaaatcgtcggaatgtcccctcgccgcatcccagtgcttccgataccgttgggacagccggactaggcgtccagccttcacgccactggtctgtctccggaggaccgcgtcagcctaagtccagtggcagccaggggccccagggcgagtccctcgacaaagaggcttgggctttgaggtcgtccactgtcagcgcaggtgctcgaaggtggtcgtgggatgaatgcgtcgaccgcggagacggatggccgcctcgcgccgcaccaggttggtcatccgggagcagccggtggctgccactacgtcagcgtagcctgggcgaccctcctgccgaggggggatggcaggaactggcccgagagccaccagccctctcacggtgggaagctgaatcacaatgctgggggaccgttgcctgggctgatctcgagccctag

SEQ ID NO: 183431 - DNA, 4077 bp, synthetic construct
  misc_feature 1..4077: note = Description of Artificial Sequence: Synthetic coding sequence
  source 1..4077: mol_type = other DNA
atggagggcggcaagggcccccggctgcgggacttcctgagcggcagcctggctacgtgggcccttggactcgctggcttggtgggcgaagcggaggatagtgagggagaggaagaggaagaggaagaagaacctcccctgtggctggagaaacgcttcctgaggcttagcgacggagcactactattgagggtgctcggaatcatcgcaccaagctctagaggtggtccccggatgctaaggggtctcgacggcccagctgcttggagggtatggaaccttaaccacctatggggccgcctgagagatttctatcaggaagaactgcaactcttaattttatcccctcccccggatctccagactctcggcttcgaccccctgagtgaggaagctgttgagcagctagaaggcgtgttgcgactcctgttgggggctagcgtgcagtgcgagcatcgagaactgtttattcgccatatacaagggctttctctggaagttcagagcgaactggccgctgccattcaggaagtaacgcagcccggtgccggcgttgtgttagcactcagcggccctgacccaggtgagctggccccagctgaactagaaatgctaagccgctcacttatggggactctttctaagctggcccgcgagcgagatttgggcgcgcagcgacttgccgagctgctactagagcgagaaccgctgtgtctcaggccagaggcgccaagccgggcccccgctgagggacctagtcatcacctggcccttcagcttgctaacgccaaggcgcagctcagacgccttagacaggagttggaagaaaaggcggagctgctgctggattcccaagccgaggttcaagggctggaagccgagataagacggttgcggcaagaagcacaggctttgtctgggcaagccaagcgggctgagctctatagagaggaagccgaagctcttagagagagagcagggcggctccctcggcttcaggaggaactcaggagatgtcgggaacggctccaagccgcagaggcctataagagccagttagaggaagagcgcgtcctgagcggcgtgctcgaagcgagcaaagcactgctagaggagcaacttgaggccgccagggaacgctgcgcgagactccacgaaactcaaagagagaacctgcttttacgtactaggctgggggaggcccatgctgagctggatagcctcagacatcaggtggaccagttggcagaggaaaacgttgagctggagttagagcttcagaggtcgctggaacccccaccgggctctcctggagaggcaccacttgccggagctgctccttctttgcaggacgaagtgagagaggccgaggcaggccgactgagaacactggagagggaaaatcgggagctgcgcgggctgctgcaggtgctgcagggccaacccggggggcagcacccgctgctcgaggccccccgtgaggatccagtcctgcctgttcttgaagaagcgccccaaactcctgtggcttttgatcattcaccccaggggttggtccaaaaagctagggacggcggtccacaagcactcgatttggcgccaccggccctggacagtgttcttgaagcatctgccgaatgccctcaggcccccgacagcgaccctcaggaggctgagtcccccctgcaggctgccgccatggacccacaggcctccgactggagccctcaggagtccggctctcctgtggagacccaagagagcccagagaaggctggacgccgctccagcctccagagccctgccagcgtggcccccccacagggacctggaacgaagattcaagctcctcagctgctcgggggtgagaccgagggcagagaggcaccccaaggcgaattggtgcccgaagcctgggggttacggcaagaggggccagagcacaagccagggccatccgaaccctccagcgtgcagctggaggaacaggaggggcccaaccaaggcctggacctggccacgggacaggcggaggctagggaacatgaccagcgccttgaggggaccgtgcgggaccctgcatggcagaaaccccagcagaaaagcgaaggagcactggaagttcaggtctgggaaggccccatacccggcgaaagtctggccagcggtgtagcagaacaagaagctttgagagaggaagtagcccagctgcggagaaaagcggaagccctgggcgacgaacttgaggcccaggcccgcaaactcgaggcgcagaatacggaggcagcccggcttagtaaggagctggcacaggcgcgtcgagcggaagcagaagcccatcgggaggccgaggcacaggcctgggagcaggctaggctgcgcgaggccgtggaggccgcaggacaagagctcgagtccgcctctcaggagcgcgaggccctcgtggaagccctggctgcggccggcagggagcgccgacagtgggagagagagggctccagactccgcgcgcagtccgaggctgcggaggaacgaatgcaggtgctcgagtccgagggtagacaacatttggaggaggcagaaagagagagaagagagaaggaggccctgcaggctgagctggagaaggcagtggtgagaggcaaagagctcggtgatcggctggaacaccttcagcgcgagctggagcaggccgcgttagagcgacaagagttcctgagagagaaagagagtcagcaccagaggtaccaaggactcgagcagcggctagaggccgagctgcaggctgcggctacctccaaggaggaggctctcatggagctgaagactcgagccttgcaactggaggaagagttgttccaactccggcagggccccgcaggtctcggaccgaaaaaaagggctgagccacaactcgtcgaaacgcagaacgtgcggctgattgaggtggaaaggtctaacgcgatgcttgttgctgagaaggcggccctgcaggggcagttgcaacacttggaaggtcaacttggcagcctccagggaagagcacaggaattgttgctcgccgaaagggagcgcctgatgcaggatggtcaccggcagagggggctcgaagaagagctgcgccggctgcaaagtgaacatgacagggcccagatgctgttggcggagctgtcacgtgaacgcggtgagttgcaaggcgagagaggcgagcttcgcggacggctcgcccggttggaattagaacgggcccaattagagatgcagtctcaacagctcagggaaagcaaccagcaactcgaccttagcgcttgccggctgaccactcaatgtgaacttttaacgcagctcagatcagctcaggaggaagagaataggcagctcttggcagaggtccaagcacttagtagagaaaacagggaacttcttgagagatcactggagtctcgggatcacctgcaccgtgaacaacgcgagtacctcgatcaactgaatgctctgagacgggagaagcagaagctcgtagagaaaattatggaccagtatcgggtgcttgagcctgtcccgttgcctcgtacaaaaaaaggctcatggctggccgacaaggtgaagcggcttatgagaccaaggcgggaaggcggaccccccggggggctgcggctgggggctgatggagctggctccactgaaagcttgggggggcctccggagacagagcttcctgagggtagggaggccgacggaaccgggtctccttcccctgccccaatgaggcgagcacagagcagtctgtgtctgcgggatgagactctggcgggcggacaacgtcggaagctgtccagtagattccctgttgggcgcagctctgaatctttcagtcctggcgatactcctaggcaacgatttcgccaaagacacccagggccgctgggtgcccccgtctcacactctaagggtcccggtgtgggctgggaaaactccgctgaaacccttcaggagcatgaaaccgacgccaaccgtgagggtcccgaggtccaggagcccgaaaagaggcctcttacaccctcacttagccagtag

SEQ ID NO: 183432 - DNA, 684 bp, synthetic construct
  misc_feature 1..684: note = Description of Artificial Sequence: Synthetic coding sequence
  source 1..684: mol_type = other DNA
atgggcggcaccaccagcacccggcgggtgaccttcgaggccgacgagaacgagaacattacggtggtcaagggaatccgcctctctgaaaacgtgattgacagaatgaaagagagtagcccttcaggcagcaagagccagcgatacagcggggcatacggggcatcagtgagcgacgaagagcttaagcgtcgggtggctgaggaactggctttagaacaggctaaaaaagaatctgaagaccagaagcgcctcaagcaggctaaagagctcgacagagagagagctgctgccaacgagcaactgacgcgggctatccttagggagcgcatttgttcggaagaggaacgagccaaggcaaagcacctcgctcgtcagttagaggaaaaggatagagtgctgaaaaagcaggacgcattttacaaagagcagctcgcccgcttagaagaacgcagttctgaattttatagggtcaccaccgagcagtatcagaaggcggctgaggaagtggaagccaaatttaaacgttatgagtcacatccagtctgcgccgatctgcaggctaagatcctgcagtgttatcgcgagaatactcatcagactctgaagtgttcggcactggccacccagtacatgcactgcgtgaaccatgccaagcaatccatgcttgagaagggcggttag

SEQ ID NO: 183433 - DNA, 417 bp, synthetic construct
  misc_feature 1..417: note = Description of Artificial Sequence: Synthetic coding sequence
  source 1..417: mol_type = other DNA
atgggcggcaccaccagcacccggcgggtgaccttcgaggccgacgaaaatgaaaacatcactgtcgttaaaggcattaggttgagcgagaatgtgatagatcgcatgaaggagagcagtccaagtggatctaagtctcagcgatacagcggcgcatacggggccagcgtgtccgatgaagaactcaaacgcagggtcgctgaggagctagccctggaacaggctaaaaaagaaagtgaggatcagaaaaggctgaagcaggctaaggagctcgacagggaacgtgcagccgcaaatgagcagctgacccgcgccatcctgagggagcggatctgcagcgaggaggagagggccaaagctaagcacctgatcaaggtcgagctgctttgggtcaaacccggcgtgctcactgcatag

SEQ ID NO: 183434 - DNA, 333 bp, synthetic construct
  misc_feature 1..333: note = Description of Artificial Sequence: Synthetic coding sequence
  source 1..333: mol_type = other DNA
atgaagtgcgaggagacccacgcccccaacagcaactgggtgtacgtgatgctcccatccaagaaaacagtgcgaatgccgagtgtgactcagcggctgcgggatcctgacattaacccttgcttgagtgagtctgatgcctctactaggtgccttgatgaaaacaactatgacagggagaggtgctctacttactttctgaggtacaagaattgcagacggttttggaattccatcgtgatgcagaggaggaaaaacggcgtgaagccattcatgccgacagccgccgagcgagatgagatcctcagggcagtcgggaatatgccctattag

SEQ ID NO: 183435 - DNA, 258 bp, synthetic construct
  misc_feature 1..258: note = Description of Artificial Sequence: Synthetic coding sequence
  source 1..258: mol_type = other DNA
atgcccagcgtgacccagcggctgcgggaccccgacatcaacccctgcctgagtgaatctgatgctagcactaggtgcctggatgagaataactacgaccgtgagcgatgcagtacatatttcctccgttacaaaaattgccgacggttctggaatagtatcgtaatgcaaaggaggaagaacggagtcaaaccgttcatgcccacagcagcagaaagagacgagattttacgcgcagtcggtaacatgccctattag

SEQ ID NO: 183436 - DNA, 285 bp, synthetic construct
  misc_feature 1..285: note = Description of Artificial Sequence: Synthetic coding sequence
  source 1..285: mol_type = other DNA
atgctgcccagcaagaagaccgtgcggatgcccagcgtgacccagaggctgagggaccctgatattaatccttgtctatcagaatccgacgcttctaccagatgtctggatgagaataattacgaccgggagagatgtagtacgtattttcttaggtacaagaattgccgcaggttttggaatagtatagtgatgcagcgcagaaaaaatggagttaagccatttatgccaaccgctgctgagcgggatgaaatcctgagggctgtaggcaatatgccttactag

SEQ ID NO: 183437 - DNA, 135 bp, synthetic construct
  misc_feature 1..135: note = Description of Artificial Sequence: Synthetic coding sequence
  source 1..135: mol_type = other DNA
atgcccagcgtgacccagcggctgcgggaccccgacatcaacccctgtctgtccgaatcagatgcgagcaccagatgtctcgatgagaacaattacgatcgcgagagatgctcgacatattttctgcgatattag

SEQ ID NO: 183438 - DNA, 294 bp, synthetic construct
  misc_feature 1..294: note = Description of Artificial Sequence: Synthetic coding sequence
  source 1..294: mol_type = other DNA
atgcaccagacccggaccggcaagaagaccgtgcggatgcccagcgtcacacagaggttgcgcgaccctgatattaatccatgtctctctgagagcgatgcgagcactagatgtcttgacgagaacaactacgatcgtgaacgatgtagtacttattttctgcggtataaaaactgcagacgtttctggaattcaattgtcatgcagcgaagaaaaaacggcgtgaagcctttcatgccaacagcagcagagcgcgatgagatcttgagagccgtcggtaatatgccctattag

SEQ ID NO: 183439 - DNA, 207 bp, synthetic construct
  misc_feature 1..207: note = Description of Artificial Sequence: Synthetic coding sequence
  source 1..207: mol_type = other DNA
atgcaccagacccggaccggcaagaagaccgtgcggatgcccagcgttactcagaggctgcgggatccagatatcaatccatgcctctcaatcctgttctacctgctgaacgacgcgagccttatcagcgttcggaatctcatgctgcccccagacgtttggatgaagatcaccatgaccgggaaaggcgtccctttaacttcttag

SEQ ID NO: 183440 - DNA, 264 bp, synthetic construct
  misc_feature 1..264: note = Description of Artificial Sequence: Synthetic coding sequence
  source 1..264: mol_type = other DNA
atgagcaccagcgtgccccagggccacacctggacccagcgggtgaagaaagatgacgaagaggaggatcccctcgaccagctcatctcccggagcggctgtgcagcatcacacttcgccgtccaggaatgcatggcgcagcaccaagactggaggcagtgccagccccaagtgcaggcttttaaggactgtatgtctgaacagcaggctaggaggcaggaggagctacaacgccgccaggagcaggcaggtgcgcaccattag

SEQ ID NO: 183441 - DNA, 264 bp, synthetic construct
  misc_feature 1..264: note = Description of Artificial Sequence: Synthetic coding sequence
  source 1..264: mol_type = other DNA
atgagcaccagcgtgccccagggccacacctggacccagcgggtgaaaaaggacgatgaggaagaggatccattggaccagctaatcagcagatcaggctgcgctgcctctcactttgcggtgcaggagtgtatggctcaacaccaggactggaggcagtgtcagccacaggtgcaggcatttaaggactgtatgtctgagcagcaggcaaggaggcaggaggaactgcaacggcggcaagagcaagccggtgcccaccactag

SEQ ID NO: 183442 - DNA, 291 bp, synthetic construct
  misc_feature 1..291: note = Description of Artificial Sequence: Synthetic coding sequence
  source 1..291: mol_type = other DNA
atgttctaccggctgcccatcccccggatgagcaccagcgtgccccagggacacacttggacccaacgggtaaagaaggatgatgaagaagaggaccccctggaccagctgataagtagaagcggctgcgccgcatcacattttgcggttcaagaatgtatggcacagcaccaagattggcgccaatgtcagccccaggtgcaagccttcaaggactgcatgagcgagcagcaagctaggaggcaggaagagttgcagcgacgacaagagcaggccggggctcaccattag

SEQ ID NO: 183443 - DNA, 264 bp, synthetic construct
  misc_feature 1..264: note = Description of Artificial Sequence: Synthetic coding sequence
  source 1..264: mol_type = other DNA
atgagcaccagcgtgccccagggccacacctggacccagcgggtgaagaaagacgatgaggaagaggatcctctggatcagctgatttcgcgctcggggtgcgcagcttctcatttcgcagtacaggagtgtatggctcagcatcaagactggcgacagtgtcagcctcaggttcaagccttcaaggattgtatgtctgagcagcaggcacgacggcaggaagagcttcaacggagacaggagcaagcgggggcccaccactag

SEQ ID NO: 183444 - DNA, 1731 bp, synthetic construct
  misc_feature 1..1731: note = Description of Artificial Sequence: Synthetic coding sequence
  source 1..1731: mol_type = other DNA
atggccgccagcgagaccgtgcggctgcggctgcagttcgactacccacccccagcaacaccccactgcactgcgttttggctgctggtagatctgaaccggtgtagagtagtgactgatctgatcagtttgattcgccagcgtttcggattttccagtggcgccttcttgggactgtacctggagggaggcctgctgccgcccgcagaaagcgcaaggctggtaagagacaatgactgcctacgggtgaagctcgaggagagaggcgttgctgagaacagcgtggtgatcagtaatggcgatattaacctatctctgcggaaagctaaaaaaagggcctttcagctagaggagggagaagagaccgagcctgattgcaaatactctaaaaagcactggaaatcaagagagaataataataacaacgagaaggtgctggatctggaacctaaggcggttacggatcagactgtctccaaaaagaataaacgaaagaataaagctacttgcggtaccgtgggtgacgacaatgaggaggccaagaggaagagcccgaaaaagaaggagaaatgtgaatacaaaaagaaggccaagaaccctaaatccccgaaggtgcaggcagttaaagattgggccaatcaacgctgttcttctccaaaagggtccgcccgcaactccctcgtaaaggcgaagcgaaaagggagcgtgtctgtgtgtagcaaggagtctccgtctagctcttctgagtctgagtcttgcgatgagtctataagtgacgggccctcgaaggttacattggaagcgagaaattcgagcgaaaagctgcccaccgagctctctaaagaagagcccagcacaaagaataccaccgctgacaagctggcaattaaattgggatttagcctgacaccaagcaaaggtaaaaccagcggcactacctcttctagtagcgactccagtgctgaatcagacgatcagtgtcttatgtcatcctcgacacccgaatgcgcagcgggattcctgaagaccgtggggttgttcgctggccgcggccgtcccgggccaggcttgagctcccaaaccgccggtgccgcaggctggcgcagatctggttccaatggcggtggacaagcccccggagcttccccttctgtcagcctgcccgcctctctcggccggggctgggggcgcgaagaaaacctcttctcctggaagggggcaaaagggcggggaatgcgcgggcggggacggggaaggggtcaccctgtatcttgtgtggtgaaccggtctaccgataatcagagacaacaacagttgaacgacgtggtcaaaaactcctccaccattatccaaaacccagtggagacccccaagaaagattactccctcctgcccttgctcgcagccgcccctcaggtgggagagaagatcgccttcaaactcctcgaacttacttccagctatagccccgacgtcagcgattacaaggagggacggatcctttcccataaccccgagacccaacaggtggatattgagattctctctagtttgccggcccttagagagccaggcaagtttgatctcgtttatcacaatgagaacggagccgaggtggtggagtacgcagtgactcaagaaagcaaaattacggtgttttggaaggagcttattgaccctagactgattatcgagtctccatccaacacatccagcacagagccagcctag

SEQ ID NO: 183445 - DNA, 519 bp, synthetic construct
  misc_feature 1..519: note = Description of Artificial Sequence: Synthetic coding sequence
  source 1..519: mol_type = other DNA
atggccagcgacgagggcaagctgttcgtgggcggcctgagcttcgacacgaacgagcagagtctcgagcaggtctttagcaagtacggccagattagcgaggtcgtagtggtgaaagaccgggaaacgcaaaggagtcgggggttcgggtttgtgaccttcgaaaacattgatgacgccaaagatgctatgatggccatgaacgggaaaagtgtggacgggagacaaattcgcgtggaccaagctggaaaaagttcagacaaccggagtcgaggctaccgcggaggaagcgctgggggtcgaggcttttttagaggagggcgaggccgcggccgcggcttcagccgcggggggggcgaccgaggttatggagggaaccggtttgagtctcgctctggtggatacggcggatccagggattattattcctctagatcgcagagcggaggctacagcgaccggtcatcaggcggatcgtatagggattcatacgatagttacgctacacacaatgagtag

SEQ ID NO: 183446 - DNA, 792 bp, synthetic construct
  misc_feature 1..792: note = Description of Artificial Sequence: Synthetic coding sequence
  source 1..792: mol_type = other DNA
atggccagcgacgagggcaagctgttcgtgggcggcctgagcttcgacactaatgaacagtctttggagcaggtgttttctaaatacggtcagatctctgaggtggtagtggtgaaggaccgtgagactcagcgatccagaggtttcgggtttgtgacatttgagaatatcgacgacgctaaagacgccatgatggccatgaacggcaaatccgtggacggccggcagatacgtgtggaccaggccggaggtggcgatcgaggctacgggggaaataggttcgagagcagatcaggcgggtacggcgggtctcgagactattattcttcccgttcccagagtggcggctacagtgacagatcgtcaggcggatcatacagagatagctacgacagttacggcaagtctcactcagaaggcgccaccctactgtggccggccgtcggggccagattcaccctcgttccctctccatcaacactgggctggaccctccgtccttgtcactgtgcatgtccagaggaagcccatctatcttcgcagagccatttttatagacgaacgcaaaaacctaatgagacagaccagaagggcaagggcgagcgagggccggctggtcaaagcgcgagatgcatgtgcgggcggcggccggcatctctgggttgcggaggctggctgcttcccggacgacgccctcgtccggggctcgcatctggtgtaaagctgcccctggtggcttctgtacctttgcattgcgcgtgttttctgagcagcgcaactcataacgagtag

SEQ ID NO: 183447 - DNA, 735 bp, synthetic construct
  misc_feature 1..735: note = Description of Artificial Sequence: Synthetic coding sequence
  source 1..735: mol_type = other DNA
atgagcagccggtggagccggagcagccagagcaccgaccggagcctgaagtctgtcgatggacgacagatccgagtggaccaagccggcaaatcatctgataatcgaagtcgtggataccgaggaggatcagctggcggaaggggcttcttcagagggggtcgcggaagggggcgtgggtttagccgcgggggtggcgaccggggctacggaggcaacaggttcgagtcacggtctggcggatatggtggaagcagggactattatagctctcgctcccaatccggtggctactccgatcgctctagcgggggatcttatcgagattcttacgatagctatggcaagtctcattctgaaggcgccacactgttgtggccagctgtaggtgctcgctttacactcgtcccgagccccagcacactggggtggacccttagaccatgtcactgtgcttgccctgaggaagcgcatctatcctcacagtcacacttctatcggcgcactcagaagcctaacgagactgaccagaagggcaagggagagcgtggccccgcagggcagtctgctcgctgtatgtgcggacgtagaccagcgagtctgggctgtgggggatggttattgcccgggcgtcgcccacggcccggcctggcctcaggggtcaaactccccctggtcgcatccgttcccctgcactgtgcctgctttctttccagcgctactcacaatgaatag

SEQ ID NO: 183448 - DNA, 519 bp, synthetic construct
  misc_feature 1..519: note = Description of Artificial Sequence: Synthetic coding sequence
  source 1..519: mol_type = other DNA
atggccagcgacgagggcaagctgttcgtgggcggcctgagcttcgacacaaacgagcagtctttggagcaggttttctcaaaatatggccaaatttccgaagttgttgtggtgaaggacagagagacacagcgctctcggggttttgggttcgtaacttttgaaaatatcgatgacgcaaaagacgcaatgatggcgatgaatggaaaatccgtcgatggtcgtcaaatacgtgttgatcaggcagggaaaagcagtgacaaccgcagcaggggctaccgggggggaagcgcaggcgggcggggttttttccgaggagggaggggtcggggtcggggattctcacgggggggcggggatcgcgggtatgggggcaatcgtttcgaatctcggtctggagggtacggcgggtccagagattattatagtagccgctcccagagcggaggctattcggacaggagcagcggagggagctaccgcgacagctatgatagctacgcaacacacaatgagtag

SEQ ID NO: 183449 - DNA, 2304 bp, synthetic construct
  misc_feature 1..2304: note = Description of Artificial Sequence: Synthetic coding sequence
  source 1..2304: mol_type = other DNA
atgagcttcgaccccaacctgctgcacaacaacggccacaacggctaccctaatggcacgagtgctgctttgagggagacaggtgtgatagagaaacttttgacctcttatggctttattcagtgttcagagcggcaggcgaggctattttttcattgctcgcagtataatggaaacttgcaggatctaaaggttggtgatgacgtggaatttgaggtgtcatcggataggagaacaggcaaaccaattgcggtgaagcttgtaaagattaagcaggaaattctgccggaggaacggatgaacggacaagaagttttttacctgacttatacgcctgaggacgtagaaggcaatgtccagctcgaaaccggagacaagattaatttcgtcattgataacaacaaacacaccggggcagtgagcgctcgaaatattatgctcctcaagaagaagcaagctcgctgccaaggtgtggtgtgcgcaatgaaagaggccttcggctttatagagcgcggggacgtggtcaaagagatattctttcactactcggaattcaagggggatttggagactctgcagccaggagacgacgtggaattcaccattaaagaccgcaacggaaaagaggtggctacagacgtgcgcctgctgcctcagggaacggtgatcttcgaagacatttcaatagaacactttgaggggaccgtaaccaaggtgattccaaaagtgccctctaaaaaccagaacgaccccttgccaggaaggatcaaggtggattttgtgattccgaaggagcttccatttggtgacaaagatacaaaaagcaaagtgacactattagaaggcgaccatgtgaggttcaacatttccactgataggcgagataagctggagcgggcaaccaatatcgaagtcctgagtaacactttccagttcacaaatgaagccagagagatgggagttatcgccgcaatgcgggatggattcggatttattaagtgcgttgacagggacgtgcggatgttctttcacttttctgagattctggacggcaaccagcttcacatcgccgacgaggtcgagttcaccgtagtccctgatatgctaagcgcccagcggaaccacgctattaggatcaaaaaactcccaaagggcaccgtttcctttcactcacatagtgaccatagatttctcggaaccgtggaaaaagaagcgactttctccaatcccaagacgaccagccccaataaaggtaaggagaaggaggccgaagacgggataattgcctatgatgactgtggggtgaagctgaccatcgccttccaagccaaggacgtcgaaggttccacatccccccagatcggcgacaaagttgagttttccatctccgacaaacagagacccgggcagcaggtggctacctgtgtccgcctgctgggcaggaatagcaacagcaagcgcctcctggggtacgtggcgactctgaaagacaactttgggttcatagagaccgctaatcatgacaaggagatctttttccattactctgagttctcgggggacgtggacagcctcgagttgggggatatggtggaatacagcttgtctaaaggtaagggcaataaggtttccgccgagaaagtgaacaagacacactcagtgaatgggatcactgaggaagcagacccaacaatctattccggcaaggtgatccgcccgctgagaagcgtggaccccactcaaacagaataccagggcatgattgaaatagtggaggagggtgacatgaaaggcgaggtgtacccatttggaattgtggggatggctaacaagggtgattgcctccaaaaaggtgaatccgtgaagttccaattatgcgtcttggggcagaatgcacaaacgatggcctacaatattaccccacttcggcgggcgaccgttgagtgcgtcaaagaccaattcggcttcattaactacgaggtcggtgatagcaagaagctgttcttccacgtaaaggaagtgcaagacggcatcgagcttcaagctggcgacgaagtagagtttagcgtgattttgaaccagcggacagggaagtgctccgcttgcaatgtgtggcgggtgtgtgagggcccgaaggcagtcgccgcacctcggcccgacagactggtcaacagactaaaaaacattacactcgatgacgctagcgccccccggctcatggtcctgagacagccacgcggtccagataatagcatgggctttggtgctgagaggaaaatcaggcaggctggagtcattgactag

SEQ ID NO: 183450 - DNA, 2304 bp, synthetic construct
  misc_feature 1..2304: note = Description of Artificial Sequence: Synthetic coding sequence
  source 1..2304: mol_type = other DNA
atgagcttcgaccccaacctgctgcacaacaacggccacaacggctacccaaatggcacgtccgccgctcttagggaaaccggagtgatcgaaaaactgctgacttcctacgggtttatacaatgttccgagcggcaggctcgcctgttttttcactgctcacaatacaatggtaacctgcaagatctcaaggtgggggatgatgttgaatttgaagtgtcatccgatcgaaggactgggaagcccattgcagtcaagctagttaagattaagcaggagatacttccagaagaacgcatgaacgggcaggaggtgttctacctgacatatacacctgaagacgttgagggaaatgtgcagttagagactggagataaaattaacttcgtgattgataacaacaaacataccggcgcggttagcgcccgaaatatcatgctccttaaaaagaaacaggccagatgccaaggcgtggtctgcgcaatgaaggaggcatttgggtttattgagcgtggcgacgtggttaaggagatctttttccattattctgaattcaagggggatcttgagactctgcagcctggcgacgacgttgagtttacaattaaagacaggaacggtaaagaagtggcgacagatgtccggctgttacctcagggtaccgtcatcttcgaggacatttccattgagcattttgagggaacagtcaccaaagttattcctaaagtaccctcaaagaaccagaacgatccgctcccaggaagaatcaaggttgacttcgtgattccaaaggagctgccattcggagataaggacacaaaaagcaaggtcacccttctcgagggagatcacgtgcgcttcaacatcagcaccgaccgtcgcgataaactggagcgtgccacaaacatcgaggttttaagcaacacgttccagtttaccaatgaagctcgggagatgggagtcatagcagccatgcgcgacggattcggtttcatcaagtgcgtcgatcgggacgtacgaatgttctttcatttcagcgagatccttgatggcaatcagctgcatatagcagacgaagttgaattcacagtggtccccgatatgcttagcgcccagcggaaccacgcaatcaggatcaagaaactgccaaaaggcaccgtgagtttccactcccacagcgaccaccgatttctaggcactgttgagaaggaggcaaccttttctaaccccaagaccacctcacctaacaagggaaaagaaaaagaggctgaagatgggattatcgcttacgatgattgtggagtcaagctcacgatagcttttcaggcaaaggatgtggaagggagcacctccccacagataggggataaagtcgagtttagcatttccgataagcagcggcccggacagcaagtggctacttgtgtcaggctactgggtcgaaacagcaattccaagcgccttttaggctacgttgccacgctgaaggataacttcggattcatcgagaccgccaaccatgacaaggagatttttttccactattctgaattcagtggcgacgtggatagcctcgagcttggggatatggtggaatatagcctttcaaagggcaaaggaaacaaagtctccgccgagaaagtgaacaaaacccattctgtcaacgggattaccgaagaggcggatccaaccatatactccggtaaggttatcagacctctgcggtccgtcgatccgacacagacagagtatcagggtatgatcgaaattgtcgaggagggagatatgaaaggcgaagtctacccgttcggcatcgttggtatggcaaacaaaggagattgcctccagaaaggtgaatccgtcaagttccagctctgcgtcttagggcagaacgcgcagactatggcttacaatataactccacttcgccgggctacagtcgagtgcgttaaagatcagtttggctttattaattatgaggtgggagactccaagaagctgttcttccacgtgaaagaggtgcaggatgggatcgagcttcaagctggcgacgaggttgagttttccgttatactgaatcaacggacaggaaagtgctcggcttgcaatgtttggagagtgtgcgagggccctaaagccgtggccgctcccaggcccgatcggctagtcaataggttaaaaaacattactctggatgatgcatcagcacctcgcctgatggtgctgcggcaaccacgcggccccgataactctatggggtttggagcagagaggaaaattagacaggcaggggtaattgactag

SEQ ID NO: 183451 - DNA, 2397 bp, synthetic construct
  misc_feature 1..2397: note = Description of Artificial Sequence: Synthetic coding sequence
  source 1..2397: mol_type = other DNA
atgagcttcgaccccaacctgctgcacaacaacggccacaacggctaccccaatggaacaagtgctgccctccgggagacaggtgtgattgagaagctgctgacatcctacgggttcatacaatgtagcgagcgacaggcccggctattcttccattgctcacagtataacgggaatctccaggacctcaaggtgggcgatgatgtagagtttgaggtgtcttccgaccgtaggacagggaagcctatcgccgttaagctggtaaagataaagcaggaaattctgccagaggagcgaatgaatggccaggtggtctgtgcagtgccccacaacctggaatctaagtcccccgcagcacctgggcagtctcctacgggaagcgtgtgctatgaaaggaacggagaggtcttctacctgacctatactcccgaggatgtggaagggaatgttcagctcgaaaccggagacaagatcaattttgtgattgacaacaacaaacacaccggtgctgtttcggctcgcaacatcatgctgctgaaaaagaagcaggcccgctgtcagggcgtagtttgcgcaatgaaggaagctttcggatttattgagcgcggcgacgtcgttaaagaaattttcttccactatagcgagtttaagggagatcttgagacactccagccaggcgacgatgtggaattcaccataaaagacagaaacggaaaagaggtggccaccgacgtacgtttgctgccccaaggcacagtgatcttcgaggacatctcgattgagcacttcgaaggtaccgtgactaaagtgatccctaaggttccctccaaaaatcagaacgaccccctacctggtaggattaaggttgatttcgtcatccccaaggagctacctttcggggacaaagacacaaaatccaaggtgacactgctcgaaggggaccacgtgcgctttaatatctctactgatcggcgggacaaattggaaagagccacgaacattgaagtgttaagtaacacttttcaatttaccaatgaagccagggaaatgggagtgattgcagcaatgcgagacggctttggcttcataaaatgcgtggaccgagacgtgcgcatgttctttcacttcagcgaaatactcgatggcaaccaactccacatcgcagacgaggttgagttcaccgtggtgcccgacatgctgtctgcccagaggaaccacgctattcgaatcaagaaactgcccaaaggaactgtgtcttttcacagtcatagcgaccaccggtttctggggactgtcgagaaagaagcgaccttcagcaaccccaagactacatcccccaataagggcaaggagaaggaagcagaagatggcatcatcgcctatgatgactgcggcgtgaaactcacaatcgcatttcaggcgaaggacgtggaaggatctacttcgccacaaataggggataaagtggagtttagtatttccgataagcagcggccaggccagcaagttgccacttgtgttcggctcctgggccgcaactcaaattcaaagcgactgctgggctatgtcgccacactgaaagataatttcggttttattgagactgccaatcacgataaggagatcttcttccactactccgaattcagcggcgacgtggattcacttgaactgggagacatggttgaatactccctgtcaaagggaaaaggcaacaaggtttccgccgaaaaggttaataaaacgcactctgttaacggtatcaccgaagaagcagatcccactatctacagcgggaaggttatcaggcccctgagaagtgtagatcctactcagactgaataccaggggatgatcgagattgttgaagagggcgatatgaaaggagaggtttacccctttggaattgtcggcatggccaacaagggcgactgtcttcaaaaaggcgaatcagtgaaattccagctctgtgttcttgggcagaacgcgcagactatggcctacaacataacaccgctgagaagggccactgtggaatgcgtgaaggatcagttcgggtttatcaattatgaggtcggcgacagtaagaagctcttttttcatgtgaaggaagtacaggatgggatcgagctccaggcgggagacgaggtggaatttagcgtgatcctgaatcagcgtaccggcaagtgcagcgcgtgcaatgtgtggcgcgtttgtgaaggacctaaagcagtggccgcacctaggccagatagactggtgaacaggcttaaaaacatcactctcgatgacgcttctgcgcctcgcctcatggtgctccgccagcctcgtggaccagataattcaatgggcttcggagccgagcgaaagatacggcaggctggtgttatagattag

SEQ ID NO: 183452 - DNA, 2442 bp, synthetic construct
  misc_feature 1..2442: note = Description of Artificial Sequence: Synthetic coding sequence
  source 1..2442: mol_type = other DNA
atggagaacgtgttcaccgtgagcagcgacccccaccccagccccgccgctccaccttccctgagtctgcccctctcatccagttccacttcgtctggaaccaagaaacagaaaagaacgcctacataccaaagatctatgtcttttgatcccaacttgctgcacaacaacggacacaacggctacccgaacggtacgtccgcagcgttgcgggagactggagtcattgaaaagttgctgacaagctatggctttatccagtgcagcgagagacaagcccggctcttctttcactgcagccagtataacgggaacttgcaggacctcaaggttggcgacgacgtggaatttgaggtcagctcggaccggcgcaccggcaaacctatcgctgtcaaactcgtcaagattaagcaggagatcctccctgaagagcgaatgaatgggcaggaggtcttctatttgacctacaccccagaggatgttgaaggaaacgtgcagttagaaaccggtgacaagattaactttgttatcgacaacaataaacatacgggcgccgtgagtgcaagaaatatcatgcttctgaagaaaaaacaggcccgatgtcagggcgtcgtatgcgcaatgaaagaggctttcggtttcattgaacgaggtgatgtcgtaaaggaaatttttttccactactctgagttcaagggagacctagagaccctccaacctggcgatgatgtagagtttacaatcaaggatcggaatggcaaagaagtggcaacagatgtccgactgctgccacaggggacagtgatatttgaggacatctccattgagcattttgaaggaactgtgaccaaagtcatcccgaaggtgccctccaagaatcagaatgaccccctgcccggacgcattaaggtggacttcgtaattcccaaggaactgccatttggagacaaagacactaaatccaaagtcacgctcctggagggagatcacgtgcgtttcaacatcagcaccgaccgccgcgataagttggaacgagccacaaatattgaggtgctgtctaacacctttcaatttacaaatgaagccagagagatgggggtgattgctgctatgagagacggcttcgggttcattaagtgtgtcgatcgcgatgtccgaatgttctttcactttagcgagatcctcgatggcaaccagcttcacatcgctgacgaggtggaatttaccgtagttcccgatatgctctccgcgcaacgaaatcatgcgattcgcataaagaagttgcccaaagggacggtctcctttcattctcatagcgatcaccgatttctgggtaccgtggaaaaggaagctaccttttccaaccccaagacgacgtccccgaacaaagggaaagagaaggaggccgaagacggaatcattgcttacgacgactgcggggtcaaactgaccatcgctttccaggcaaaggacgtggaggggtcgaccagtcctcagataggcgacaaagttgaattctccatctctgataaacagaggccaggacagcaggtggccacatgcgtccggttattagggagaaactctaatagcaagaggctgctgggttatgtggctaccttgaaagacaactttgggttcatcgagaccgcaaatcacgacaaggaaatcttctttcactatagtgagttttcaggagatgtcgacagcttggagctgggggacatggtggagtactccctaagtaagggtaagggcaataaagtttcagcagagaaagtgaataagacccactcggtgaacggaataactgaagaggccgatcctactatctacagtgggaaagtgatcaggcccctgaggtcagttgaccccacccaaactgagtatcagggtatgatcgaaattgtggaggaaggcgatatgaaaggggaggtgtacccttttggtatcgtcggaatggccaacaagggggattgcctgcagaagggggaaagcgtgaaattccaactgtgtgtgcttggtcagaacgcccaaaccatggcatacaatatcacaccactccggcgggccacggtggaatgcgtgaaagaccaattcggctttattaactacgaagtcggagattccaagaagcttttcttccacgtcaaagaggtgcaggacgggatagagctgcaggcaggggatgaggtcgaatttagcgtaattctcaaccagcgaaccggcaagtgcagcgcttgcaatgtctggagggtgtgcgagggtcctaaggcggttgcagcgcctcgccctgacaggcttgtgaacagattgaagaacatcacgctcgatgatgcaagcgctccacgcttgatggtgctgcggcagcctaggggccctgacaattccatgggcttcggggcagagcggaaaatccgacaagccggcgtgatagactag

SEQ ID NO: 183453 - DNA, 2535 bp, synthetic construct
  misc_feature 1..2535: note = Description of Artificial Sequence: Synthetic coding sequence
  source 1..2535: mol_type = other DNA
atggagaacgtgttcaccgtgagcagcgacccccaccccagccccgccgcccccccttccctgagtctcccgctgagctcatccagtacttccagtgggactaagaagcagaagcggacgcctacatatcaacggtcgatgagtttcgacccaaatctccttcacaacaatggacataatggatatcctaacggcacgtccgctgcccttagggaaaccggggtaattgagaaactgctcactagctatggtttcattcagtgcagcgagagacaggcacgcctcttttttcactgctcacagtacaatggcaacttgcaggatctgaaggtgggagacgatgtcgaattcgaagtctcctcggatcgtagaaccggtaaacccattgctgtcaaacttgttaaaataaagcaggagattcttcctgaagagcggatgaacggccaggtggtctgcgccgtaccacacaatctggaatccaagtcgcccgccgcccctgggcagtcccctacaggatccgtatgttacgaacgtaacggcgaggtcttctacctcacatacacaccagaggacgtcgaaggcaatgtgcagttggaaaccggagataaaatcaatttcgttatagacaacaacaaacatacaggggcagtcagcgcacgtaatattatgctgctgaaaaagaagcaagcgcgatgccagggcgttgtatgcgcgatgaaggaggcattcggcttcatcgagagaggtgacgtggtaaaagagattttttttcattactccgaattcaagggagatctggaaacgctacagccaggggatgacgttgaattcactatcaaagaccgtaatggcaaagaggttgccaccgacgtgaggttgctgccccaaggtactgtgatattcgaggatatctccatagagcattttgaaggcacggtcacaaaagtaatccccaaagtaccaagcaagaaccaaaacgaccctttaccggggcgtatcaaggttgactttgttatcccgaaagagctgccctttggcgacaaagacacaaaatccaaggttacacttctcgaaggagatcacgtgcgttttaatatctcaacagatcgtagggataagttagaacgggctacgaacatagaagtgctcagtaacaccttccagttcaccaacgaggccagggagatgggtgtcatagcagcgatgcgggacggatttgggttcataaaatgcgtggacagggacgtcaggatgttctttcatttctctgagatactggacgggaaccagctacacatagccgacgaagtggagttcacagtcgtgccagacatgttgtcagctcaacgtaatcatgccatcaggatcaaaaaactgcccaagggcacagtgagctttcacagccactccgaccacaggttcctcggtaccgtggagaaggaagcaacgttctcaaaccccaaaaccaccagccccaacaagggtaaagaaaaagaagctgaggacggcatcatagcatatgatgactgcggggtgaagctgactatagctttccaggccaaagatgtagaaggaagcacttctccccagattggcgataaagtggagttctctataagtgacaagcagaggcctggccaacaggtggctacctgtgtgcgactcctcggccggaattctaattctaagagactgttgggctacgtggctacattgaaggacaacttcgggttcatagaaactgctaatcacgacaaggaaatcttcttccattactcagagttcagcggagatgttgatagtttagagcttggcgacatggtggagtacagtctatctaaggggaaggggaataaagtttccgccgaaaaagtgaacaagactcatagcgtgaacggtatcaccgaggaagcagaccccaccatttattctgggaaggtgatacgccccctgagatctgtcgacccgactcagaccgagtaccaggggatgatcgagatcgtcgaagaaggtgatatgaagggggaggtgtatccatttggtattgtgggaatggcaaacaagggtgactgcctgcagaagggtgagtcagtgaaatttcaactttgtgtgcttggccagaatgcccagacaatggcatacaacatcactcctcttaggagagctaccgtagagtgcgtgaaagaccagtttgggtttatcaactacgaagtcggggacagcaagaagctgttttttcatgtcaaagaggtgcaggatggcattgaactccaggccggagatgaggtggagttctcagtgatcctcaaccagcgcaccggaaagtgcagcgcctgcaatgtttggcgggtgtgcgagggccctaaagccgtggccgctcctaggcccgatcgactggtcaaccggctgaagaacatcacgttggatgatgcttcagcacctagactgatggtcttgcggcagcccagagggcctgacaatagtatgggtttcggggccgagcgcaaaattcgccaagccggtgtgatcgactag

SEQ ID NO: 183454 - DNA, 141 bp, synthetic construct
  misc_feature 1..141: note = Description of Artificial Sequence: Synthetic coding sequence
  source 1..141: mol_type = other DNA
atgagcttcgaccccaacctgctgcacaacaacggccacaacggctacccaaatgggaccagtgccgccctccgagaaaccggagtcatagagaaactcctcacctcctacgggttcatccagtgcagcgaaaggcaatag

SEQ ID NO: 183455 - DNA, 24 bp, synthetic construct
  misc_feature 1..24: note = Description of Artificial Sequence: Synthetic coding sequence
  source 1..24: mol_type = other DNA
atgagcttcgaccccaacctgtag

SEQ ID NO: 183456 - DNA, 2007 bp, synthetic construct
  misc_feature 1..2007: note = Description of Artificial Sequence: Synthetic coding sequence
  source 1..2007: mol_type = other DNA
atgaacggccaggaggtgttctacctgacctacacccccgaggacgttgaggggaacgttcaactcgagactggcgataagataaatttcgtgattgataataataagcacacaggggccgtctctgctaggaacatcatgttgctcaagaaaaagcaggctcgttgccaaggcgtggtttgcgcaatgaaagaggctttcggcttcattgaacgaggcgatgtggtgaaagagattttctttcactacagcgaatttaagggtgacctggaaaccctgcagcccggagacgacgtggagtttaccattaaagaccgcaatggcaaggaagtcgccacagacgtgcgcctgctgccgcagggcactgtcattttcgaggatatcagcatagaacacttcgaagggactgtgacaaaggtgattcctaaggttccctcaaagaaccaaaacgatccactgcctgggcggattaaggtcgacttcgtgattccaaaggaactgccgtttggtgacaaagatacaaagagcaaagtaacattgctggaaggggaccatgtccgatttaacatctcgacggaccggcgcgataaactagagagggccaccaatatcgaagtccttagcaacaccttccagttcactaatgaagcacgcgagatgggggtcatcgccgcgatgcgggatgggttcgggttcattaaatgcgtcgacagggacgtgaggatgttctttcacttcagtgagatattggatgggaaccagctacatatagctgacgaggtcgagttcacagtggttcctgacatgctcagtgcacagagaaatcacgccattcgaatcaaaaagctacctaagggtaccgtatccttccattcccacagcgaccaccgcttcctcgggacagtggagaaagaagctaccttcagtaatccgaagactacctcacccaataagggaaaagagaaggaagctgaggatggaattatagcctacgacgactgcggggtcaagctgacaattgcatttcaggcgaaagatgtggaaggctccacatccccacagatcggcgacaaagtagaattctctatctccgacaaacagcggcctggacagcaggttgccacctgtgtccgtctcctcggtcgcaacagtaactccaaacgcctccttggttatgtggctaccctgaaggacaattttgggtttatcgagaccgctaatcatgataaagagatattctttcactacagcgagttctccggagacgtggatagcctggagctcggagacatggtggagtattccctgtccaagggaaaaggaaacaaggtcagtgccgagaaggtcaataagacccactctgtaaacggaattacagaggaggcagaccccacgatctactctgggaaggtaattaggcccctcaggtcggtggatcccacacagaccgagtatcagggaatgatagagattgttgaagaaggcgatatgaagggggaagtttacccatttggtatcgtgggcatggcaaacaagggggactgcctgcaaaagggggaatccgtgaagttccagttatgtgttctcggccaaaatgctcagactatggcgtacaatatcacaccacttagacgggcgacggttgaatgtgttaaggatcaatttggatttattaactacgaggtcggagatagcaagaaattgttctttcacgtgaaggaagtgcaggacggcattgaactccaagctggggatgaagtggagttttctgtgatactgaatcaacgaactggcaaatgttcggcatgtaacgtgtggagagtctgcgagggacccaaggctgttgccgcccctcggccggaccggttggtgaacagactaaagaatattaccctcgatgacgcctcagctcctaggcttatggttctgcggcagcccagaggccctgacaatagcatgggatttggcgcggaaaggaagattaggcaggccggggtgatagattag

SEQ ID NO: 183457 - DNA, 288 bp, synthetic construct
  misc_feature 1..288: note = Description of Artificial Sequence: Synthetic coding sequence
  source 1..288: mol_type = other DNA
atgagcttcgaccccaacctgctgcacaacaacggccacaacggctatcccaacggaacctctgccgcgcttcgtgagaccggtgtgattgagaaactcttgacatcttatggctttatccagtgctcagaacggcaggcacgccttttttttcactgcagtcagtataacggaaatctgcaggacctaaaggtcggcgacgatgtggagtttgaggtttcgagcgacagacggaccggaaagccaattgcagtgaagcttgtcaagatcaaacaggaaatactgtag

SEQ ID NO: 183458 - DNA, 2397 bp, synthetic construct
  misc_feature 1..2397: note = Description of Artificial Sequence: Synthetic coding sequence
  source 1..2397: mol_type = other DNA
atgagcttcgaccccaacctgctgcacaacaacggccacaacggctatcccaatggaacgtctgccgctttgagggaaacaggcgttattgagaagcttttgacatcctatggttttatccagtgcagcgagcgccaggcaagactgttcttccattgctctcagtacaacggcaatttacaagatcttaaagtgggtgatgacgtagagttcgaagttagttcagacaggcggacaggtaagcctattgctgtgaagctggttaagattaagcaggagatcctgccagaggagaggatgaacggtcaagtcgtctgcgccgtgccacacaatcttgaaagcaagagccctgcggcgcccggtcaaagccctaccggaagtgtctgttatgaacggaatggggaagtgttttatctgacgtatacacccgaagacgtggagggcaacgtgcaactcgaaacaggggacaagatcaactttgtgatcgacaataacaagcacactggtgctgtcagtgcaagaaacatcatgcttttaaagaaaaaacaggcccggtgccagggggtggtttgtgcaatgaaagaagccttcggatttatcgagaggggagatgttgttaaggagatattctttcactattccgagttcaaaggtgatctggaaaccctacagcccggcgacgatgtcgaattcacaattaaagacagaaatggcaaagaagtcgctactgatgtgcggttactcccacagggtaccgtcatctttgaagatatttccatcgagcactttgaaggtacagtcaccaaggttatacctaaggtgccttctaaaaatcagaatgatcctcttcctggccgcatcaaagtggacttcgtaatcccgaaggaactgcctttcggcgataaggatacaaagtccaaagtaacactactcgagggcgatcacgtgagatttaatatcagcaccgacaggcgggacaagctggagcgcgctacgaatattgaagttctgtccaatacatttcagtttaccaacgaagcccgtgagatgggggttatcgctgcaatgagagatggatttggcttcattaaatgcgtggatcgggacgtccgcatgttcttccacttcagcgagatcctggatgggaatcaactacatatcgcagatgaggtggaattcaccgtggtgccagacatgctctccgcccagagaaatcacgctattagaattaaaaaactccccaaggggaccgtctccttccactctcactccgaccaccgctttctcggtactgtggagaaagaagccactttctctaatcctaaaaccacctcacccaataaaggaaaggagaaggaagccgaggatggtatcatcgcatatgacgactgtggtgttaagctcaccattgccttccaggctaaggacgtcgagggttctacctctccccagatcggggataaggtagagttctcaatatctgataaacaacgtcccgggcagcaagtcgccacatgtgttagattgctaggacgaaattcaaattctaagcgactgctaggttacgtagccaccttgaaggataactttgggttcattgagactgcgaatcatgataaagagatatttttccactacagtgaattttccggggatgtcgatagcctggaactgggagatatggtagagtactccctgtccaagggcaaaggtaacaaagtttccgctgaaaaagtcaacaagacacacagcgtgaacggcatcacggaggaggctgatcctaccatttacagcggaaaggtaatacggcctctccgatccgtagacccaacccagactgagtaccagggcatgatcgagatcgtagaagagggagatatgaagggtgaagtgtatccatttggaatcgttggcatggccaacaagggagattgtcttcagaagggtgagagtgtgaagtttcagttgtgtgtgcttggacagaatgctcaaaccatggcatacaacattaccccactcagaagagctaccgtcgaatgcgtgaaagaccagttcggcttcataaattacgaagtgggcgacagtaagaagctgttttttcatgttaaggaggtgcaggacggaatcgagctgcaggccggggacgaagtggagttcagcgtgatactgaaccaacgaacaggtaaatgttcggcttgcaatgtctggagggtctgtgaggggcccaaagccgtggctgctccaagacccgatagactggtgaatcggcttaagaatatcactctggatgatgcctctgccccgcggttgatggtgctgcggcagccccggggacctgacaactctatgggattcggggccgagcgcaagatccgccaggccggagtcatcgactag

SEQ ID NO: 183459 - DNA, 1329 bp, synthetic construct
  misc_feature 1..1329: note = Description of Artificial Sequence: Synthetic coding sequence
  source 1..1329: mol_type = other DNA
atggaggccagccggtgccggctgagccccagcggcgacagcgtgtttcacgaggagatgatgaaaatgcgtcaggcaaagctggactaccaacgcctactcctggagaagcgccagcgcaaaaagcgtctcgagcctttcatggtccagcctaatccagaggccaggcttcgccgggctaaaccaagagcttctgacgagcagacacctttggtgaattgtcatactcctcatagcaatgtgatactacatggcattgatgggcctgccgccgttttgaaacccgatgaggttcatgctcccagcgtaagcagctcagtagttgaggaggatgccgagaacactgttgatacggcgtcaaagcccggcttgcaggagcggctacagaaacacgacatctcagaatccgtgaattttgacgaagaaaccgacggaatctctcagagtgcctgcctcgagagaccaaatagtgcttccagtcagaactcaaccgatacgggtactagcggctctgctaccgctgcccagcccgcagacaaccttttgggggacattgacgacttagaggactttgtctattcccctgctccccagggggtgaccgtccggtgtagaatcatccgggataagagagggatggatcggggtctgttcccaacttactatatgtaccttgaaaaagaagaaaaccagaagatctttttactggcagcacggaaaaggaagaagtctaagaccgctaactatctcattagcatcgacccagttgatttgagcagggagggtgagagttatgttggaaagttgcgtagcaatcttatggggaccaaatttacggtgtacgaccgaggaatctgccctatgaaagggcgtggactggtaggtgcggcccataccagacaagagttggccgcaatctcatatgagactaacgtccttggcttcaagggcccacgcaagatgtctgtcattatcccgggtatgacgctcaatcacaagcagatcccatatcagccacagaacaaccacgatagccttctgtcccggtggcagaatcggacaatggaaaatctggttgaacttcacaacaaggctcctgtatggaattcagacacccaatcctatgtgcttaactttaggggccgcgtgacccaggccagcgttaagaacttccagattgttcataagaacgacccagactacatcgtgatgcagttcggcagagtcgctgatgacgtttttacgctggattacaactaccccctgtgtgccgttcaggcttttggcattggacttagttcgttcgattccaagctggcctgcgagtag

SEQ ID NO: 183460 - DNA, 912 bp, synthetic construct
  misc_feature 1..912: note = Description of Artificial Sequence: Synthetic coding sequence
  source 1..912: mol_type = other DNA
atgagcgaggccggcgaggccaccaccaccaccaccaccaccctgccccaggcaccaacagaggccgcagcagctgcaccacaggaccccgcccctaagtcccctgtcggttccggcgcaccgcaggcagctgctcccgcccccgccgcgcatgttgctggcaaccctggcggcgatgccgctccagcggccactggaactgccgcagccgcctctttggcgacagccgcggggagcgaggacgcagagaaaaaagtattagctacaaaggtcttaggaaccgtgaaatggtttaacgttcggaatgggtacggttttattaaccgcaacgataccaaagaggatgtgtttgtgcaccagaccgcaattaagaagaacaaccctagaaagtatctcagatccgtaggggatggcgagaccgttgaattcgatgtcgtagagggggaaaagggcgcagaagctgctaatgttactgggccagatggagtgcccgtcgaagggagtcgctatgcagcagacaggcgcaggtacaggcggggatattacggccgcaggcgaggccccccccggaacgcgggcgaaatcggtgagatgaaagatggggtacctgagggcgcccagctgcaagggcccgtccacagaaatcctacctatcgcccccgctataggagtcggggtccgcctcgccccagaccggctcccgcagtgggcgaggctgaggataaagagaaccagcaagctaccagtggacctaaccagcctagcgtgcgccggggatataggagaccttacaactacagaagaaggccccgccctcccaacgccccctcccaggatgggaaggaggccaaggccggtgaagcacctaccgagaacccggcccccccaactcagcagagcagcgctgagtag

SEQ ID NO: 183461 - DNA, 339 bp, synthetic construct
  misc_feature 1..339: note = Description of Artificial Sequence: Synthetic coding sequence
  source 1..339: mol_type = other DNA
atggagaagatcctgatcctgctgctggtggccctgagcgtggcctacgcggcccccgggcccagaggaatcatcatcaacctggaaaacggagaactgtgcatgaatagcgctcagtgcaagtctaattgctgccaacactcatccgctcttggtctggcccgctgtactagtatggcgtcagagaacagcgagtgtagcgtgaagaccctttacggcatctattacaaatgcccatgtgagcgagggctcacgtgcgaaggggacaagacaatcgtcggtagtatcacgaatactaacttcggcatctgccacgatgccggaagaagcaagcaatag

SEQ ID NO: 183462 - DNA, 216 bp, synthetic construct
  misc_feature 1..216: note = Description of Artificial Sequence: Synthetic coding sequence
  source 1..216: mol_type = other DNA
atggagaagatcctgatcctgctgctggtggccctgagcgtggcctacgccgctcccggtccacgaggcatcatcatcaacctgaccctgtacggaatttactataagtgtccgtgtgagcgcggcctgacttgcgagggagacaaaactattgtgggcagtatcaccaacacaaatttcggtatatgccacgacgcagggagatcaaaacagtag

SEQ ID NO: 183463 - DNA, 408 bp, synthetic construct
  misc_feature 1..408: note = Description of Artificial Sequence: Synthetic coding sequence
  source 1..408: mol_type = other DNA
atgcagctgacctgggccagcatcagcctggtgacccggtgctggccccaaacaccaacctttcaggacctgctagcctgtctaggtgcacgggcgctgccaggacctccaggtgcacctgggcgcgatgggagcaagggcgaaaggggagcccctggacctagaggaagtccaggaccgccagggtcattcgattttcttcttcttatgctggccgatatacgcaacgatatcactgagctccaggaaaaggtgttcggccaccgaactcacagtagcgccgaagaatttccacttccccaggagttcccatcctaccctgaggcaatggatctgggaagcggcgatgaccaccctaggcgcacagaaaccagagacctgagggctccacgagacttctacccctag

SEQ ID NO: 183464 - DNA, 1221 bp, synthetic construct
  misc_feature 1..1221: note = Description of Artificial Sequence: Synthetic coding sequence
  source 1..1221: mol_type = other DNA
atggtgccccccccccccagccggggcggcgccgcccggggccagctcgggcgctctctcggaccgctgctcctgctcttggccttaggacacacgtggacttacagggaggaacccgaggatggggatcgcgagatctgcagcgagtctaagattgccaccactaaatatccatgcttaaaatctagcggggagctcactacatgttaccggaaaaagtgctgcaagggatacaaattcgtactcggtcagtgcatccccgaggactacgatgtttgcgccgaagccccttgcgaacagcagtgcaccgacaactttggtagagtactttgcacgtgctatccaggctataggtatgatcgagagcgccatagaaagagagaaaagccctactgccttgacattgacgagtgcgctagcagtaatggaaccctatgcgcccacatctgcataaacacactcggtagctacagatgcgagtgtcgtgagggctatattcgggaagatgacggaaaaacttgtaccagaggtgacaaatatcccaacgatacagggcatgaaaagagcgaaaacatggtaaaagcgggtacctgttgtgccacctgcaaggaattttatcagatgaagcaaactgtgcttcaactcaagcagaaaatcgcccttctgcccaataacgctgccgatctgggtaagtacatcactggcgacaaggttctcgcatccaacacatatctcccagggcctcccggtcttcctgggggacagggaccccctgggagcccggggccaaaggggtcacccggatttccaggcatgcccggccccccaggccagccaggccctcgcggtagcatgggacccatgggcccttcacctgacctgtctcacataaaacaggggcggagaggtcccgtgggcccacccggagcacccggcagggatggaagtaagggggaaaggggggctccaggcccaagggggagcccaggcccccctggtagctttgactttctgttgctcatgttggccgacattagaaatgacataacggagcttcaggaaaaagtgttcggccataggactcactctagcgctgaggaatttccactgccgcaggagtttcctagttatccagaggccatggatctgggatccggcgatgaccaccctcgcaggactgagacccgagacttgcgcgccccccgggacttctacccgtag

SEQ ID NO: 183465 - DNA, 699 bp, synthetic construct
  misc_feature 1..699: note = Description of Artificial Sequence: Synthetic coding sequence
  source 1..699: mol_type = other DNA
atgtggccccccggccggagcatcaccgtgaagctgcgggagaagacagtgtcccgaaagctggagatgaatggtccaagcgcgtttcaggggctaatctgtggcaagtataacggcatgtgtctgcaagggccagcaggagtacccgggcgtgatggcagtcccggggctaacgggattcccgggaccccgggcatcccaggcagagatggtttcaagggcgaaaaaggtgaatgtctgcgagagtcatttgaagaatcctggactcctaattacaaacagtgcagctggagctccctgaattatgggattgatctcggcaaaatagccgagtgtacctttacgaagatgcggtccaattctgctctgagggtattattttctgggtcactccgcttaaaatgtcggaacgcttgttgccagcggtggtactttacctttaatggtgcagaatgctcgggtcctctcccaatcgaagccattatctacttagaccagggttccccggagatgaactcaactatcaacattcatcgtacctcaagtgtagaggggctttgcgaaggcataggagcgggacttgtggacgtcgcgatatgggtcggaacatgctccgattatccaaagggagacgcctctacaggctggaatagtgtgagtaggatcataattgaggagcttcctaactatctgttctag

SEQ ID NO: 183466 - DNA, 732 bp, synthetic construct
  misc_feature 1..732: note = Description of Artificial Sequence: Synthetic coding sequence
  source 1..732: mol_type = other DNA
atgcggccccagggccccgccgccagcccccagcggctgcggggcttgctgctgctgctcctgttgcagctgcccgctccttcctccgcttccgagattcccaaaggcaaacagaaagcccagcttagacaacgcgaggtggtcgatttgtacaacggcatgtgcctgcagggtccagcaggagttccaggccgagacgggtctcccggcgccaacggtatccctgggacacccggaattccagggcgtgatggctttaagggagaaaaaggtgaatgcctccgcgagagcttcgaggagtcttggacacccaattataaacaatgctcatggagctctctgaactacggcatcgacctcggaaaaattgctgaatgtacttttacaaaaatgaggtcgaactcggcattgcgagtgctgttttcagggagcttgcggcttaaatgccggaatgcttgctgtcagaggtggtacttcacctttaacggagctgaatgtagcggtcccctgcctattgaggcaattatttacctggaccagggatctccagagatgaactccacgattaacatacacagaacttcatcagtggagggactctgcgaggggatcggagccgggctggttgacgtggcaatatgggttggcacgtgctcggactaccctaagggagacgcctcaaccggctggaatagcgtgtccaggataatcattgaggagctgcccaagtag

SEQ ID NO: 183467 - DNA, 690 bp, synthetic construct
  misc_feature 1..690: note = Description of Artificial Sequence: Synthetic coding sequence
  source 1..690: mol_type = other DNA
atgtggccccccggccggagcatcaccgtgaagctgcgggagaagacagtctctaggaagctggagatgaatgggcccagcgctttccagggccttatctgcggcaaatacaatggtatgtgtctgcagggacctgcaggcgtgcctgggcgggacggatctccaggagctaacggcatcccagggaccccaggcatccctggcagggatgggtttaagggagagaagggcgaatgtctccgcgagtcctttgaggagtcttggaccccgaactacaaacagtgctcctggtctagcctgaactacggcatcgacctgggcaagatcgcagagtgcacatttactaagatgcgcagcaacagtgctctgagggtcctgttcagcgggagcctgcgcctgaaatgccgcaacgcctgttgccagagatggtactttacattcaatggcgccgagtgctccggacctcttccaattgaggcaattatctatcttgatcaggggtcaccagagatgaacagcaccataaatatacatcgcaccagctccgtcgagggcttatgcgagggcatcggcgctggcctggttgacgtagccatctgggtcggcacatgctccgactaccctaaaggcgacgctagtacagggtggaattcggtctctcgcatcattatcgaggagctccccaaatag

SEQ ID NO: 183468 - DNA, 5037 bp, synthetic construct
  misc_feature 1..5037: note = Description of Artificial Sequence: Synthetic coding sequence
  source 1..5037: mol_type = other DNA
atgcaccccggcctgtggctgctgctggtgaccctgtgcctgaccgaggagctggctgctgctggggagaaatcttacggcaaaccctgcggcggtcaggattgcagtggttcttgccaatgctttccggaaaagggagctcgaggacggccaggacctattggcatccaaggcccaacgggaccacagggctttacagggtctaccggtttatcagggcttaaaggcgagaggggcttccccgggcttctgggtccctatggtcctaaaggtgacaagggtcccatgggagtccctggtttcttggggatcaacggtattcccggccatcccggtcaacccggccccagaggcccacccggattggacgggtgtaatggtacccagggcgcagttggctttcctggccccgacggctatccaggtctgcttggcccacctggactgcccggccagaaaggttccaagggcgatcccgtgttggctcccggatcctttaagggaatgaagggagatcccggcctgcctggcctggacggcatcaccggaccccagggagcccctgggttccccggcgccgtgggaccagctggccctccggggctccagggacctcctggccccccgggcccactggggcctgatgggaatatgggccttggttttcagggcgagaagggggtgaagggcgatgtaggactccccgggcctgcgggccccccccctagcaccggggaattggagttcatgggatttcctaaagggaaaaaagggagcaagggcgagcctggccccaaaggattcccgggaatctcgggcccaccaggcttccctggactcggcacaaccggagagaaaggcgaaaaaggggagaaagggatccccggattacccggcccccgggggccaatgggttcggaaggtgttcagggccctccaggccagcagggtaagaaagggacacttgggttcccaggattgaacggctttcaaggaattgagggtcaaaaaggtgacattggtctccccggtcccgatgtgtttatcgatattgatggggcagtgatctccggtaatccaggtgatcccggtgtgccaggccttccgggactcaagggcgatgagggaatccaaggcctccgggggccctctggtgtgcctggacttccggccctgagcggagtgcccggagccttaggaccacaagggtttccaggacttaaaggagatcagggcaaccctggcagaaccacaatcggagctgcaggactccccgggagggacggcctgcctggcccacccgggcctcccgggccaccctctcctgaattcgaaaccgagactcttcataataaggaatctggctttcctggactcagaggtgaacaggggcccaagggaaacttgggtctgaaaggaattaagggggatagtgggttctgtgcgtgtgacggcggagttcctaataccggtccccccggcgagccaggcccaccaggtccctgggggcttattggcctgcctggcctcaaaggcgcaagaggggaccgcgggagtggaggggctcagggcccagcgggggcacctggtttggtcggaccacttgggcctagcggccctaaaggcaaaaaaggtgaacccatactgagcaccatacaaggaatgccaggagatcgcggcgattctggcagtcaaggcttcaggggggttattggagagcctggaaaagacggggtccccgggcttcctgggctgccaggcttgcccggagacggtggacaaggatttcccggggaaaagggcttacccggactgcccggtgaaaagggccatcctgggccccctggcctgcctgggaatggcctccccggcctgcccggacccagaggcctgcccggcgacaaagggaaagatgggctccccgggcagcagggactgccaggttccaagggcatcactctgccttgcattatcccaggatcctacgggccaagcggattccctgggaccccagggtttccaggaccaaaagggtcacgggggctccccgggacgccaggacagcccggcagcagcgggtctaaaggggagcctggctccccaggcctggtacacctgccagaattgccaggtttcccgggaccacgcggggagaaaggacttcctggattccccggcctcccaggtaaggacggattaccaggcatgatcgggtcaccagggttgccagggagtaagggcgcaactggggacattttcggtgcagagaacggtgccccaggggagcaaggactccagggccttactggccataaaggattcctgggcgactctggcctgccaggcttgaaaggagtgcacggaaagcccgggctgctgggacctaagggtgagagggggagccccgggaccccaggccaggtcggccaaccagggaccccagggagcagcggtccatacggaatcaaaggaaaaagtggtctgcctggggctccaggattccctgggatctctggccacccagggaagaagggtaccagaggcaagaaggggccacctgggtcaatcgtgaaaaagggcctaccagggttgaaaggcctgcctggcaaccctggcttagtaggcctgaaggggtcccccggatcccccggagtcgctgggctccccgcgttgagtggtcccaaaggagagaagggcagtgtgggctttgtggggtttcccggtatccctgggctgccaggaataccgggcaccaggggtctgaagggcatccccgggagcacaggaaagatgggaccgagcgggagagctggcactccaggcgagaagggggatcgcggaaaccccggccctgtcggcatcccctctccccggagacccatgtcaaatctttggcttaaaggggacaaagggtctcaggggtccgcaggcagcaatggattccctggtccaaggggggacaaaggggaggctgggcgccctgggcccccgggactacctggtgctcccggtttacctggtattataaaaggagtctcagggaagcctggtcctccaggttttatgggcatccgcggattacctggactgaagggaagtagcggaatcaccggcttccccggcatgcccggggaatctggatcccagggcatcaggggttctcctggcctccccggtgcttctgggctgcctggcctgaaaggcgacaatggccaaactgtggaaatttctggaagccccggtcctaagggccagccgggagagagcgggttcaaggggactaagggtcgagatggtctgatcggaaacattggctttcccggcaataagggtgaggacggtaaagtcggtgtgtcaggtgacgttgggttgccaggcgctcccggattccccggtgtcgccgggatgcggggagaaccgggactccccggatcctctgggcatcagggcgcaatcgggcccctcgggagccctggtctgataggaccgaaagggttcccaggattccctggactgcacggcctcaatggactgcccggcacaaagggcacacacggtacccctggaccatccatcacaggggtgccaggcccagctggattacccggaccaaagggcgagaagggctatcctggaatcggaattggggcccctggcaaacccgggcttagggggcaaaaaggggaccgaggattccccggactgcagggtccagccgggctacccggcgccccagggattagcctcccctctctgatcgcaggccaaccgggcgatcccggtagaccaggattagatggtgagagaggccgcccaggcccggctggaccacccggcccccctgggccaagtagtaaccagggcgacacaggagatcccgggttccctggtatacctggattcagcgggcttccaggtgagctaggactgaaaggcatgagaggcgagccgggcttcatggggacccctggcaaagtcggccctcccggggatcccggcttccccggtatgaaaggcaaagcgggcccgagaggctctagtgggttgcagggagaccccggacagaccccgaccgccgaggccgtacaggtacctcccggccctctgggacttcccggcattgatggaatccctggcctaaccggagatcctggggctcaaggccctgtaggcctgcagggcagcaaaggcctccccgggattcccggaaaggatggccctagcggtctaccaggtccacccggcgcccttggggaccctggcctccccgggctgcaggggccccctggattcgagggcgcaccaggccaacaaggaccatttggcatgccaggcatgccgggccaatccatgcgagtgggctacactctggtgaagcattcacagtcagaacaggtgcctccttgtcccatcgggatgtcgcagctgtgggtggggtactccctcttgtttgtcgagggccaagaaaaggcccacaaccaagatctgggctttgccggctcttgcctacccaggttcagtaccatgccttttatctattgcaacatcaatgaggtgtgccactacgcgagaaggaatgataagtcttattggctttcaacgactgcacctattcctatgatgccagtgagtcaaactcagataccgcagtacatctcaaggtgtagtgtgtgcgaggccccctcacaagccattgcggtgcattctcaggacatcacaatcccccaatgcccactaggatggcggtccctgtggatcggatatagctttctcatgcacacggcggcaggagccgaaggaggcggccaatctttggtgagcccggggtcctgcctggaggattttcgagccacaccttttatcgagtgttccggtgcaagaggaacatgccactactttgctaacaagtattcgttttggctgacaactgttgaagagcgccaacagttcggggaactgcctgtgtctgagacactcaaagctggtcaacttcatacccgggtgtccagatgtcaggtttgcatgaaatcgctttag

SEQ ID NO: 183469 - DNA, 3087 bp, synthetic construct
  misc_feature 1..3087: note = Description of Artificial Sequence: Synthetic coding sequence
  source 1..3087: mol_type = other DNA
atgcgggccgcccgggccctgctgcccctgctgctgcaggcctgctggacagctgcgcaggacgagcccgagacaccgcgggccgtggcatttcaggattgtcctgtggacctcttttttgtacttgacacgtccgaaagtgttgccttgcgactgaaaccttatggtgccctggttgacaaggtgaagagtttcaccaagcgttttatcgacaatctaagagatcgctattacaggtgtgatcggaacttagtctggaatgccggcgcgctgcattatagcgatgaggtggagattatccaaggcctgaccagaatgccgggggggcgggacgcgctgaaatctagcgttgacgccgtcaaatacttcggcaaaggcacttacacagattgtgccattaagaagggcctggaacagcttctcgttgggggtagccaccttaaggagaataaatacctgatcgtcgttaccgatgggcatccattagagggttataaggagccttgcggcggtctggaggatgcggtgaacgaggccaagcatttgggtgttaaggtttttagcgtggccatcacacctgaccacctggaaccccgcctctcaatcatcgctacagatcacacctaccgtcgaaacttcactgccgcggactggggccagtctcgggacgctgaagaggcgatcagtcagacaatcgacaccattgttgacatgataaagaataacgtggagcaggtgtgttgtagcttcgaatgccagccagcacgaggtccccccggtctccgaggtgacccagggttcgaaggcgaacgcgggaagccaggcctgccaggggaaaagggcgaagccggagatcctggcaggccaggggatttaggcccagttggctatcaggggatgaaaggagagaaggggagtaggggagagaagggatccaggggccccaaaggatacaagggtgagaagggaaagaggggcatcgatggcgtcgacggcgtcaaaggggagatgggttaccctgggctaccaggttgtaaggggtcccctgggtttgacgggattcaaggcccccctggacccaagggggacccgggtgcattcgggcttaagggggagaagggagaaccaggagccgatggcgaagctggtaggccagggtctagcgggccaagcggggatgaagggcagcccggtgagccaggcccgcccggggaaaagggcgaggccggtgacgaggggaatcctggcccagatggagcccccggagaaagaggtgggcccggcgaacgtggccctcgaggcactccaggcacaagaggtccacgcggggatccaggcgaggctggaccacagggcgaccagggacgggaaggccccgtcggggtgccaggggatccaggagaagccggtccaatagggccaaaggggtacagaggcgatgagggcccacctggaagcgaaggcgccagaggcgctcccggcccagccggccctcctggtgatccaggcctgatgggcgaaaggggagaggacgggcccgcaggcaatgggactgaggggttccctggattccccggatatcccggaaatcgcggggctcccggaatcaacgggacaaaggggtacccgggcctcaagggggacgagggcgaagcaggagaccctggggacgacaataacgatatcgccccaaggggcgtgaagggcgcaaagggctataggggtccagaaggcccacagggccctcccggccatcaggggccaccaggccccgacgaatgcgagatcctggacatcataatgaaaatgtgtagttgctgcgagtgcaaatgtggccctattgatcttctttttgtcttagacagctcagagtcaattggcctgcaaaatttcgaaattgcaaaagattttgtggttaaggtcattgaccggctgagccgcgacgaactggtgaagttcgagccggggcaatcttacgcaggcgtcgtccagtactcacatagccagatgcaggagcacgtgtcattgcgatccccgagcatcagaaacgtgcaggaattgaaagaggcaatcaaaagcctgcagtggatggcggggggcacgttcactggggaggctctccaatataccagagatcagttgttaccgccttcacctaataatcggatcgcattagtgattaccgatggacgaagcgacactcagcgagacaccactcctctgaacgttctctgtagtccaggaattcaagttgtgagtgttgggataaaggacgtgttcgacttcattcctggaagcgatcagctgaacgtcatcagctgccaaggcttagcaccaagtcagggcaggccaggcctcagccttgttaaggaaaactatgcagaactgctagaggacgcattcttgaaaaacgtaactgctcaaatatgcatcgataaaaagtgcccagactatacctgtcctataacattttcaagcccggctgatatcacgattctcctcgacggatcagcatctgttgggagtcataatttcgatacaactaagagatttgccaaacggttggcggagcggtttttgacggccggaaggacagatccagcccacgacgtccgggttgctgttgtccagtactccggcacaggccagcagcgtccggagcgagcgagcttacagttcctgcagaactatacagcattggcctctgcagtggacgccatggattttatcaacgatgcaactgacgtgaatgatgctctcggatacgtaacgaggttctacagagaagccagctccggcgctgcaaagaaaagactgctgcttttctccgatggtaatagccagggcgcaacccccgcagcaatcgagaaagcagtccaagaagcacagagagccggcattgagattttcgtagtggtggtgggccgacaggtgaatgagccacacatccgagtactcgttacgggcaaaaccgccgaatatgatgtggcatacggagaatctcatctgtttcgcgtgccctcctatcaagcactcttacggggggttttccaccagactgtttccaggaaagtagccctggggtag

SEQ ID NO: 183470 - DNA, 1770 bp, synthetic construct
  misc_feature 1..1770: note = Description of Artificial Sequence: Synthetic coding sequence
  source 1..1770: mol_type = other DNA
atgcgggccgcccgggccctgctgcccctgctgctgcaggcctgctggacagcagcccaggatgagcccgagactcctagggctgtcgccttccaagattgtcccgtggatctctttttcgtgctcgatacctcggaatcagtggcacttcgtctcaagccatacggggcactggtggacaaagtcaagtcgtttacaaagaggtttattgacaacttgcgcgaccggtattacaggtgcgatagaaatctggtgtggaacgccggcgctctgcattattcagacgaagtggagattatacagggcctcacacggatgcctggcggtagggacgccctgaagagcagcgtggatgctgtaaaatatttcggtaaaggtacttataccgattgtgccattaagaaaggactcgagcaactcctagtcgggggctcccatcttaaggaaaacaagtacctgatcgtagtaactgacggacaccctctagagggctataaggagccctgcggtggtttagaggacgctgtgaacgaggctaagcacctgggcgtgaaagtatttagcgtcgctatcacccctgatcacctggagccacgactgtcaatcatcgccaccgatcatacgtatcggcgcaactttactgccgcagactgggggcaatcccgcgatgccgaggaagccatctcacagaccattgataccatagtagacatgatcaagaacaatgttgagcaggtgtgttgctctttcgagtgccagcccgcccgcggcccaccaggtctccggggagatcctgggtttgagggagagcggggcaagcccgggctgccaggcgagaaaggtgaagccggcgatccggggaggcctggggatcttggccccgtgggctatcaggggatgaagggcgagaagggctctcgcggagaaaaagggagtagaggtcccaaaggctataagggggagaagggtaaaagagggatagacggggtggatggggtcaagggtgaaatgggttaccccggtcttccaggctgtaaaggctctccggggttcgacggcattcaggggccaccaggccccaagggcgatcccggcgcatttggcctgaagggtgagaagggggaacctggcgctgatggagaggcaggtcgaccaggatcaagcgggccttctggagatgaaggccaacctggtgagccagggcctccaggtgaaaaaggggaagctggagatgaaggcaacccgggccctgatggtgccccaggggaaaggggaggcccgggagagagaggccccagaggtacacccgggacaagaggcccgaggggagaccctggggaggctggtccccagggggaccaaggtagggaagggcctgtgggagtgccgggtgatcccggcgaagccggcccgatcggcccaaaggggtaccgtggagatgagggccccccagggagcgaaggcgcaaggggggctccaggccccgcggggccgccaggagatcctggtttgatgggagaaaggggggaagacggcccagctggcaacggcacggagggcttcccaggtttccccggttatcctggaaacaggggggcccccggtatcaatgggacgaaaggttaccctggactgaagggcgacgaaggcgaggccggcgatcctggcgatgataacaacgatattgcccctaggctgctgagggtattgttggtgaccgggctcgaccttgggcctacagcactcgaagctgccgccgatcaacactag

SEQ ID NO: 183471 - DNA, 324 bp, synthetic construct
  misc_feature 1..324: note = Description of Artificial Sequence: Synthetic coding sequence
  source 1..324: mol_type = other DNA
atgcgggccgcccgggccctgctgcccctgctgctgcaggcctgctggaccgcagctcaagatgagcctgagaccccacgagctgttgcctttcaagattgccccgtggatctcttcttcgtcctagatacatcagaaagtgtggctttgcgactcaagccgtacggcgcgttagtggataaagtcaagagtttcaccaaaagatttatcgacaatctgcgggatcgttactacagatgcgacaggaatctggtgtggaacgctggtgcattgcactactctgacgaggtcgagattattcaggggttaacccggatgccttag

SEQ ID NO: 183472 - DNA, 3060 bp, synthetic construct
  misc_feature 1..3060: note = Description of Artificial Sequence: Synthetic coding sequence
  source 1..3060: mol_type = other DNA
atgctgcagggcacctgcagcgtgctgctgctgtggggcatcctgggagcaatacaagcccaacagcaggaggtgataagccctgataccaccgaacggaataacaactgtcccgagaaaacggactgtcccatccacgtgtatttcgtgctcgataccagcgaaagcgttaccatgcagtccccgaccgacattctcctcttccacatgaagcagttcgtgccccaatttatttcacagctgcagaacgaattttacctagatcaggttgctctttcatggcggtacggaggactgcatttttctgaccaagtcgaggttttcagcccacccggctccgaccgcgcttctttcatcaaaaatctgcagggaatcagcagtttccgccgcggcacctttactgattgcgctctagctaacatgactgaacagattaggcaagaccggagtaaaggcactgtccacttcgccgtagtcatcacagatggccacgtgactgggtcaccatgcggagggatcaaactgcaggccgaaagagcacgcgaggagggtatcaggctcttcgcagtggccccaaaccaaaacctgaaagaacagggtctgagagatatcgccagtaccccgcacgaactctatagaaacgattacgccaccatgctcccagacagcacggaaatcgatcaggatactataaatcggatcatcaaggtcatgaagcacgaagcctatggcgagtgttacaaggtgagctgtctggaaattcctgggcccagcggacccaagggataccgtgggcaaaagggggcaaaggggaatatgggggaaccgggcgaacccggccagaagggccggcaaggtgatccaggtatcgagggccccatcgggtttcccggccccaagggagtgcctggtttcaaaggagagaagggtgaattcggcgccgatggacgcaaaggagctcctggactcgctggtaaaaatggtaccgacggccagaagggcaagcttggcagaattggcccacccggctgtaaaggcgaccctggtaacagaggccctgacgggtacccaggcgaggcaggttcacctggtgagcggggtgatcaggggggtaaaggggacccaggcaggcccggtagacgcggtccacctggagagattggcgcaaaggggtcaaagggctaccaaggcaactctggcgccccaggtagtccaggcgtaaagggtgccaaaggcggccccgggcctagaggccccaagggtgagcccggaagacgaggagatccagggaccaagggaagccctggatctgacggacccaagggtgaaaaaggcgaccctgggcccgagggccccaggggtttggccggcgaggtgggcaacaagggggccaagggagaccggggactccctggccccaggggcccacagggcgcattgggcgaacccggtaagcaggggagccgaggggatccaggggacgccggaccccgcggggattccgggcagccaggcccgaagggggacccagggcggccaggttttagttaccctggacctaggggggcccccggcgaaaagggcgaacccggtcctagagggccagaaggggggcgcggggatttcggactgaagggggagcccggacgaaagggcgagaagggagagcctgcagatccaggaccgccaggagaaccgggaccacgcgggccccgtggggtaccaggccccgagggggagccaggacctcctggagatcccggtctgaccgaatgcgacgtgatgacatacgtgagggaaacctgtgggtgctgtgattgtgaaaagcgatgcggggctcttgatgtggtcttcgttatagattcctcagagagcattggatacaccaactttacactcgaaaaaaatttcgttatcaatgttgtcaaccgacttggagccattgccaaagaccccaagtccgaaacaggaacccgtgtaggagtagtgcagtactcacatgaaggaaccttcgaggcaattcaactagacgacgagaggatcgattctctgtcatcttttaaggaggccgtgaaaaatctagagtggatcgccggggggacctggaccccttccgcactcaagtttgcctacgaccgccttattaaagaatcgcggcgccagaaaacccgggtgtttgccgtagtgatcacagacggtagacacgaccctcgagacgatgacttgaacctgagagcgttatgtgaccgtgatgtgactgtcactgcgattgggattggagacatgtttcatgagaagcatgagagtgagaacctgtattccatcgcctgcgacaaaccacagcaggttcggaatatgacactgttcagcgatttggtggcagaaaagttcattgacgacatggaggatgttctttgccccgacccgcaaatcgtctgcccggatttaccatgccagacggagctgtccgtggctcagtgtacccagcgccccgtcgacatcgtcttcctgttagacggctcagaacgattgggagaacagaattttcacaaggcccggcgtttcgtagagcaggtggcccggcgcctaacactggctcgccgggacgacgaccctctgaacgctcgggtggctcttctgcagttcggaggacctggggaacagcaggtggccttcccactctcacacaacctcacggccatacatgaggccctagaaaccacgcaatatctgaactctttcagtcacgtcggcgccggcgtggtgcatgccatcaatgccatcgttagaagccctcgggggggcgcccgaagacacgcagagcttagcttcgtatttctgacagacggtgtgaccggtaatgacagccttcatgaatcagcccactccatgcgtaagcagaacgtcgtgcctacagtgctggccctgggatctgacgtggacatggatgtgctcactactctgagtctgggggaccgggccgcagtatttcatgagaaggactatgattctctggcccaacctggcttcttcgaccggttcatacggtggatttgttag

SEQ ID NO: 183473 - DNA, 2487 bp, synthetic construct
  misc_feature 1..2487: note = Description of Artificial Sequence: Synthetic coding sequence
  source 1..2487: mol_type = other DNA
atgctgcagggcacctgcagcgtgctgctgctgtggggcatcctgggagcaatccaggcgcagcagcaagaagtaatttctccagatacgacagagcgaaataataactgccctgagaaaaccgattgcccaatccacgtttactttgtgctggatacatctgagtccgtgaccatgcagagccccactgatattctcctcttccacatgaaacaattcgtgccccagttcatcagccagctgcagaatgagttctatctagaccaggtcgctctgagttggcgatatggaggactccacttctcagaccaggttgaggtgtttagcccacctggctccgatcgggccagcttcattaaaaatctacaggggattagctcatttaggcgggggactttcactgattgcgcacttgcaaacatgaccgaacaaatacgccaggatcgctccaaaggtacagtacactttgccgtggtaatcacggatggccatgtgacgggttcgccctgtggcggcattaagttgcaggccgagcgggccagggaagaagggattaggcttttcgcggtcgcgcccaatcagaacctcaaggagcaaggcttgagggatattgcttctactccccatgaactttatagaaacgactatgctaccatgcttccagattctaccgagatcgatcaggataccatcaaccggatcattaaagtgatgaagcatgaggcatatggcgagtgctataaggtcagttgtctggaaatccccggccccagcggcccaaagggatatcgcggccaaaagggtgccaagggaaatatgggcgagccgggggagcccggccaaaagggacggcagggcgacccaggtatcgagggccctatcggctttcccggccccaagggcgtgcccggtttcaaaggggaaaagggagaatttggcgccgacggccgcaagggtgctccaggtttggccggtaaaaatggaactgacgggcaaaaggggaagttaggccgaattggcccgcctggctgcaaaggggatccaggcaatagagggcctgacggctaccccggcgaggctgggagcccaggggagcggggtgatcagggtggcaaaggagatcccgggagacctgggcggcgcggcccacccggggagattggggccaagggatcaaagggataccaaggcaactctggggccccagggtcccctggcgtgaagggagcaaagggtggaccaggccccagaggtcctaagggggaaccagggcggcgcggtgatcctggaacaaagggatccccaggatctgatggtcccaagggagaaaagggggacccaggcccagaaggaccacgcggcctcgccggcgaagttggcaacaagggtgccaaaggggaccgaggtctcccaggcccccggggcccacaaggcgcactgggggaacctggcaagcaaggatcccgaggtgatcccggcgacgccggccctaggggggactccggccaaccaggtccaaaaggggaccctggccgtcccgggttctcctatcctggacctaggggtgctcctggcgaaaaaggcgagccgggcccaaggggtccagaaggcgggcgcggcgactttggactcaagggagagccagggaggaaaggtgagaagggggagcccgccgaccccgggccaccgggtgaacccgggccccgtgggcccaggggcgtcccgggtcccgaaggtgaaccaggcccacccggcgacccaggactgacggagtgcgacgtgatgacctatgtccgcgaaacatgtggatgttgcgactgtgaaaagcggtgtggtgcgctcgatgtggttttcgttattgattcctcagaaagtattggatacactaattttactctggagaagaatttcgtaatcaatgttgtgaatagactcggcgccatcgcaaaagacccgaaaagcgagacgggcactcgggtcggcgttgtgcagtattctcatgaaggaacctttgaggccattcagctcgacgatgagagaatcgactctctgtccagctttaaagaggcggtgaagaatctggagtggatcgccgggggaacatggacaccctccgcactcaaatttgcatacgatcggcttatcaaggaaagtcgacgacagaagactagggtgttcgccgttgtgatcacagatggccgacatgacccccgcgacgacgatctcaatctgcgggcactctgtgaccgagacgtgacggtgaccgccattggcatcggcgatatgtttcatgagaagcacgagtccgaaaatctttattctatcgcatgtgacaagcctcaacaagtgcggaacatgactttgtttagtgacttggtggcggagaaattcatagatgacatggaagacgtgctctgccctgatccgcaaattgtgtgtcctgatctgccgtgccaaacgggactggatggcgccgtgttatgttag

SEQ ID NO: 183474 - DNA, 2757 bp, synthetic construct
  misc_feature 1..2757: note = Description of Artificial Sequence: Synthetic coding sequence
  source 1..2757: mol_type = other DNA
atgctgcagggcacctgcagcgtgctgctgctgtggggcatcctgggggccattcaagctcaacaacaggaggttatttcacccgatactacagaacggaacaacaactgtcccgagaaaacagattgcccaattcatgtgtatttcgtcctggacacatctgagtcagtgaccatgcaatcaccgactgatattcttttgtttcatatgaagcagtttgtgccacagttcatctcccagctgcaaaacgagttttacctggatcaagtggcactctcttggcgctatggggggctgcactttagtgatcaggtggaagtcttttccccccccgggtctgaccgagcatcatttatcaaaaatttgcaggggatcagctcctttcggagaggcactttcaccgattgcgccctggcaaatatgacagaacagatccgacaggatcggagtaaagggacagtgcacttcgccgtggtcatcacagatggccacgtcaccggtagcccatgcgggggtattaaactgcaggctgagagggcgagagaggagggtatcagactctttgctgtggcacccaatcagaacctgaaggaacagggacttagagatattgctagcacccctcacgagttgtacagaaacgattacgcaacaatgcttcctgactcgacagagattgatcaggacactatcaacagaatcataaaggtgatgaaacacgaagcctacggcgagtgctataaagtgtcatgcttagaaatacctggccccagcgggccaaaaggctatagaggacaaaagggggcaaaagggaatatgggagagcctggagagccaggccagaagggtagacagggcgatccaggcattgaagggcccatcggctttcccggcccaaaaggtgtgcctggttttaaaggggaaaagggggagtttggcgcagacgggcgcaagggcgctcccggcctcgcgggcaagaacgggaccgatggccagaagggcaagttgggtcgtatcggaccgccaggctgcaaaggtgatcctggcaatcggggtcccgacggctatcctggcgaggcaggctctcccggcgagcggggcgaccagggtggaaagggggatccaggtcgtccaggccggcggggcccgccaggcgaaatcggcgcgaaagggtctaagggctatcagggaaactctggtgccccaggctcccccggagtgaagggagctaaaggggggccgggcccgcgcgggcccaagggggagcccggtaggagaggcgatcctgggactaaaggtagtccggggagcgacggtcccaagggcgaaaaaggcgacccagggcctgaaggaccaaggggtctcgccggtgaggtgggaaataaaggagctaaaggcgaccgcggcctgcccggacctaggggcccgcagggagcattaggggaacctgggaagcagggcagcaggggagaccccggtgatgcggggcctcgcggggatagcggccaacctggccccaagggagaccctggacggccaggcttcagctatccagggcctaggggcgcgcccggggaaaagggcgagccaggccccaggggcccagaaggcggaaggggcgacttcggcttaaagggcgagccaggcagaaaaggcgagaagggcgaaccggccgatcccgggccacccggtgagcccgggccacgtggacccaggggcgtcccaggccctgaaggggagcctgggccacctggggatcccgggctaacagagtgcgatgtcatgacgtatgtgagagagacttgcggatgttgcgactgtgaaaaaaggtgcggcgccctcgacgtggtgttcgtgatcgacagtagcgagtccatcggatacaccaattttaccctcgaaaagaatttcgtgatcaacgtcgtgaataggctgggagcaatcgctaaagaccccaagagcgagaccgggactagagtcggtgtcgtgcagtacagtcatgagggcacattcgaggcaattcagctggacgacgagaggattgacagtctgtcttcctttaaagaggccgtgaagaacctcgagtggatcgccgggggcacatggacccctagtgcattgaagttcgcttatgatcgactcatcaaggagtcacgtcgtcagaagaccagagtcttcgccgttgtgattacggacgggcgccacgatccacgtgacgacgacctcaacctgagggcactgtgcgatcgagacgtgaccgtgactgccataggtatcggcgacatgttccatgagaagcacgagagtgaaaatctttacagcatcgcttgtgataagcctcagcaggtgagaaatatgaccctattctctgatctggtggctgagaaattcatcgatgacatggaggatgtgctgtgcccagatccacagattgtatgcccagacttgccgtgtcagactgatgccccctggccagggggcgagccgccggtgaccttcctgagaacagaggagggaccggacgcaacgttcccccgtaccatcccgctaatccaacagctcctcaacgccacggaattgacccaggaccccgccgcatattcccagctggtcgcggttctagtctatacagctgagagagccaaatttgctacaggcgttgagaggcaagattggatggaattgtttattgacaccttcaaactggtccatagggatatagttggagaccctgaaacagccctggctttgtgctag

SEQ ID NO: 183475 - DNA, 2757 bp, synthetic construct
  misc_feature 1..2757: note = Description of Artificial Sequence: Synthetic coding sequence
  source 1..2757: mol_type = other DNA
atgctgcagggcacctgcagcgtgctgctgctgtggggcatcctgggcgcaatccaagctcagcaacaggaggtgatcagcccagatactacggagcgaaataataactgtcccgaaaagacagactgcccgatccacgtctatttcgtccttgatacgagtgaatccgtgacaatgcagagccccacggatatcctccttttccacatgaagcagttcgtgccacagttcatctcccagcttcagaacgagttctatctggaccaggtcgcactatcgtggcgatacgggggtctgcatttcagtgatcaggtggaggttttttcccctccaggttctgaccgggcatcttttatcaagaacctgcagggaatcagtagcttccgacggggtacgtttacagattgtgcgctggcgaacatgaccgaacaaataaggcaagacaggagcaaaggtaccgtccactttgctgtggttatcactgacggccacgttaccggctcaccctgcggcggcatcaaactccaggctgagcgcgctcgggaagaagggattaggctgttcgcagtcgccccaaaccagaatctcaaggaacaaggactgcgagatatcgcaagtaccccacacgagctgtatagaaacgactacgcgactatgcttcccgactccacagagatcgaccaggacactattaataggatcatcaaggtgatgaagcacgaagcatacggtgagtgctataaggtttcctgtctggagatcccaggcccctcgggccccaaaggttatcgtggccagaaaggggctaaaggcaatatgggcgagcccggggaaccaggccagaaggggcgccagggcgatcccggtattgaaggacctattggattccctggccctaaaggggtgccaggattcaagggcgaaaagggagaatttggagctgatgggcgcaaaggagctcctgggcttgccggaaagaatggcacagatggacagaaaggcaagcttggccggatcgggcccccaggatgcaaaggcgaccccggcaatagagggcccgacggctaccctggagaagccgggtctccaggagagagaggggaccagggcggaaagggggatccggggaggcctggccgaagaggccccccaggagagattggggccaagggctccaagggataccagggaaatagcggggcaccggggtccccaggagttaagggcgcaaagggagggcccgggcctaggggtcccaaaggagagccaggacggagaggtgaccctgggacaaaagggagccctgggagcgatggcccaaaaggggagaaaggagaccctggacctgagggtccacgaggcctcgccggtgaggtggggaataaaggggcaaagggcgaccgaggtcttccgggacctcgtgggcctcagggcgcattaggggaaccagggaagcaaggaagcaggggcgaccctggtgacgcaggtccaaggggcgattcgggacagcccgggccaaagggcgatcccgggaggcccggtttcagttatccgggccccaggggagcccctggcgagaaaggagagcccggacccaggggaccagaggggggccgaggcgacttcgggttgaagggcgaacctggacgaaagggcgagaagggcgaaccagctgatcccggaccaccaggcgagcccggacctcggggcccccgaggcgtgccaggacccgaaggcgaaccgggccctcctggggacccaggcttaacggagtgcgacgtgatgacttacgtaagggagacatgtggatgctgcgactgtgaaaagcgctgcggagctcttgacgttgtcttcgtgattgactcctcggaatcaatcgggtatacgaattttaccttggaaaaaaacttcgtgatcaacgtggttaacagactgggcgccatcgccaaggatcccaaaagcgagacgggcacccgggtgggggttgtgcagtattcccacgagggcacctttgaggctattcagctggatgatgagcgcattgattcactgtcttcctttaaggaagctgtcaaaaatctggagtggatcgccggcggcacctggactccaagcgctcttaagtttgcgtacgatcgactaattaaagaaagccgccgtcagaagacacgggtcttcgccgttgttatcactgacgggcggcacgatccgagggacgacgatctcaatctcagagccctttgtgacagggacgtcacagtgaccgccataggaataggggacatgttccatgaaaaacacgaaagtgaaaatctctacagcattgcctgcgataaaccacagcaggtacgtaacatgacactctttagtgaccttgtggctgaaaagttcatcgacgacatggaagatgtgctttgtccagatccacagatcgtatgtccagatctcccatgccagacagacgccccctggccgggtggagagccacccgtaaccttcctcagaaccgaggaaggcccggacgccacatttccgagaacaatcccactaatccaacagttattaaatgcaacagaacttactcaggatcctgctgcgtattcgcagctcgtcgccgtccttgtgtataccgctgaaagagccaaatttgcaaccggagtcgaacggcaggactggatggagctgttcatcgatacttttaagcttgtccacagggatattgtaggggaccccgagacagccctggctttatgctag

SEQ ID NO: 183476 - DNA, 2487 bp, synthetic construct
  misc_feature 1..2487: note = Description of Artificial Sequence: Synthetic coding sequence
  source 1..2487: mol_type = other DNA
atgctgcagggcacctgcagcgtgctgctgctgtggggcatcctgggcgccatccaggctcagcagcaggaagttatcagtcccgacacaactgaacgaaataacaactgtcccgagaagaccgactgtcctatccacgtctactttgttttggacacctccgagagcgtaaccatgcagtcccctacagatattctcctgttccatatgaaacagttcgtgccgcaatttataagtcaactccaaaatgagttctacctagaccaggtggcactgagctggcggtatgggggcctgcatttctccgatcaggttgaggtcttctcccccccaggttctgacagagcgtctttcattaagaatctgcaaggaattagttcatttcgcaggggcacctttaccgactgtgctcttgccaatatgactgaacaaatcaggcaggacaggtccaagggaacagtccacttcgccgtagttatcactgatggccacgtgaccgggtccccctgcgggggtatcaagcttcaagctgagcgcgctagggaggagggcattcgtctcttcgccgtggctccaaatcagaacctgaaagagcagggcttgcgggatatagcctccaccccacacgagctctatcggaacgattacgcgaccatgctccccgattccacagaaatcgaccaggatactatcaatagaatcatcaaggttatgaagcatgaagcctacggtgaatgttacaaggtgagttgcctagaaataccgggcccaagcgggccaaaggggtatcggggtcagaaaggcgctaagggcaacatgggggagcccggcgagcccggccaaaaggggcggcaaggtgaccctgggattgagggcccaatcggattccccggtccgaagggggtgccagggttcaaaggggagaagggggagttcggggcggacggcagaaagggggctcctgggctcgccggcaagaatggaactgacggccagaaaggcaagctgggcaggatcgggccacccggctgcaagggagatccaggaaaccgagggcctgacggttacccaggagaagcgggttcgcctggtgagagaggcgatcagggaggaaagggagacccaggaagacctggccggcggggtcctccaggcgagattggagccaaaggctcaaaggggtatcagggcaacagcggggccccaggatctccaggtgtcaaaggcgctaaaggcggacctggtccccgaggacccaaaggcgaaccaggcagacgaggagaccccggcaccaagggctctcccggaagcgacggtcctaaaggcgagaagggggacccaggccccgagggccctcgcggattggctggtgaggtaggtaacaagggcgccaagggcgacaggggacttccaggaccccggggaccacaaggcgctctgggcgagccagggaagcaggggtcccgaggagacccaggagacgcaggcccgagaggcgactctgggcagcccggccctaaaggggacccaggccgccccggtttctcatatccaggcccaaggggtgctccaggcgagaagggcgagcccggtcccagaggaccagaaggaggccggggagactttgggttgaagggagagccaggaaggaaaggcgagaaaggggagcccgctgatccaggacctccaggcgagcctggccctaggggcccaaggggggttcccggaccagagggcgagccaggcccccccggcgatcctggactcacagaatgcgacgtaatgacctacgtcagagaaacctgtggctgctgtgattgcgagaagagatgcggagctttggacgtggttttcgtgattgacagctccgagtccattggctacactaatttcactctggagaagaacttcgtcataaacgtggtgaacaggctgggcgccattgctaaggatccaaaatccgagacagggacccgcgtgggggtggtgcagtattcacacgagggcactttcgaggctattcagctcgacgacgaacgcattgatagcttgagctccttcaaggaggccgtgaaaaacttagagtggatcgccggcgggacctggacaccttcagcccttaaatttgcgtacgatcggctgattaaagagagtagacgtcagaaaacccgcgtgttcgccgtcgtcattacagatggtcgccacgatcctcgcgatgatgatctcaatttgcgggccttgtgcgaccgcgacgttaccgtgaccgccattgggatcggagacatgtttcacgagaaacacgagtctgagaatctgtactctattgcgtgcgataagccgcagcaagtccggaacatgactctcttctcagatttggttgcagagaaattcatcgacgatatggaggacgtcctgtgtccagacccccaaattgtctgccccgatctgccatgtcaaaccggactcgacggcgcggtgctgtgttag

SEQ ID NO: 183477 - DNA, 543 bp, synthetic construct
  misc_feature 1..543: note = Description of Artificial Sequence: Synthetic coding sequence
  source 1..543: mol_type = other DNA
atgctgcagggcacctgcagcgtgctgctgctgtggggcatcctgggagccatccaggcgcaacaacaggaggttatttccccggatacgaccgaacggaacaataattgtccagaaaagaccgactgtccaattcacgtgtatttcgtgttggatacttcagagagcgtgacgatgcagagtcccaccgatattcttctgttccatatgaaacagtttgttcctcagtttataagccagctgcaaaacgagttctatttggaccaggtggccctgtcttggcgctacgggggtctccattttagcgatcaggtcgaggtgtttagcccacccgggagcgatcgcgcctccttcataaaaaatctgcaggggataagtagttttaggcgcggaactttcaccgattgtgccctagcaaacatgacggagcaaattcgtcaggaccggtctaagggaactgtacacttcgctgtggtcattaccgacggacatgtgactggctcaccatgtggaggcataaaattacaagcggaacgggcctag

SEQ ID NO: 183478 - DNA, 2235 bp, synthetic construct
  misc_feature 1..2235: note = Description of Artificial Sequence: Synthetic coding sequence
  source 1..2235: mol_type = other DNA
atggccgtgctgcccggccccctgcagctgctgggcgtgctgctgaccattagcctgtcgtcaatccgcctgattcaggccggcgcatactatggcatcaagcccctgcctcctcagatccctccccagatgccaccccaaataccacagtatcaacccctcgggcagcaagtaccacacatgcctttagctaaggacggtcttgctatggggaaggagatgccccatctccagtacggcaaagaatacccacacctgccccagtatatgaaggaaattcagcctgcccctagaatgggaaaggaggcggtgcccaagaaaggcaaggagatccccctcgcctccctccgtggggaacagggacctaggggtgaacccgggcctcgaggccctcccgggcccccaggattacccggacatgggatccccggcatcaagggcaaaccaggtccccagggataccccggcgtcgggaaacctgggatgccaggcatgccgggaaagcccggcgctatggggatgccgggagccaagggcgaaatcgggcagaaaggcgagattggccccatggggatccccggcccacagggccctccaggaccgcatggcctgccaggaattggcaagccgggcgggcctggcctccctggtcagccagggccaaagggagatcgtgggcctaagggcctgccaggccctcagggcttacgagggcctaaaggcgacaagggctttgggatgcctggagcccctggggtgaaaggacctcccggcatgcatggcccgcccggccctgtggggctgccgggtgttggcaaaccaggggtgaccggctttcctggcccgcagggcccactcgggaagcccggtgctcctggagagcctggcccccagggaccaatcggggtgcccggcgtgcagggcccacctggtatccccggaatcggaaaacccggccaagacgggatccctggacaaccaggtttcccgggcggcaaaggggaacaaggcctgcctggtctgcccggtccccccggactgcctggcattggcaaacctggattcccaggcccaaagggcgatcgcggcatggggggtgtaccgggggctttgggaccacgcggcgaaaagggccccatcggtgcaccaggtattggcggccccccaggggaaccaggcctgcccggaatcccgggacctatgggcccacctggcgcgattggcttcccaggccccaaaggtgagggagggattgtggggccccaggggcctcctgggccaaagggcgagcccggactgcagggcttcccaggcaaacctggcttcctaggcgaagtaggccctccaggcatgagagggctgccaggacctattggtccaaagggagaggccggccagaaaggtgtccccggactcccgggggtgcccggcctgctggggcccaagggagagcccgggattccgggagaccaaggtctccagggccctccaggcattcctgggatcggcggacctagtggccccatcggaccacccggtatacctgggcccaaaggagaacccggtctaccagggcctcccggctttccagggatcggcaaaccaggtgtggctggtttgcacgggccccccggcaagccaggcgccctggggccgcagggacaaccaggcttgccagggcccccaggcccccccgggcctcctgggccaccggctgtgatgccccccacaccacccccacagggcgagtacttacccgacatgggcctaggtatagacggagttaaacccccacatgcctatggcgccaaaaagggtaaaaatgggggcccagcctacgaaatgccagccttcactgccgagttaacagcgccattcccccccgtgggtgcccctgtgaaatttaataaactcttgtacaacggcaggcagaactataaccctcagaccggaatcttcacatgcgaagtaccaggtgtgtactactttgcttaccatgtacattgtaagggaggcaacgtctgggtcgcccttttcaaaaacaacgagcctgtgatgtacacctatgacgagtataaaaaaggattcttagaccaagcatccggcagcgccgtgctcctcctccgccccggggatagagtttttctgcagatgccgtcagagcaggccgccggcctttacgctggccagtacgtgcactcaagcttctccgggtatttgctatatccaatgtag

SEQ ID NO: 183479 - DNA, 2235 bp, synthetic construct
  misc_feature 1..2235: note = Description of Artificial Sequence: Synthetic coding sequence
  source 1..2235: mol_type = other DNA
atggccgtgctgcccggccccctgcagctgctgggcgtgctgctgactattagcctttctagtatcagacttatacaagctggggcgtactacggtatcaaaccgctacccccacagattcctccccagatgcccccccaaattcctcagtaccagcctttggggcagcaagtgccccatatgccgctggccaaagatggcctcgctatgggaaaggagatgcctcacctccagtatggcaaagagtatcctcatctgccacagtacatgaaagagattcagcccgcacctaggatgggaaaagaggcggttccaaagaagggaaaggagattcctctcgcatctctgcgtggcgagcagggtcctcgcggcgaacctgggccccggggcccacccggaccacctggcctgcctggtcacggcatcccaggcattaaaggtaagcctggacctcaggggtaccccggggtgggcaagcccggcatgccgggtatgcccggaaaaccgggggcaatgggcatgcctggtgctaagggtgagatcgggcagaagggagagatcgggccaatggggatccctggtccccaggggccacctggacctcacggactgcccggaatcggcaagccaggcggcccaggcctcccgggccagccaggtccaaaaggtgaccggggacccaaagggctcccagggccccaaggactacgaggaccaaaaggggataagggcttcggaatgccgggagccccaggggtcaagggcccccctggcatgcacgggccaccaggccccgtggggctgcctggggtgggtaagccgggagtcaccgggttccctggtcctcagggaccccttggcaaaccaggcgcccctggcgaaccgggaccacagggcccaatcggtgtcccaggcgtgcagggcccccccggcattcccggcattgggaagccaggccaggatggcatccccggtcagcccggcttcccaggaggcaaaggagagcagggccttcctggccttcctggacccccaggactcccaggaatcggcaagccgggcttcccaggcccaaaaggtgatcgcggcatgggaggagtaccaggcgccctggggcctcgaggcgagaagggtccaatcggggccccgggcattggtggtccacccggcgaacctgggcttcccggaatccccggaccgatgggcccgcctggagctattgggttcccgggacctaagggtgagggtggaattgtgggcccacaggggcctcccggacctaagggggaacccggcctgcagggattccccgggaaaccaggattcctcggcgaggtgggccctccaggcatgaggggacttcccggtccgatcggcccgaagggtgaggctggacaaaagggcgtacctggactgcccggagtgccaggtctgctggggcctaagggagaaccgggcattcccggcgaccaaggcctccaggggccaccaggcatccccggcataggggggccctccgggcctatcggtcctcctggcatcccgggacctaagggtgaaccggggctaccaggccctcctggctttccaggcattgggaagcctggtgttgccgggctccatgggcctcccgggaagccgggcgcgctgggcccccaaggtcagcccggactgcccggaccccctggtccccccggaccccctggtccaccggcggtgatgcccccaacccctccgcctcagggtgagtacttaccagacatgggcttgggtattgatggcgtcaagccccctcacgcctatggcgcaaaaaagggtaagaatggtgggcctgcatacgagatgccagcgtttaccgccgaactaacagcgccctttccgcctgtcggagctcccgtcaagttcaacaagttgctctacaacggaagacaaaactataatcctcagacaggaatcttcacctgcgaagtccccggtgtgtattactttgcctatcacgtgcactgtaaaggcggaaacgtctgggtcgccttattcaagaacaatgagccggtgatgtatacatatgatgagtacaagaagggtttcctggaccaggcctcaggctccgcggtccttctgctccggcccggagatagggtgttcctgcaaatgccctccgaacaggcagctgggctttatgccggacagtatgttcactctagtttctctggctatctcctgtatccaatgtag

SEQ ID NO: 183480 - DNA, 345 bp, synthetic construct
  misc_feature 1..345: note = Description of Artificial Sequence: Synthetic coding sequence
  source 1..345: mol_type = other DNA
atggccgtgctgcccggccccctgcagctgctgggcgtgctgctgaccattagtctgagttccattagacttatccaagcgggagcgtattatgggataaagcccctgcccccgcagatacccccccagatgcctccgcagattccccagtatcaacccctagggcaacaggttcctcatatgccactggcaaaagacggccttgccatgggcaaagagatgccccacctccagtacggcaaagagtatccacatctgccacagtacatgaaagagatacagcccgccccccgaatggggaaggaggctgtaccaaagaagggaaaagagatccctctcgcctag

SEQ ID NO: 183481 - DNA, 2061 bp, synthetic construct
  misc_feature 1..2061: note = Description of Artificial Sequence: Synthetic coding sequence
  source 1..2061: mol_type = other DNA
atggtggccgagcggacccacaaggccgccgccaccggcgcccgggggcccggagagctcggtgccccgggaacagtagcgctggtggctgctcgcgctgagaggggggcccgacttccttcacctgggtcctgcgggctgctgaccttggccctctgctctttggctttgagcctgttggcgcattttcgaactgcagaactgcaagctcgggttctgcgccttgaagccgagagaggggaacagcagatggaaaccgcgatcctgggacgagtcaatcagctgcttgatgagaagtggaagctgcattcacgccggcggcgtgaagctccaaaaacttctcctggatgtaactgccccccgggaccgcctggtccaacaggaagacctggcctgcccggagacaagggcgccattggcatgccaggccgcgtcgggtcgcccggcgacgcgggtctctccattatcgggccccggggccctcctggtcagcccggaactcgcgggttccccgggtttcccggacctatcgggttagacggaaagcccggccatcctggtccaaaaggcgacatgggactgacggggccgccaggacagcccggaccacagggtcagaaaggcgagaaaggccagtgcggagagtacccacatagacttttacccctacttaattccgtacgcctggctccaccccccgttatcaaaagacgaacattccagggagagcaatcacaagcctccattcagggcccacctggccctccaggccccccagggcccagcggccccctcggccaccctggactgcccggcccaatgggtcctcctggcttgccaggtcccccaggtcctaaaggcgacccaggtattcagggttaccatgggcgcaagggcgagagggggatgcccgggatgcccgggaagcatggagcaaagggagctccaggcatcgccgttgctggcatgaagggcgagcctggtattcccggtactaagggcgagaagggcgctgagggctctcctgggctgcccggcctgctggggcagaagggcgaaaaaggcgacgcaggtaatagcatcggcggcgggcgtggggaacctgggcctcccggtctcccgggcccccctggcccaaagggagaagctggcgtggacgggcaggttggccctcccgggcaacctggcgacaagggcgagaggggcgccgcaggcgaacaaggtcctgatggccctaagggttccaagggagaaccaggtaaaggagaaatggtcgactataacggaaatattaacgaggccctgcaggagataagaaccctggcactgatggggcccccggggctgccaggacagatcggccctccgggcgctcctggaatccctggacagaagggcgagatcggactccccggcccccccggacatgatggggaaaaaggccctcggggtaagccaggtgatatgggccccccgggcccacaaggcccaccaggtaaggatggaccccccggagtcaaaggtgaaaacggccatcccggcagccctggagagaaaggggaaaagggtgagacaggacaggctgggtcccccggtgagaagggcgaagcaggggagaaaggcaatcccggtgccgaagtgccagggctgcccggcccggaaggacctcccgggcccccaggtctccaaggcgtgcccggcccaaagggggaggctgggcttgatggcgcaaaaggcgagaaaggtttccagggtgagaagggggaccgtggtcccctgggcctgcctgggacacccggacccataggggtccctgggccagccggacccaaaggagaacgcggtagtaagggcgaccccggtatgaccgggcctaccggtgccgccggtcttccgggcctccatgggccccctggagacaagggtaatcgcggcgagagaggcaagaagggctccaggggaccaaaaggagataagggcgaccaaggggcgcccgggttggacgcaccttgtcccctgggcgaggacggattgcccgtgcaggggtgttggaataaatag

SEQ ID NO: 183482 - DNA, 1338 bp, synthetic construct
  misc_feature 1..1338: note = Description of Artificial Sequence: Synthetic coding sequence
  source 1..1338: mol_type = other DNA
atgaccggcagcagcttcagcctggcccacctgctgatcatcagcggactcctgtgctattcggccggctgcctggcgttgcctagcctcgaccagaagaagaggggcgggcacaaagcctgctgcttgctcacacctccacctcctccccttttccccccacccttctttcggggtggccggtcccccctgctctcacccgacatgaaaaacttgatgctggagttggagacttctcagtccccttgtatgcagggctccctgggtagtccaggtcctcctggaccacagggaccacctggcttgcccggtaaaacaggtccgaagggagagaagggagagctcgggcggcccggcagaaagggccggcctgggcccccgggtgttccgggaatgcctggacccatcggctggccggggcccgaaggaccgcgtggagaaaagggggatcttggaatgatgggccttcctggcagtaggggtcctatgggctctaaagggtacccaggcagcaggggcgagaagggttctaggggcgagaagggggacctaggacctaaaggcgagaagggtttcccgggatttccagggatgttgggccagaaaggggagatggggccaaaaggggaaccagggatcgctggtcaccgaggcccaaccggccgaccagggaagcggggtaagcagggccagaagggggattctggtgtgatgggacccccaggaaaacctggaccatccggacagccaggacggccaggccctccaggacccccgcctgccggccagctcattatgggacccaaaggagaaagagggtttcccggccctccgggacgctgtctgtgtggtccaaccatgaatgtgaacaatccctcatatggagaatcagtctacggaccatcaagccctagagtgccagtgatatttgtagtgaataaccaggaagagctcgaacggttaaacacgcagaatgctattgcttttcgtcgcgaccagcggtctctttacttcaaggatagtcttgggtggcttccgattcaattgacaccattctaccctgtggattacaccgccgaccagcacggcacctgcggagatgggctgctacaaccaggggaagaatgcgatgatggtaattccgatgtaggggatgactgcattcgctgtcacagggcatattgcggcgatgggcaccgccatgaaggcgtggaagattgcgacgggtccgacttcggctacctgacttgcgaaacttatctgccagggtcttacggggacctgcagtgcacccagtactgctacattgactcgaccccctgccgctactttacttag

SEQ ID NO: 183483 - DNA, 876 bp, synthetic construct
  misc_feature 1..876: note = Description of Artificial Sequence: Synthetic coding sequence
  source 1..876: mol_type = other DNA
atggtggtgctgaaccccatgaccctgggcatctacctgcagctgttcttcttaagcattgtatcccagcctaccttcatcaattctgtgctgcctatttccgctgctctgcccagtctcgaccaaaaaaagaggggaggacataaggcctgttgcctgctgacacccccccccccacctctattccctcctccctttttccgcggaggacggagtccactactctctcccgacatgaagaacctgatgctggagctggaaacctcccagtccccatgtatgcaggggagtctggggtcccccggaccccctggccctcaaggcccgcccggcctgccaggcaagacaggaccaaaaggcgaaaagggagaactggggcgtcccggccggaagggtcgccctggaccgccgggagtgcctggaatgccggggcccatcggatggccgggacccgaaggcccgcggggtgagaagggggacttgggtatgatgggcttgccagggagtcgaggccccatggggtccaaaggataccccggttcccgcggtgaaaagggtagtcgtggcgaaaaaggggacttgggcccaaagggcgaaaagggatttcccgggttccctggtatgctcggccaaaagggcgaaatgggcccgaagggcgaacctggaatcgcaggccacaggggtccaaccggccggcctggcaagagaggcaagcagtcatcacgcactccttgtaccttaccccggcgacctcccgtgccatgtggccaggggagcagatctccggtcactgtcgttgccgggaaggaatctcaagcttgcctgttgccgaggtttgaggaggattacattagtagcggaaccgaacgcggctag

SEQ ID NO: 183484 - DNA, 1266 bp, synthetic construct
  misc_feature 1..1266: note = Description of Artificial Sequence: Synthetic coding sequence
  source 1..1266: mol_type = other DNA
atggtggtgctgaaccccatgaccctgggcatctacctgcagctgttcttcctctctatagtcagtcaacctactttcatcaactctgttctgcccattagcgccgccctgccaagtctcgaccagaagaagagagggggacacaaggcctgttgtctcctgacccccccacctccccccctgtttccgcctccattttttaggggcggaaggagtcccgggccccctggactgcccggcaagacaggtccgaagggtgagaaaggagagctgggacgccccggtcgcaaagggcggcccgggcccccaggggtgcccggcatgccaggaccaattggatggcccggtccggaaggtccacggggcgagaagggcgaccttgggatgatggggctacctggctctagggggccaatgggctccaaaggttatcccggctctcggggggaaaaggggtcccggggggagaagggcgatctgggaccaaagggggaaaaaggatttccaggctttcccggcatgctgggccagaaaggagaaatggggcccaagggtgagcctgggattgctggtcaccgcggcccaaccggccggcctggcaaaagaggtaaacaggggcagaaaggcgacagcggggtgatggggccaccggggaaacccgggccttccggacaaccaggcagaccggggccaccaggacccccacccgccggacagttgatcatgggcccaaaaggagagcgtggcttcccaggacccccaggcaggtgtctgtgtggccctaccatgaacgtgaacaacccgtcatatggggaaagcgtctacggtccttctagtccgcgcgtgcctgtaattttcgtggttaataatcaggaggagctggagaggctgaacacgcaaaacgccatcgcattccgcagagatcagaggagcctctactttaaagactctctcggttggctccccatccagctgacacctttctaccctgtcgactataccgccgaccagcacggtacctgcggtgacggtctgctgcaaccaggtgaagaatgcgatgacggcaattctgatgtgggcgatgattgcattcgctgccaccgcgcctactgcggtgacggtcataggcacgaaggggtcgaagactgcgatgggtccgacttcggctacctcacctgcgaaacatacctgccaggtagctacggcgatttgcagtgcacacaatactgctacattgactccactccgtgtcgatatttcacctag

SEQ ID NO: 183485 - DNA, 1341 bp, synthetic construct
  misc_feature 1..1341: note = Description of Artificial Sequence: Synthetic coding sequence
  source 1..1341: mol_type = other DNA
atggtggtgctgaaccccatgaccctgggcatctacctgcagctgttctttctatctatagtctcccagcccacattcataaatagcgttctgccgatatctgctgccctaccttcgctggatcagaagaagcggggtggccataaggcctgttgcctgctaacaccacctcctccccccttgttcccccctccatttttccgcggaggccgatccccgctgctttcccccgacatgaagaacttaatgctggagctggagacatcccagtctccttgtatgcaaggaagtctcggttcacctggcccacccggaccacagggtcccccgggacttccagggaaaaccggacctaagggtgaaaaggggagaccgggtccgcccggtgtgcccggcatgcctggacctattgggtggccgggacccgaaggccccaggggagaaaaaggggacctggggatgatgggtcttcctggttcccgtggcccaatggggagcaaaggatacccagggtcccgtggtgagaaagggtctcgcggggagaaaggagatttaggccctaaaggggaaaaagggttccccggcttcccagggatgctgggccagaagggcgagatgggaccgaaaggagaaccaggaattgctgggcatcgcggacccaccggccggcctggcaagagaggtaagcaggggcagaaaggcgattctggggtgatgggtcctcccgggaaaccgggccccagcgggcagccagggcgccctggcccccctggcccccctcctgccggtcagctcatcatgggccccaagggtgagcggggattccctggtccgcccggcaggtgcctgtgtggaccaacaatgaatgtcaataatccttcatatggcgagagtgtctacggacccagctcaccaagagttcccgtgatttttgtggttaataatcaggaggagttggaacgccttaacacgcaaaacgcgatcgcctttcggcgggaccagcgctcactgtactttaaggactctctgggctggctgccaattcaattaaccccattctatcctgttgactacacagcagatcagcatgggacctgtggcgacggcctactccagcctggcgaagagtgcgacgatgggaactctgatgttggtgacgactgtattcgctgtcaccgggcttactgcggcgacggacatcgacatgaaggcgtggaggattgtgacggatctgacttcgggtatctgacctgtgaaacatatttgccgggcagttacggggaccttcagtgtacacaatattgttacattgacagtaccccctgtcgatacttcacatag

SEQ ID NO: 183486 - DNA, 1368 bp, synthetic construct
  misc_feature 1..1368: note = Description of Artificial Sequence: Synthetic coding sequence
  source 1..1368: mol_type = other DNA
atggtggtgctgaaccccatgaccctgggcatctacctgcagctgttcttcttatccatagtatcacagcctacttttatcaacagcgtgctgccaatctccgctgctctaccatcactcgatcagaaaaagcgaggaggccataaagcctgttgccttctgactcccccgcctccccccttgttcccacctcctttctttcggggaggccgaagcccgttgctgtctcccgacatgaagaacttaatgcttgagctggaaacgtcccagtcgccctgcatgcaaggcagcctcggatcacctggccccccagggccgcagggtccacccgggctcccaggcaaaacagggccgaaaggagaaaagggcgaattagggagacccgggaggaagggcaggcctggtcccccaggggtcccagggatgccgggccccattgggtggcctgggcccgagggccctagaggggagaagggtgatctgggtatgatggggctacccggctcccgcggaccaatgggctccaagggctaccccggaagccgcggggagaaaggatctaggggcgagaagggagatctgggtccgaagggtgaaaaaggcttccctggcttcccgggcatgctgggacagaagggcgagatgggccctaagggggagcccggcattgcgggtcataggggacctaccggcagacctggaaaacgcggaaaacagggtcaaaagggcgacagtggggtcatgggacctccagggaaaccaggccctagtggccaaccaggccgccctggacccccgggccccccacctgccggacagctcattatgggtcccaaaggggagagaggattccccggacctccaggacgttgcttgtgtggccctaccatgaacgtaaacaacccttcctatggggagagcgtctatgggcccagtagtccgagagttccggtgatatttgttgtgaataatcaggaagagttagaacgccttaacacacaaaatgcaattgcctttcgtcgggaccagcggagtctttatttcaaagactcactgggctggctgccaatacaactgacaccattttaccctgtggactacaccgccgaccagcacggaacgtgcggagacggactcctgcagccaggagaggaatgcgacgacggtaactctgacgtcggcgacgactgtatcagatgccaccgtgcgtattgcggtgacggtcacaggcacgaaggagtcgaggactgcgacggttctgactttggctatcttacctgcgagacttacctacccggcagttatggcgatttacagtgcactcagtattgttacattgacagtacgccatgccgctacttcacgtag

SEQ ID NO: 183487 - DNA, 1338 bp, synthetic construct
  misc_feature 1..1338: note = Description of Artificial Sequence: Synthetic coding sequence
  source 1..1338: mol_type = other DNA
atgaccggcagcagcttcagcctggcccacctgctgatcatcagcggtttgctctgttatagcgccggctgcctggctcttccctccttggatcagaagaagcgcgggggtcacaaagcctgctgcttactgacacccccaccgccccctttatttccaccaccatttttcagggggggcagaagcccgctcctcagtcccgacatgaaaaatctcatgcttgagcttgaaacctcccagtctccgtgtatgcaggggtccctcggcagtccaggaccgcctggcccccagggcccacccggtctgcccgggaagacagggccaaagggtgagaaaggtgagctgggtcgcccaggacgaaaaggcaggccaggacccccgggcgtcccagggatgccaggacccatcgggtggccaggaccagagggccccaggggcgagaagggggatctggggatgatgggcctccccggcagccgcggtcccatgggctccaaggggtatcccggcagcaggggcgaaaaggggtcccgcggcgagaaaggcgatctcgggcccaaaggcgagaagggctttcctggcttccccggcatgctgggccagaagggcgaaatgggccccaagggggagccaggcatagcgggacatcgtggccccacgggccgacctgggaaaagaggaaagcaagggcagaagggggactccggcgtaatgggaccccccggtaagcccggaccatctggtcagcccgggcgaccgggccccccaggcccacctccagcgggccagttgattatgggccctaaaggggagagggggtttcctgggccccccggacgatgcctatgcggacccaccatgaatgtgaataacccttcgtatggggagtctgtttacgggccctcttcgcctagggttcctgtgattttcgtagtgaataatcaggaggagctggaaagactcaatacgcagaacgctatcgcttttagacgagaccagaggtcactgtactttaaagactccttgggctggctgcctatccagctcacaccgttttatcctgtggactacactgctgatcaacatggaacttgtggcgatgggttactgcagcctggtgaggagtgtgacgacggcaattcagacgtcggagatgattgtatcagatgccacagagcctactgtggagatggccaccgccatgaaggggtggaggactgcgacgggtccgactttggatacttgacgtgcgagacctacctccccgggtcttacggtgatctccaatgcacccagtactgctacatcgattctacaccttgcagatatttcacctag

SEQ ID NO: 183488 - DNA, 585 bp, synthetic construct
  misc_feature 1..585: note = Description of Artificial Sequence: Synthetic coding sequence
  source 1..585: mol_type = other DNA
atcagcggcctgctgtgctacagcgccggctgcctggccctgccctcattggaccagaagaagcgggggggccacaaagcttgttgccttttaaccccacctccccccccactttttcctccaccattcttccggggcggtagaagtcctgggcctcccggcctccccggcaagactggccctaaaggagaaaagggcgagttgggtagaccaggtagaaagggcaggcccgggcccccgggcgtgccaggaatgcccgggcctattggttggcccggccccgaaggcccacgtggagaaaagggtgacctgggaatgatgggtctgcccggcagcaggggtccgatgggctcaaaaggatacccagggtctaggggtgagaagggctccagaggagaaaaaggcgacctagggcccaaaggagaaaagggattccctggatttcccggaatgctcggacagaaaggagagatgggtccgaaaggtgaacccggaatcgcaggacaccgtggccccacaggaaggcctggtaaacgggggaagcagggccagaagggcgactcgggcgttatgggcccaccctag

SEQ ID NO: 183489 - DNA, 1338 bp, synthetic construct
  misc_feature 1..1338: note = Description of Artificial Sequence: Synthetic coding sequence
  source 1..1338: mol_type = other DNA
atgaccggcagcagcttcagcctggcccacctgctgatcatcagcgggttgctgtgttactcggcgggttgcttagcgttgccaagccttgatcagaagaaacgcggcggtcataaggcttgttgtcttctcacgccaccacccccgcctctgttcccacctcctttttttagaggcgggagatccccccttctgtcccccgatatgaaaaatctcatgcttgagctcgaaactagccagagcccctgtatgcagggatccctcgggagtccaggccctccaggaccccaaggaccacccggactgccggggaaaacaggacctaaaggcgagaagggtgaactcgggcgacctggccgcaagggccggcctgggccgccaggagtacccggtatgccaggacccatcggttggccaggccctgagggaccaaggggtgagaagggggatcttgggatgatgggattaccaggaagcaggggacccatgggtagtaagggctaccctggtagcaggggggagaaaggttctagaggcgaaaagggcgacctaggtcccaaaggtgagaagtgtaacccattgctcctcttgttcccttctttccaaggtgagatgggccccaaaggggaaccgggcatcgccggacacagaggtcctacaggtagaccagggaagcggggcaaacagggtcagaaaggggacagcggtgtcatgggccctcccgggaaaccaggtccttctgggcagcccggtagacctggaccgcccggccccccacccgctggtcagttgataatgggccccaagggggaaagagggtttccaggacccccgggccgatgtctttgtggccctactatgaacgtcaataatccatcttatggagaaagtgtgtatggacctagttctccaagagtgccagtcattttcgtcgtgaacaaccaggaagagctggaacggttgaacacccaaaatgcaatagcgttcagacgtgaccagcgatccctatacttcaaagacagcctgggctggctgccaatccagctgacgcccttttatcccgttgattacactgctgaccagcacggcacatgcggcgacggcctactccagcctggggaggagtgcgacgacggtaactctgatgtcggagacgattgcatccggtgccacagggcttattgcggagatgggcataggcacgaaggcgttgaggattgtgacggatccgatttcggatatctgacctgcgaaacgtacctccccggctcctacggagacctgcagtgtacacagtattgttacatcgattcaacaccgtgcagatatttcacgtag

SEQ ID NO: 183490 - DNA, 2061 bp, synthetic construct
  misc_feature 1..2061: note = Description of Artificial Sequence: Synthetic coding sequence
  source 1..2061: mol_type = other DNA
atggccgaccggcggcgggcctggaacaccgaggacgacctgcccgtctatctcgccagaccaggctcagccgctcagacccctcggcaaaagtacggaggcatgtttgctgcagtcgaaggggcctatgagaacaagaccattgacttcgacgcctactccgtgggccgtcgaggctcagcccggaccccgagaagtgcgggtagaccagacgcagtgggcctgcccgggccaggcggttctgaagacaccgcttccgacgtctccgaacctagtggctctgcggtgtcatcgcctggggagagagacgaacggcctcccaccctccgcatacggagaccagcaccccgagacctcccactgggcagagacaacgggcagtcggatcggctgttgatcaagggtggcaggatcatcaacgacgatcagtccctgtatgctgacgtctatctggaggacggactgatcaagcaaatcggagaaaatctgatcgtcccgggcggagtaaaaacgatagaggccaacgggaggatggtgatccccggaggaatagacgtgaacacttatctccagaagcccagtcagggaatgactgccgctgatgatttctttcaggggacaagagcagcactggtcggcggtacaacgatgataatagaccatgtcgttccagagcccggttccagcttactaacctcattcgaaaaatggcatgaggctgctgacactaagtcctgctgtgactacagtttgcatgtcgatattactagttggtatgacggggtgcgggaagaactggaagtcttagtccaggacaaaggagtcaactctttccaagtatatatggcctataaagacgtctatcagatgtccgattcccagctctacgaagccttcactttcctgaaggggctcggggccgtaatattagttcacgccgaaaatggggacctgatcgcccaagaacagaaaaggattctggaaatgggaataacgggccccgaggggcatgcattaagtcggcccgaggaacttgaggccgaagctgtgtttcgggcaataacaatcgccggacgcatcaactgtccagtatacatcaccaaagtgatgtcgaaaagcgcggcagatattattgccttggccaggaagaaaggaccattggtctttggggagcccattgctgcttccctcggcaccgacggcactcattattggagcaagaattgggcgaaagctgcagcattcgttacctctccacccctctcccctgatccaaccacacctgattacttaactagcctgttggcctgcggcgatttgcaggtgactgggtccggccactgtccatactcgaccgcacagaaggccgtggggaaagataactttactttaatacctgaaggcgtgaatggaatcgaggaaagaatgaccgtggtgtgggacaaagccgtggcgactggaaagatggacgaaaaccagtttgtggccgttacctcgactaatgctgccaaaatctttaacctatacccccggaagggaaggattgcggtcgggtccgacgctgatgtggtgatctgggatccggacaaactgaagaccatcacagcgaagagccataagagtgccgtcgaatacaacatctttgagggtatggagtgccatgggagcccgctcgttgtgattagtcaagggaaaattgtttttgaagacgggaatattaacgtgaataagggtatggggcggtttatcccacggaaggcctttccggagcatttatatcagagggtgaagatccggaacaaggtctttggactgcaaggcgtgtccagaggtatgtatgatggccctgtgtacgaggtgcccgccacccctaaatatgcaacccctgcccctagcgcaaaatcctccccgtccaagcatcagccacctccgatccggaacttgcaccagtcaaacttttcactgtctggagcccagatcgacgataacaacccacgaaggaccggacatcgtattgtagcccccccaggggggcggtccaatattacctcattggggtag

SEQ ID NO: 183491 - DNA, 1719 bp, synthetic construct
  misc_feature 1..1719: note = Description of Artificial Sequence: Synthetic coding sequence
  source 1..1719: mol_type = other DNA
atgagctaccagggcaagaagagcatcccccacatcaccagcgacaggcttcttataaaaggcggtcgtataatcaatgatgaccaatcactttatgccgatgtgtatctcgaggacggcctaatcaaacaaattggggagaatctgatcgttcccggaggcgtcaagacgattgaggctaacggaaggatggttatccctgggggtatcgatgtgaacacctacctgcagaagccgtcacaggggatgactgctgcagatgattttttccagggaacccgggctgccctggtgggcggtacaactatgatcatcgatcacgtggtaccggagcccgggagtagcttgttaacttccttcgaaaaatggcatgaggctgccgacactaaaagctgctgcgattacagtttgcatgtggacattacatcctggtacgatggcgtgcgggaagagctggaggtgctagtgcaagacaaaggcgtgaattctttccaggtttatatggcatacaaagacgtctaccagatgagtgactctcagttgtatgaagctttcacgtttctaaaagggctgggcgccgtgatactcgttcatgcagagaatggcgatctgatcgcccaggagcagaaaagaattctggagatgggcattaccgggccagaaggtcatgcactgtcacggcctgaagaactagaggcagaggccgtgtttagggccataactatcgccgggcgcattaattgtccagtctatatcactaaggtaatgtccaaaagcgccgccgacataattgccttagctaggaagaaaggaccactcgtatttggtgaaccgattgctgctagcctgggtactgacggaacacactactggtctaagaattgggcaaaagctgccgccttcgtaacatccccacctttaagtcctgaccctacgacaccggattacctgacttctctgctggcttgtggtgacctccaggtgactggaagcggtcactgtccttatagcacggcacaaaaggccgtcggtaaggacaactttaccctcattccagaaggtgtaaacggaatcgaggaaaggatgaccgtcgtttgggataaggctgtggccacgggaaaaatggacgaaaatcagttcgtcgccgtgacgtctaccaatgccgctaagatctttaacctgtatcccagaaagggaagaattgccgtaggaagcgacgccgatgttgtcatctgggacccggacaagttgaagaccatcacagcaaagagccacaaaagtgcggtggagtacaatatcttcgaaggaatggagtgtcatgggtcacccctggtggttatcagtcagggcaaaattgtattcgaggatggtaacatcaacgttaataagggcatgggaagattcatcccacggaaggctttcccagagcacctctaccagcgggtgaaaatccgtaacaaggttttcggactgcagggggtgtctcggggcatgtacgatgggccggtgtacgaagtgccagccactcccaaatatgcaacccccgccccgagtgccaaaagctcgccctcaaagcatcagcctccccccatacggaatttgcatcagagcaacttttccttatcaggcgctcagatcgatgacaacaatccgcggaggaccggccatcgcatagttgccccccccggagggaggtccaacataacatcccttggctag

SEQ ID NO: 183492 - DNA, 1713 bp, synthetic construct
  misc_feature 1..1713: note = Description of Artificial Sequence: Synthetic coding sequence
  source 1..1713: mol_type = other DNA
atgcagaagatgaacaacgaggtggtggacaagagcgaccggctgttgatcaaaggaggcaggatcattaatgatgatcaatccttgtacgccgacgtgtacctcgaagacggactgatcaaacaaattggcgaaaacctgatcgtgcctggcggtgtgaagactatcgaggccaacgggcgcatggtgattcctggcggaatcgacgtcaatacgtacctgcaaaaaccttcacagggaatgacggctgctgatgacttctttcagggcactcgcgccgccctggtaggtggtaccactatgatcatagaccacgtagtgcctgagcctggatcgtcccttctcacttcgtttgagaagtggcacgaagccgcagacaccaaatcctgctgtgattactcccttcacgtggatataacaagttggtatgatggagttagagaagaactggaagtgctcgtccaggataagggcgtcaattctttccaggtctacatggcctataaggatgtgtaccagatgagcgacagtcaactgtacgaggcctttactttcctcaaaggactgggggccgtgatcctggtgcacgccgagaatggtgatttgatagcccaggagcagaagcggatattagaaatgggtatcactggaccagaaggacacgcactgagtcgccctgaggagctcgaggcagaagcagtgtttcgcgccattactatcgctggacgcattaactgccccgtatacattaccaaagtcatgtctaaaagcgctgccgacatcatagcacttgctcgtaagaagggccctctggtttttggagaacccattgcagcgtccctgggcaccgacggtactcattattggagcaagaactgggccaaagccgccgcttttgttacttcaccccccttatcgccagatcccactacaccagactacctgacaagcctgctggcgtgtggtgacctacaggtaactggttccggccactgcccatactctaccgcacagaaagccgtgggaaaggacaatttcacgctcatacccgaaggggtcaacggcattgaagagagaatgactgtggtgtgggataaggccgtggccacgggaaagatggatgagaaccagttcgtcgccgtcaccagcactaatgctgccaagatattcaacctgtatcctcgaaaggggcggatcgccgtcggatcagacgcagatgtggtgatttgggaccccgacaaactgaagacgattacggccaagtctcataaatctgcagtggagtacaacatctttgaaggcatggagtgccatggcagccctttagtcgtgattagccagggaaagatcgtctttgaagatggtaacattaatgtgaacaagggcatgggaaggttcataccccgcaaggcattccccgaacatctgtaccagagggtgaaaatccgtaacaaggtttttggccttcagggcgttagtcgaggtatgtatgatggcccagtctacgaggtccccgctaccccaaaatacgccactccagcaccgagcgccaaatcatcaccttcaaagcaccagcccccacctatccggaatctgcaccagtccaacttcagcttgtcaggagcacagatcgacgataacaatccccgaagaactggacacaggatcgtggcaccacctggcggcagaagcaacattacttcccttggctag

SEQ ID NO: 183493 - DNA, 1719 bp, synthetic construct
  misc_feature 1..1719: note = Description of Artificial Sequence: Synthetic coding sequence
  source 1..1719: mol_type = other DNA
atgagctaccagggcaagaagagcatcccccacatcaccagcgacagactgctcataaagggggggcgcataataaacgatgatcagagtctgtacgccgacgtctacctggaggacggactcataaaacagatcggagagaatttgattgtacccggcggggtgaaaacaatcgaggccaatggtcgcatggtgattcctggcggcattgatgtcaacacttacctgcaaaagccctcccagggcatgacagcagctgatgacttcttccagggtacacgggctgccctggtgggcggaacgacaatgatcattgaccatgtggtgcctgaacccgggtcttcgctgctcaccagcttcgagaagtggcacgaggccgccgacaccaagagctgctgtgactactccctccatgtggatatcacgtcgtggtatgacggtgtgcgcgaagagcttgaagtgttggtgcaggacaagggtgtcaatagctttcaagtgtatatggcatacaaagacgtctatcaaatgtctgattctcaactgtacgaggctttcacttttctcaaaggccttggggctgtgatcttggtgcacgccgagaacggggacctcatcgcccaggagcaaaagcggatactagagatgggcatcacgggcccagagggacatgccctgagcaggccagaggagctcgaggctgaagcggtcttccgggcgattacgatcgccgggcgaatcaattgtcctgtctacatcacaaaggtcatgtcaaaatccgccgccgatattatagccctggcacgaaagaaaggccccctagtttttggggaacctattgcagcctcgctggggacggatgggacccattactggtcgaaaaactgggctaaagccgctgcttttgtgacttccccacccctctcaccggatccgacgacgcccgattaccttacttctctgctcgcttgcggcgacctccaggttaccggatccggacactgcccttacagtaccgcccagaaagcagtgggcaaagataatttcactctgattccggaaggcgtgaatggaattgaggaaagaatgacggtggtatgggataaggccgttgccacaggcaagatggatgagaatcagttcgtggccgtgacctccacaaacgcagccaagattttcaatttgtatccaagaaaagggcgaatagcggtaggctcagacgctgatgtagtcatctgggacccggataagctaaaaacaattacggctaaaagccataagagcgctgtggagtataatatcttcgaggggatggaatgtcacgggagtccacttgttgtgatttcccagggcaaaattgtttttgaagatggaaatattaatgtgaacaaggggatgggccggttcataccgaggaaggcatttccagaacatttgtaccaaagggtcaaaatccggaacaaggtctttggcttgcagggcgtgtctcggggcatgtacgatggaccagtttatgaagtccctgcgacgccaaaatatgcaaccccagccccgtccgcgaagtcatcacccagcaaacatcagccccctcccatcaggaacctccaccagagtaacttttccctgtccggtgcgcagatcgatgacaacaaccctaggaggactggccatcgaatcgttgcacccccaggcggcagaagcaatataacaagcctgggctag

SEQ ID NO: 183494 - DNA, 834 bp, synthetic construct
  misc_feature 1..834: note = Description of Artificial Sequence: Synthetic coding sequence
  source 1..834: mol_type = other DNA
atgaacggcttcgccagcctgctgcggcggaaccagttcatcctgctggttctttttctgctgcagatccagagtttagggcttgatatcgacagtagacccaccgccgaagtctgtgctacacatacaatctcacccggccctaagggcgatgacggggagaaaggagacccaggcgaggagggcaagcacgggaaggtcggtcggatgggccctaaagggataaagggggaactgggggacatgggagaccagggaaacattggcaagaccggtcccatagggaagaaaggggacaaaggggagaaaggcctcttgggcattccgggagagaaaggtaaggctggtactgtgtgcgactgcgggcgataccggaagtttgtcggccagctggacataagtatagccagactgaaaacaagcatgaagttcgtcaagaatgtgattgccggaatccgggaaaccgaggagaaattttattacatcgttcaggaggagaaaaattaccgcgagtcactgacccactgccgtattcgggggggaatgctggccatgcctaaagatgaagcagctaacactctcattgccgattatgtggctaagagcggtttctttagagtattcataggtgtgaatgatttagagcgcgaaggtcaatacatgtttactgataatacgcccctgcagaattattcaaactggaatgaaggcgagccgagcgatccgtacggccatgaggactgtgtcgaaatgttaagctctgggcggtggaatgataccgagtgtcatctgaccatgtattttgtttgcgaatttatcaagaaaaagaagtag

SEQ ID NO: 183495 - DNA, 807 bp, synthetic construct
  misc_feature 1..807: note = Description of Artificial Sequence: Synthetic coding sequence
  source 1..807: mol_type = other DNA
atgacccccgccctgtgccggagcagcagcctggccagcaagggcatgagagagcggagggagaccaaagctcctccagacggcctggaggagtcagctccacgggaaaagaagcaatcccagcctgtcgtgacggctagtgacatttcaaaacggaagtgtacctctagtttcgtcgagatgggaagccagggcgacatgggcgataagggccagaaggggagcgttggacgccatggcaagatagggcccatcggctcaaagggggaaaagggggatagcggggacattggtccaccaggccctaacggcgaaccaggtctgccatgcgagtgtagccagcttcgcaaagcgattggtgagatggataaccaggtgagccagctgacgtcagagctgaagttcattaaaaatgcagtcgcaggagtgagggagaccgagtcgaaaatctacctgctagttaaggaggagaaaaggtacgccgatgctcagctctcctgccaggggagagggggcaccctgagcatgcctaaggacgaggccgctaatggactgatggctgcatacctcgcccaggcaggactcgccagagtgttcattggaatcaacgacctggaaaaggagggtgccttcgtttattctgaccatagtccaatgagaaccttcaacaagtggagatcaggggagccgaataatgcttatgacgaggaagattgcgtagagatggttgcgtctggtggatggaacgatgtcgcgtgccacacaacaatgtactttatgtgcgagttcgataaggagaacatgtag

SEQ ID NO: 183496 - DNA, 816 bp, synthetic construct
  misc_feature 1..816: note = Description of Artificial Sequence: Synthetic coding sequence
  source 1..816: mol_type = other DNA
atgcggggcaacctggccctggtgggcgtgctgatcagcctggccttcttgagcctgcttccttctgggcacccccagccagctggtgatgacgcatgttccgtgcaaatcctggttccagggctcaagggcgacgctggtgagaaaggggataagggcgcgcctggccgacctggccgggtgggccccacaggcgaaaaaggcgacatgggagacaagggccaaaaggggagcgttggtagacatggaaagataggccctatcggctctaagggcgagaagggcgattctggcgatataggaccaccagggccgaatggagaaccagggctgccctgtgaatgctcccagttacgaaaagccattggcgagatggataaccaggtgagtcaattgacctccgaactcaagtttatcaagaatgctgtcgccggagtgcgcgagaccgagtcaaagatctacttgttagtgaaagaagagaagcgttacgcggacgcccaacttagctgtcaggggagaggagggacgctcagcatgcccaaggacgaagccgccaatgggttgatggcggcgtatctggcccaggcaggcttagccagagtgtttatcggtataaacgatttggaaaaggagggggcctttgtttattccgatcatagtcccatgcgaactttcaacaagtggcgatccggcgaaccaaacaacgcctacgacgaagaggattgcgttgagatggttgcctctggcggctggaacgatgtagcttgtcacaccaccatgtatttcatgtgcgaattcgataaggagaacatgtag

SEQ ID NO: 183497 - DNA, 744 bp, synthetic construct
  misc_feature 1..744: note = Description of Artificial Sequence: Synthetic coding sequence
  source 1..744: mol_type = other DNA
atgcggggcaacctggccctggtgggcgtgctgatcagcctggcctttctttccttactgccgagcggacatcctcaaccggctggagatgacgcctgttccgttcagattctggtacctggcctcaaaggcgatgctggggaaaaaggcgataagggcgcccctggtcgcccaggaagagtgggccccactggtgagaaaggcgaaaaaggggacagcggggacatcggacctccaggccccaacggggaaccagggttgccttgtgagtgctcccagctgagaaaagctatcggtgaaatggataatcaggtgagccagttgacttccgagttgaagttcatcaaaaacgccgttgcaggcgtgagggagaccgagagtaaaatatacctgctggtgaaggaggagaagagatatgcagacgcgcaactgtcttgtcagggccgggggggcacactgagcatgcccaaggacgaggctgccaatggtttaatggccgcttacttagcccaggctggtttggccagggtcttcattggtataaatgatctggagaaggagggcgccttcgtgtacagcgatcatagcccaatgcgcaccttcaataaatggcggagcggggaacccaataacgcctacgacgaagaagattgcgttgagatggtcgcatctggaggctggaacgatgtcgcctgccataccacgatgtacttcatgtgtgagtttgacaaagagaacatgtag

SEQ ID NO: 183498 - DNA, 858 bp, synthetic construct
  misc_feature 1..858: note = Description of Artificial Sequence: Synthetic coding sequence
  source 1..858: mol_type = other DNA
atgaagaagcagcggggcgtgggcgtgctgcccgccctgcggatgcgtgggaacctcgctttggtcggagttttaattagcctcgcgtttttgtctttacttcccagtggacaccctcaacccgccggggatgatgcctgttccgtgcagatcttggtcccaggcctgaagggcgacgccggtgagaaaggggataagggagctcccgggaggccaggaagggtggggccgactggtgaaaagggcgacatgggcgataaaggtcagaaggggagtgtcggccgtcatgggaagatcggcccaatcggttccaagggcgaaaaaggggactccggtgacattgggcctcccggcccaaatggagagccaggcttaccatgcgagtgttcacagttaaggaaggcaattggagagatggataatcaagtcagtcagctgacctctgagctcaagtttataaagaacgccgtagctggggtgcgagaaaccgagtctaagatctatctgctggtgaaagaagaaaaacggtatgccgacgctcaattatcctgccagggccggggaggaactctgtcaatgcctaaggacgaggcagcaaacggactgatggccgcctatctggcccaggcggggctggctagagtgttcatcggcattaacgacctggagaaggaaggagccttcgtgtactccgatcactctcccatgcgcacgttcaacaaatggaggagcggggagcccaataacgcctacgacgaggaggactgcgtcgagatggtggcttccgggggatggaacgatgttgcctgccatactacgatgtacttcatgtgtgagtttgataaggaaaacatgtag

SEQ ID NO: 183499 - DNA, 666 bp, synthetic construct
  misc_feature 1..666: note = Description of Artificial Sequence: Synthetic coding sequence
  source 1..666: mol_type = other DNA
atgtggtgggtgccccccagcccctacggctgcctgccctgcgccctccccggcgatatgggcgacaaggggcaaaaaggcagtgtcggccgccacggaaagatcggccctattgggtcaaagggggaaaagggcgactcaggcgatataggcccacccggccctaacggggaacctggtctgccttgcgaatgtagccaactccggaaagctattggcgagatggacaatcaggtgtctcagcttactagcgagctaaaatttatcaaaaatgctgtggcaggagtccgggaaacagagagcaaaatctacctcctggttaaagaagagaaacgatatgcagatgctcaactttcctgtcaaggtcgtggaggcacactgagtatgccaaaagatgaggcagcaaacgggctgatggccgcatacctcgcccaggccggtttggcgcgcgtttttattggtatcaatgatctggagaaggaaggagcattcgtgtactcagatcactcgccaatgcgtacttttaacaaatggcgcagcggagagccaaacaacgcatacgacgaggaagattgcgtggagatggtggccagcggcgggtggaacgacgtggcgtgtcacactacaatgtattttatgtgcgagttcgacaaggagaatatgtag

SEQ ID NO: 183500 - DNA, 666 bp, synthetic construct
  misc_feature 1..666: note = Description of Artificial Sequence: Synthetic coding sequence
  source 1..666: mol_type = other DNA
atgtggtgggtgccccccagcccctacggctgcctgccctgcgccttaccaggcgacgccggggagaagggtgacaagggcgcgccgggcaggccaggacgtgtcggacccaccggcgagaaaggcgagaagggtgacagcggggacattggacctcctggcccaaacggggagccagggctcccatgcgagtgctcacagctccgcaaagccattggcgaaatggataaccaggttagtcagctgacgtctgagcttaagttcatcaagaacgcggtcgctggagttagggaaacggaatcaaagatttaccttttagtgaaagaagaaaaaaggtacgccgatgcacagctttcctgtcaaggcagagggggaacactttccatgccaaaggatgaggcggctaacgggcttatggctgcgtaccttgcccaggcaggactcgcccgcgtctttatcgggatcaatgacctggaaaaagaaggagcttttgtttactctgaccattctcccatgcgtacgttcaataagtggcgcagcggagaaccaaacaatgcctatgacgaagaagattgcgtggagatggtggcctcaggcgggtggaacgatgtggcatgccatacgacaatgtatttcatgtgtgagttcgataaggaaaatatgtag

SEQ ID NO: 183501 - DNA, 594 bp, synthetic construct
  misc_feature 1..594: note = Description of Artificial Sequence: Synthetic coding sequence
  source 1..594: mol_type = other DNA
atgtggtgggtgccccccagcccctacggctgcctgccctgcgccctccccggcgaaaaaggagatagtggtgacataggccctccaggacctaacggcgagccgggcttgccctgtgaatgtagtcagcttcgcaaagctattggagagatggacaaccaggtgtctcagctcacctccgaactcaagttcatcaagaatgccgtagccggagtgcgagaaacagagtccaagatctatcttttggtaaaagaggaaaaacggtatgccgacgctcagctgtcttgccagggccgagggggcacgctgtccatgccgaaagacgaggcagcaaacggcttgatggccgcgtacctagctcaggccggcctggcgagagtgttcatcggcatcaacgacttggaaaaggaaggagcctttgtgtatagtgatcactctcccatgcggacctttaacaaatggaggagcggagaacctaacaacgcctacgatgaggaggactgtgtcgagatggtcgcctctggcggctggaatgacgtggcatgtcacacaacaatgtacttcatgtgcgagttcgacaaggagaacatgtag

SEQ ID NO: 183502 - DNA, 2229 bp, synthetic construct
  misc_feature 1..2229: note = Description of Artificial Sequence: Synthetic coding sequence
  source 1..2229: mol_type = other DNA
atgaaggacgacttcgccgaggaggaggaggtgcagagcttcggctacaagcgattcggtatccaggagggaactcagtgcaccaaatgtaaaaataactgggcgctgaagttttctatcattctgctgtacatcctgtgcgctctgctgaccatcactgtagcgatcctgggatataaggttgtcgagaagatggacaacgtgaccgggggaatggaaacctccagacagacatatgacgacaaattaacagccgttgagtccgatctcaaaaagctgggcgatcagacgggaaagaaagcaatctccactaactccgaactcagcaccttcagaagcgacattctcgacttaagacagcagctccgcgagataacagagaagacttcaaaaaataaggacactcttgagaaattacaggcatccggcgacgctctggttgaccggcagagtcagctgaaggagacattggagaacaatagcttcctgatcactactgtcaataagaccttgcaggcctataatggatatgttactaatttgcagcaagatacaagtgtgctgcaaggtaacctgcagaaccaaatgtattctcacaatgtagtgattatgaacctgaacaatctaaacctgacccaggtccagcagcgcaatctaatcacaaacttgcaacggtcagtggatgacactagtcaggctatacagcggatcaagaacgatttccagaacctccagcaagtatttttgcaggctaagaaagataccgattggcttaaggagaaggtgcagagccttcaaaccttagcagcgaataacagcgccctcgccaaggcaaataacgatactctcgaggacatgaatagccagctgaactctttcacggggcagatggagaacataaccacgattagccaggccaatgagcagaacctcaaggatctgcaggatctgcataaggatgccgagaaccggactgcaataaagtttaatcaactggaggagagatttcagctttttgagacagacatcgtcaacatcatttctaacattagctataccgcgcatcacctgcgcacactgacgtccaacctcaatgaagtccgcactacatgcacagatactctaaccaagcataccgacgacctgacatcactcaataacacactggccaacatcagactggactctgtgtccctccgaatgcagcaagaccttatgaggtcacgcctggatacagaggtggctaacctcagtgtgatcatggaggagatgaagctcgtggactcaaaacatggtcaactaatcaagaattttactatcctgcaaggccctccaggtccgcggggaccccgaggggacaggggctcacaagggccccccgggcctactgggaataaaggacagaaaggggagaaaggagaaccaggcccccctgggccagctggagagaggggcccgattggacccgccggcccgcctggcgaacgcggaggcaaagggtctaaggggtctcaaggcccaaagggatccaggggcagccctggtaaaccaggtcctcaggggtccagtggagaccccggccctcctgggcctccagggaaggaagggcttcctggaccacaggggcctcccggcttccaggggctgcagggaaccgtcggtgaacccggcgtgcccggaccaaggggtttaccaggcctccccggagttcctggaatgcccggccccaagggtcccccgggtccgccaggcccttctggagccgtggtccctttagccctgcagaacgagcctacccccgctccagaggataatgggtgtccaccgcattggaaaaacttcacagataaatgctattacttttcggtggagaaggaaatatttgaggacgcgaagctgttttgcgaagataagtcctcccaccttgtgttcatcaatacaagagaggagcagcagtggatcaaaaagcaaatggtgggcagagagtcacattggatcgggctcacggactccgaaagagagaacgaatggaagtggctagacggaacttcacccgattataagaattggaaggccgggcagccagacaactgggggcatggacatggccctggggaagactgcgcgggtttaatatacgcgggacaatggaacgattttcagtgcgaggatgtcaacaattttatctgcgagaaggatagggagactgttctctcctcagcactgtag

SEQ ID NO: 183503 - DNA, 2919 bp, synthetic construct
  misc_feature 1..2919: note = Description of Artificial Sequence: Synthetic coding sequence
  source 1..2919: mol_type = other DNA
atgggccccggcgtgctgctgctgctgctggtggccaccgcctggcacggccaaggaatccccgtcattgaaccctccgttcccgagctcgtcgtgaaacccggggctaccgttacacttcgctgcgtgggaaacgggtcagtcgaatgggatggcccacccagtccccattggactttgtacagcgatgggtcctccagtattctgagcacaaacaacgctacgttccagaacaccgggacatatcggtgtaccgagccgggagaccctttggggggatcggctgcaatccatctgtacgtgaaggatcccgctagaccatggaacgtcttggcacaggaggtggttgtcttcgaggaccaggatgcattgctgccctgcctgttaacggatcccgtgttggaggcaggcgttagcttggtccgagttaggggacggcccttgatgaggcataccaattacagttttagcccatggcacggattcactattcaccgggccaagtttatacagtcgcaggattatcaatgttccgcactgatgggaggtaggaaagtgatgtcaatctctatccgattgaaagtgcagaaggtaattcccggaccacccgctctgactctggtgccggccgaactggtacgcatacgtggtgaagccgcacagatcgtatgttctgcctccagtgtggacgtgaattttgacgtgtttttgcagcataacaacactaaactagccatccctcaacaatccgattttcataacaacagatatcagaaagtgctcactctgaacttggatcaggtggattttcagcatgccggaaattattcctgcgtggcctcaaatgttcagggaaagcacagcacgtctatgttcttcagagtggtggagagtgcctaccttaacttgagctctgagcagaatctgattcaagaggttactgtaggcgaggggcttaacttgaaggttatggtggaagcttatccaggtctgcagggatttaattggacatatttaggccctttctcggatcatcaacctgagccaaaactggcaaatgccaccaccaaagatacgtacaggcacacatttactttgtctctgcctaggttgaagccttccgaggccgggcggtactcttttttggctcggaacccagggggatggcgcgctcttacgttcgagctcacactgaggtatccgcccgaagttagtgtgatttggacctttatcaatggctctggaaccctgctgtgcgcggcctctgggtatccccagccaaatgttacatggttacagtgcagtgggcacaccgatcggtgtgatgaggcccaggtgctccaggtttgggatgatccatatcctgaggttctcagccaagagccatttcacaaagtgaccgtgcagtcgctcctgacagtcgagacgctggaacataaccagacatacgagtgtagagcccataactctgtgggctccggaagttgggctttcatccctatttctgccggggcccatactcacccccctgacgagttcctcttcacccccgtcgtcgtggcatgtatgagcattatggctctcctgctgctcctgctgctgctgcttctgtataaatataagcagaagcccaagtatcaggtgaggtggaagatcattgagagctacgaaggaaacagctatactttcatcgatcccacccaactgccttacaacgaaaagtgggagtttcctcgaaataacctccagtttgggaaaacccttggggccggagcttttggtaaggtcgttgaagccacagcctttgggctggggaaagaggacgctgtgctgaaggttgccgttaaaatgctgaagtcgactgcccacgccgacgagaaggaggcgctcatgtctgaactgaaaatcatgagtcatctgggacaacacgagaatatcgtgaatctgcttggagcatgcacacatggggggccggtcctggtaattactgagtattgttgctatggcgacctcctgaacttcttacggcgaaaagcagaggccatgcttggcccgtctctcagccccggacaggacccagaaggcggcgtggattacaagaacatccacctcgaaaagaaatatgtgcgcagggactccggcttttcctctcaaggggttgatacctatgtggaaatgcgcccagtgagtacaagttccaatgattcattcagtgagcaggacctggataaagaagatggaaggccactggagttgcgggacctgctgcacttctccagccaagtggctcaggggatggcttttttggcatcaaagaattgtatccatagggatgtggcagcccgcaatgtcctcctcactaatggacatgttgcaaagatcggcgacttcggtctcgcacgggatattatgaacgattcgaattacatcgtcaagggaaatgcacgccttccagtgaagtggatggcccccgagtctattttcgattgcgtgtacacggtccaaagtgatgtgtggagctacggcatcctgctgtgggaaatcttcagtctgggactgaacccataccctgggatcctcgtaaattcaaagttctacaagctggttaaggatggttatcagatggctcagcctgcctttgccccgaagaatatttacagcatcatgcaagcttgctgggccctggagcctactcaccgtcccaccttccagcagatctgcagcttcctgcaggaacaggcccaggaagaccgccgagagcgggattacacaaaccttccatcctcctctcggagcggaggaagtggttcctcaagctcagaactggaggaagagagctcttccgaacatctaacctgctgtgagcagggagacatagcccagcccctactgcaacccaataactaccagttttgctag

SEQ ID NO: 183504 - DNA, 1506 bp, synthetic construct
  misc_feature 1..1506: note = Description of Artificial Sequence: Synthetic coding sequence
  source 1..1506: mol_type = other DNA
atgcggcacaccaactacagcttcagcccctggcacggcttcaccatacatagggccaaatttattcagtcacaagactaccagtgttcagccctgatgggcggtcgaaaagtgatgagcatttctattaggctgaaagtgcagaaggtgatccccgggccccctgctctcactctcgtgcctgccgaacttgtgaggattcgtggggaggccgctcagattgtgtgttctgctagttctgtagacgttaatttcgatgtcttcctgcagcataataacacgaagctcgccatcccccaacagtctgattttcataacaatcggtatcagaaggtgctcacgctgaatttggaccaggtcgactttcagcatgcgggcaactatagctgcgtcgcctcgaacgtccagggcaagcattctactagtatgttctttcgggtggtggagtcggcgtacctgaatttaagctccgaacagaatcttatacaagaagtgactgtaggagaagggttgaaccttaaggttatggtagaggcctaccctggcttacagggatttaattggacgtacctggggcccttctcagatcaccagcctgaaccaaaattggccaatgccacaactaaggatacgtaccggcacaccttcacactttccctgccaaggctgaagcctagcgaggccgggagatactcattcttagcacggaacccgggggggtggagagccctaacatttgaactcaccttgcggtatccacctgaagtcagcgtgatttggaccttcatcaatggttctggcaccttattgtgtgccgcctcggggtatccgcaacctaacgtaacttggctccagtgctccgggcacacagatcggtgcgatgaggctcaggttctgcaggtgtgggacgatccttaccccgaggtgctgtctcaggagcccttccacaaggtgaccgtgcaaagcttgctgacagttgagaccttagagcataaccagacatatgaatgtagagctcataatagcgttggctctgggtcatgggcattcatccccatcagcgcaggtgcccacactcatcctccagacgagtttctcttcacccctgtggtggtggcctgtatgagtattatggcactgttgctgctcctcctactcctactcctttacaagtacaaacaaaaacctaagtatcaggttcggtggaaaattatcgagagttatgaagggaattcatatacatttatcgatccaacacagttgccgtacaacgagaagtgggagtttcccagaaataatctccagtttggcaaaacactcggcgccggagcttttgggaaagtggtggaagcaaccgcttttgggttaggcaaagaggacgccgtgctgaaagtcgccgtcaaaatgctgaagagtaccgcccacgcagacgaaaaggaggcctccggtctttaccagtcagcagagcagcagcagaagagatggcagcgccagcagcagcagtag

SEQ ID NO: 183505 - DNA, 2016 bp, synthetic construct
  misc_feature 1..2016: note = Description of Artificial Sequence: Synthetic coding sequence
  source 1..2016: mol_type = other DNA
atgggccccggcgtgctgctgctgctgctggtggccaccgcctggcacggacagggcattcccgtcatagaaccctctgtgcccgaactggtggtgaagcctggggctacagtgacgctgagatgcgtgggcaacggcagcgtggagtgggatgggccaccctctccacactggaccctttattccgacggttcttctagcattctgtccactaataacgcgaccttccaaaacaccggcacatatcgctgtacggaaccgggcgacccactggggggaagcgcagcaattcacctctatgtgaaggaccctgctaggccatggaacgtcctggcacaggaggtggtggttttcgaagatcaggacgccctcttgccgtgtctgctcactgacccggtcctggaggcgggcgtgagcctcgtgagagtgcgaggccgtcccctgatgcgacacacaaattattccttctctccgtggcacgggtttacgattcatcgtgccaagttcatccagagccaagattaccaatgcagtgccctgatgggtgggcggaaggtgatgtccatctcaattagactaaaggtccaaaaggtgatcccaggccctcctgctctcaccttggtccctgccgaacttgttaggattcgcggcgaagccgcccagattgtgtgttctgctagttccgtggacgtaaatttcgatgtatttcttcagcataacaacaccaagctggcaatcccgcaacagtcagactttcacaataacagataccagaaggttttgactcttaatctggaccaggtggattttcagcacgctgggaattattcctgcgtcgcttcaaacgtgcaaggaaagcacagcacaagtatgtttttcagggtggtggaaagtgcatatttgaacctgagtagcgaacagaatcttattcaagaggttacggtgggcgagggactgaacctgaaggttatggtggaggcttacccaggcttacaaggatttaattggacctatctaggcccattttctgatcaccaacctgagcctaaactggcgaatgctacgactaaggatacctaccgtcacactttcactctgtccctgccgaggctcaaaccatccgaagcaggccggtactcattcctggcaagaaatcccggggggtggcgtgccttgacgtttgaacttaccctgagatacccacctgaggtatccgtcatttggacattcatcaatggatccggcacgttgctgtgtgctgccagtggatatccgcagcccaatgtcacatggctgcagtgcagcggacacactgacaggtgcgacgaggcccaagtgctgcaagtatgggacgacccgtaccctgaggtgctgtctcaggaaccctttcacaaagtcacagtgcagtcccttcttacagttgagacccttgagcacaaccagacctatgaatgtcgcgcccacaacagtgtgggcagcggatcatgggctttcattcccatctcagcaggggctcacactcacccacctgacgaatttctgtttaccccagtcgtagtagcctgcatgtccataatggcactcctgctgctcctgctgcttttactgctgtataaatacaaacagaagccaaaataccaggtgagatggaagattatcgagtcttacgaggggaacagttacacattcatcgacccaactcagctgccatataacgaaaagtgggagttcccgaggaacaacctgcagtttggtaagacactgggggcaggagcattcggcaaagttgtggaagctaccgcgttcggtctcggtaaagaggatgcggtgctgaaagtcgcagttaagatgcttaagtctaccgcacacgctgatgagaaagaggctctcatgtcagaattaaagatcatgtctcatctgggacagcatgaaaacatagtaaacttacttggtgcctgtactcacggaggaaccgtggcaagcccagcccgagtgtggacccctatgtggagatag

SEQ ID NO: 183506 - DNA, 921 bp, synthetic construct
  misc_feature 1..921: note = Description of Artificial Sequence: Synthetic coding sequence
  source 1..921: mol_type = other DNA
atgggccccggcgtgctgctgctgctgctggtggccaccgcctggcacggccaggggatccctgtgatagaacctagcgtgccagagctggtagtgaagcctggcgcaacagttacattaagatgcgtgggcaatggctccgtggagtgggatggaccacccagcccacactggacactttattcggatgggtcgagtagcatcttatccaccaataacgccacttttcagaacacggggacctataggtgtaccgaacctggtgaccctctaggcggaagcgctgccattcatctgtatgtgaaggatccggctcgtccatggaacgtgttagcccaagaagtggtggtgttcgaggatcaggacgccctcttgccctgcctgcttaccgatccggtgcttgaagccggcgtgtctctggtgagggtgaggggacggccattgatgagacataccaattacagcttcagtccgtggcacgggtttaccattcaccgggccaagttcattcagtcacaggattaccagtgctcagccctcatggggggccgcaaggtaatgagcatttccattagactgaaggtgcagaaagttatccccggtccaccggccctgactctggtgccagcagaattggtgagaattcgcggcgaagcagcgcagatcgtgtgttcagctagctccgtggatgtgaatttcgatgtgtttctgcagcataataatactaagctcgccattccccagcagagcgatttccacaacaaccgctatcagaaagtgctgactctcaacctagaccaggtggattttcaacacgcgggaaactatagttgtgtggcatcaaacgttcagggaaagcactcaaccagcatgttttttcgggtcgtgggtacaccgtctccaagtttgtgccctgcctag

SEQ ID NO: 183507 - DNA, 1134 bp, synthetic construct
  misc_feature 1..1134: note = Description of Artificial Sequence: Synthetic coding sequence
  source 1..1134: mol_type = other DNA
atgctgctgctggtgaccagcctgctgctgtgcgagctgccccacccagcttttcttttgatccccgagaagagtgacttaagaaccgtagcaccagccagcagtctgaatgtgcggtttgactccaggacgatgaacctttcttgggactgccaggaaaacactacctttagcaagtgtttccttaccgataagaaaaatagagtggtggagcctagactctcaaacaacgagtgtagctgcaccttcagggaaatttgcctgcatgagggtgtgacatttgaggttcacgtgaatacttcccaacgaggatttcagcaaaagctgttgtaccccaacagcgggagggaagggacggccgctcaaaattttagttgttttatctataacgccgaccttatgaattgcacatgggccagaggtcctactgcacccagggatgtgcagtatttcctatatatccgcaacagtaagagaaggcgtgagatcagatgtccttattacattcaggactccggcacccatgtcggctgtcacctggataacctgtctgggctgactagccgcaattacttcctggtcaacggcaccagtagagagattggcatccagtttttcgactccctactcgataccaagaagatcgagagattcaatccaccaagcaatgtgacagtgagatgtaataccactcactgcctcgtgcgctggaaacagccaagaacctaccaaaaactgagttatctggatttccagtatcagctggatgtgcacagaaagaacacacagcctggcacggaaaacctgttgattaatgtaagcggagatctcgaaaacagatataactttccaagttcagagccacgggcaaagcattctgtgaagattcgagcagccgatgtgagaatcctcaactggagctcctggagcgaggccatcgagttcgatcatctgggcggtatccaccccaggggcagggagagactgccccgaagggggctcgatcgggagggcaactacctgcggcctcgcggatgccgaaatggtatggatatatctgcaagcgccactagggggaactgttttctggacgatgcagtcaatctttacataattttttacgtttttatttag

SEQ ID NO: 183508 - DNA, 702 bp, synthetic construct
  misc_feature 1..702: note = Description of Artificial Sequence: Synthetic coding sequence
  source 1..702: mol_type = other DNA
atgctgctgctggtgaccagcctgctgctgtgcgagctgccccacccagcattcctgctgatccctgagaagagcgatctgcgtacggtggcacctgccagcagtttaaatgtccgctttgatagcagaactatgaacttgtcctgggactgtcaggagaacactaccttcagtaaatgcttcctgacggacaagaagaacagagttgtcgaaccgcgcttgagcaacaatgagtgctcatgtacattcagggagatctgtctgcacgagggcgtcacctttgaggttcatgtgaacacatctcagagggggtttcagcaaaagttgctctaccccaacagcgggcgggaggggactgccgctcagaactttagctgttttatttataacgcagatctgatgaattgtacctgggcccggggccccactgcccctcgggacgttcaatattttctctacattcgcaatagtaagcgccgaagggagatcagatgcccatactacatccaagattcagggactcatgtggggtgccacctcgacaacctgtccggactgacgtctcgcaactacttcctcgtgaatgggacgtctagggagattggcattcaatttttcgatagtctgctggataccaagaagattggtagtttggggtactccggttgtagccgacaattccacaggtcaaagaccaattag

SEQ ID NO: 183509 - DNA, 1002 bp, synthetic construct
  misc_feature 1..1002: note = Description of Artificial Sequence: Synthetic coding sequence
  source 1..1002: mol_type = other DNA
atgctgctgctggtgaccagcctgctgctgtgcgagctgccccacccagccttcctcttaatccccgaaaagtccgacttaagaaccgtggcacctgccagctctctgaacgtaaggttcgattctagaacgatgaatctgtcctgggactgtcaagaaaatactacattctctaaatgctttcttactgacaagaaaaatagagtggttgagcccaggctgtccaataatgaatgttcttgtacattcagagaaatctgcctgcatgagggagtcacattcgaggtgcatgtcaataccagccagcgcggattccagcagaaactcctctatccaaactccggcagggaaggtacagcagcacagaacttttcttgtttcatctacaatgccgaccttatgaactgcacttgggctaggggccccactgcacctagggatgtccaatacttcctgtatatccgtaactcaaagaggagaagagaaatccgatgtccttactacattcaggactcaggaacccacgtaggttgtcacttagataatttatctggactgactagtcgtaactactttcttgttaatgggacctccagggaaatcgggatccagtttttcgatagcttattggacactaaaaaaatcgaaagatttaacccaccctcaaacgttacggtgagatgcaacactacccactgccttgtgcggtggaagcagcccaggacgtatcaaaaactgtcttacttggattttcagtatcaattggatgtccacaggaagaatactcagcccggcactgagaacctcctaataaacgtgtctggggacctcgaaaacagatacaacttccctagcagcgagcctcgagctaagcattcagtgaagattagagctgctgacgtacgcatccttaactggtcgagctggtccgaggctatcgaatttggctccctcggatacagcggctgcagccggcagtttcataggtcaaagaccaactag

SEQ ID NO: 183510 - DNA, 1002 bp, synthetic construct
  misc_feature 1..1002: note = Description of Artificial Sequence: Synthetic coding sequence
  source 1..1002: mol_type = other DNA
atgctgctgctggtgaccagcctgctgctgtgcgagctgccccaccctgcctttcttctcatccccgagaagtctgaccttaggactgtcgcaccagcttcctctcttaacgtgaggtttgattcccgcaccatgaatttgtcttgggattgtcaagaaaataccactttctccaaatgcttcctgacagacaaaaaaaatagagtcgtggagcctcgccttagtaacaatgagtgtagctgcactttcagagagatttgcctgcatgaaggagttactttcgaggttcacgtgaacacaagccagagagggttccagcagaagctgctgtaccccaactcggggagggagggcacagccgctcagaactttagctgcttcatctataatgctgatctcatgaattgcacctgggcgagaggccccaccgctccaagggacgtgcagtattttctatacattcgcaacagcaaacgccggagagaaatcaggtgtccttactatattcaggattcgggcactcacgttggctgccatttagacaacctcagtggcctcaccagtcggaactactttctggtcaatggtacatcccgagaaattggcatccagttctttgatagcctgctcgacactaaaaaaatcgagcgatttaaccctccatctaatgtaaccgtgagatgcaataccacccactgtctcgttcgctggaagcagcctagaacttaccagaagctcagttatctggacttccaatatcaattggacgtacataggaagaacacccagcctggcaccgagaacctgctgattaatgtgagcggtgacctcgagaatcgctataactttcctagctctgaaccacgggccaagcactcagtcaagattcgcgcggctgatgtgcgcatcctcaactggtcaagttggagcgaagcgattgaattcggttccctgggctatagcggatgctcccgccagttccaccggagcaagaccaactag

SEQ ID NO: 183511 - DNA, 861 bp, synthetic construct
  misc_feature 1..861: note = Description of Artificial Sequence: Synthetic coding sequence
  source 1..861: mol_type = other DNA
atgctgctgctggtgaccagcctgctgctgtgcgagctgccccaccccgccttcttactgattccagagaagtctgacttgcgtactgtggcccccgcctcaagcttgaatgtacgcttcgattcaaggactatgaacttaagctgggattgccaggagaacacgacgttctccaagtgcttcctgactgacaagaaaaatagggtggttgaacccagactgagtaacaacgaatgttcctgcactttcagggagatctgccttcacgaaggagttacctttgaagttcatgtgaacaccagccaacgcggtttccagcagaagctgttgtacccaaactcagggcgtgaggggacggctgcccagaacttttcttgctttatttacaacgcggatctgatgaactgcacttgggcccgggggccgacagcacctcgcgatgttcagtatttcctttacataagaaacagcaagcgaaggcgcgagatccgctgtccctactacattcaagattccggtacacacgtgggatgtcatttagataatctgagcggcctgaccagccggaactatttcctggtcaacggcacctctagagaaattggcattcagttttttgactctcttcttgacactaagaagatagaaaggttcaatccgccaagcaacgtcaccgttagatgtaacaccacccactgcctagtaaggtggaaacagccacggacctaccagaagctctcctacctggatttccagtatcagctggacgtccacagaaagaacacacagcccggcaccgaaaacctgctggtagtcctgaccacaggcacaagcgccctatgcactttcatgtgttcctag

SEQ ID NO: 183512 - DNA, 1233 bp, synthetic construct
  misc_feature 1..1233: note = Description of Artificial Sequence: Synthetic coding sequence
  source 1..1233: mol_type = other DNA
atgctgctgctggtgaccagcctgctgctgtgcgagctgccccacccagcctttcttttgattcccgagaagtccgatctgagaactgtcgctcccgcaagtagcctgaacgtgcggttcgatagcagaaccatgaatctgagctgggactgtcaggagaataccaccttctcgaaatgcttcctcacagataaaaagaatagggtggtcgagcctcgcctgtccaacaatgagtgttcctgtacgtttcgggagatatgtttacacgagggggtcacttttgaggtacatgtgaacaccagccaacggggatttcagcaaaaattgctgtatcccaactcaggccgagaggggaccgctgcccagaatttctcttgtttcatctataacgccgaccttatgaattgcacatgggccaggggcccaacagctcccagggatgtgcagtattttctgtacatcaggaacagcaagcgtcgtagagaaatccggtgtccctactacattcaggattctgggacccatgtcggctgccacctggacaatctcagtggcttgacgagccgcaactactttctggttaatggcacttccagagaaattggtatccagttctttgattcactgctggacacaaaaaagatcgagaggttcaatcctccatcaaacgttacagtgcgctgtaacaccacacattgccttgtgcggtggaaacagccaagaacttaccagaaactgtcctatctggattttcagtaccagttggacgtccatcggaagaatactcaacctggcaccgaaaacctcctgataaacgtgtccggagacctggagaatagatacaattttccaagctcagagccgcgggccaaacacagcgtgaagattcgtgcggccgacgtcagaattctcaattggagctcgtggtctgaggcgattgaattcggatcggacgacgggaacctgggctccgtgtacatctacgtgctcttaattgttggaacgctggtttgcgggatcgttttgggatttttgttcaagcgcttccttagaatccagcggcttttcccacccgtgcctcagattaaagataagttaaacgataatcacgaggtggaagatgaaatgggtccacagcgccaccataggtgtggatggaatctttacccaacacccggtccatcaccaggatctggatctagtcctagacttggatctgagtcaagcttatag

SEQ ID NO: 183513 - DNA, 1203 bp, synthetic construct
  misc_feature 1..1203: note = Description of Artificial Sequence: Synthetic coding sequence
  source 1..1203: mol_type = other DNA
atgctgctgctggtgaccagcctgctgctgtgcgagctgccccacccagcttttcttctcattccagagaagtcagaccttaggactgttgcacccgcgagtagcctgaatgttcgctttgattccagaacaatgaatctgtcctgggactgccaagagaatacaacgttttccaaatgcttcctgacagataagaaaaacagagttgttgaacctaggctgagcaataacgagtgtagctgcacatttagagagatttgtctgcacgagggcgtaacctttgaggtgcacgtgaacaccagtcaacgcggcttccagcagaagctgctttatccaaacagcggaagggaggggacagccgcccaaaacttttcttgttttatttacaacgccgacttaatgaattgtacatgggcgcgcggaccaaccgctccccgtgatgtccagtacttcctttacatccgcaattcaaagaggcgaagagagatccgctgtccttattatatccaagattccggaacacatgtggggtgccacttggataacctttctggtctaacctctcggaactactttctggttaatggtacctcaagggagatcggtatccaattctttgacagcctgcttgacaccaagaaaattgaacggttcaacccgccctctaacgtcaccgtaaggtgcaataccacacattgcctggtgcggtggaaacagccgaggacctaccaaaaattatcttacctggacttccagtatcagcttgacgtacacaggaagaacacccagccgggaaccgagaacttacttatcaacgtgtccggagacctagagaacagatacaacttccctagctctgaacccagagctaaacacagtgtcaagattcgtgcagccgacgtgagaattctcaactggtcctcatggtctgaggcgatcgaattcggtagcgatgacggaaacctcgggtcagtttacatatacgtgctgctgatcgtgggtactcttgtctgcggcattgtgctggggttcctattcaaacgatttctgcgaatccagcggttattcccgccagtaccccagataaaagacaaactgaatgataaccatgaagtggaggatgaaatcatttgggaggagttcaccccagaagagggcaaaggataccgtgaggaggtccttacagtaaaggaaatcacctag

SEQ ID NO: 183514 - DNA, 1203 bp, synthetic construct
  misc_feature 1..1203: note = Description of Artificial Sequence: Synthetic coding sequence
  source 1..1203: mol_type = other DNA
atgctgctgctggtgaccagcctgctgctgtgcgagctgccccacccggcattcctcctcatacctgagaagagtgatcttcgcaccgtcgctccagcctccagcctgaacgtgcggttcgatagccgcacgatgaacttgagttgggactgccaagagaacactactttctcaaagtgcttcctcaccgacaagaagaaccgtgtcgtggagcccagactgtctaataacgagtgcagctgcacatttcgcgaaatttgtctacacgagggggtgacatttgaagtgcacgtcaacacatcacagcgagggtttcagcagaagcttctctacccaaactctgggcgggagggaacagccgcgcagaatttttcctgctttatctataacgccgatttaatgaactgtacttgggcccgagggcccacagctcctcgagatgttcaatattttttgtacatccgcaacagcaaacgtcggcgggagatcagatgcccttactacattcaagatagtgggacacacgttggctgtcacttggacaatttaagcggcctgacctcaagaaactatttcctggtcaatgggacctcaagggaaattggcatccaattttttgactcactgcttgacactaaaaaaatcgaaagatttaatccgccgtcaaatgttaccgtgcgttgtaatacaacccattgtctggtgcgctggaagcagccccgaacctatcagaagctgagttatctggatttccagtatcagttagacgttcatagaaaaaacactcagcccggaacagagaacttgctcattaatgtgtcgggggatctcgaaaatcgttacaattttcccagctcagaaccccgcgccaaacatagcgtgaaaattcgggccgcggatgtgagaatactgaactggtcctcctggtccgaagcgatcgaattcggtagtgacgacggaaacctgggtagcgtctatatttacgtactactgatcgtgggtactctggtctgcggtatcgtgttgggctttttattcaaaaggtttctgagaattcagcggttgttcccacctgtgcctcagattaaggacaagctgaacgacaatcacgaggtcgaggacgaaatcatctgggaagaatttacgcccgaggaagggaaaggataccgcgaggaggtcctcactgtcaaggaaatcacttag

SEQ ID NO: 183515 - DNA, 717 bp, synthetic construct
  misc_feature 1..717: note = Description of Artificial Sequence: Synthetic coding sequence
  source 1..717: mol_type = other DNA
atgctgctgctggtgaccagcctgctgctgtgcgagctgccccaccctgcattccttttgatcccagagaagtccgatttgagaacagtcgcccctgcctcaagcttgaacgtgcgcttcgatagtcgcacaatgaatctgagctgggattgccaggaaaacaccacgttttctaaatgcttcctcacagataagaaaaatagagtcgtcgagccaagactgagcaataatgaatgcagctgcaccttcagggagatttgtcttcacgaaggcgtgacattcgaagtgcatgtgaacacctctcaacgaggctttcagcaaaagctgctctaccccaactctgggcgtgaaggtactgcagctcaaaactttagctgttttatttataacgctgacctaatgaactgcacttgggctagaggtcccacggcaccaagggatgtgcagtactttctgtatattcggaactccaagcgacggagagaaatcaggtgtccctattatatccaggactctgggacccacgtgggctgccatctggataacctgtcaggactcactagtaggaattacttcctcgttaatggcacgtcgagggagatcggtatccagtttttcgacagtctgctggacacgaagaaaatcgagagatttaaccctccctcaaatgttaccgtgcggtgcaataccacccattgcctggttcgctggaaatag

SEQ ID NO: 183516 - DNA, 1305 bp, synthetic construct
  misc_feature 1..1305: note = Description of Artificial Sequence: Synthetic coding sequence
  source 1..1305: mol_type = other DNA
atgctgctgctggtgaccagcctgctgctgtgcgagctgccccaccctgccttcctcttaatcccagagaaatctgacctccgtacagtggctcctgcaagttctctgaacgtgcgcttcgatagtagaactatgaacctgtcctgggattgtcaggaaaatacaacattttctaagtgcttcctgactgataaaaaaaatcgagtggtagagccccgattgtccaacaacgagtgttcatgtacattccgcgaaatatgtttacatgagggagtcacctttgaagtgcatgtcaatacctcgcagagaggatttcagcagaagctcctttatcccaactccggacgcgaaggtactgctgcacaaaatttttcttgtttcatttataatgccgacttaatgaattgcacatgggcgcgggggcctactgctcctcgcgatgttcagtatttcctgtatatccgaaatagtaagcgccgtcgcgagatcagatgcccctattatattcaagattcagggacgcacgtaggatgtcacctcgacaacttgtctggcctcacttctcgcaactacttcctagttaatgggaccagtcgcgagattggcattcagttttttgattctctactggacactaaaaagatcgaaagatttaatccaccgtccaatgttaccgtccggtgtaacacaactcactgtttggtgagatggaagcaacctagaacctatcagaagttgtcttaccttgatttccagtaccagctcgatgtgcaccgcaagaatacccagccggggactgagaacctgttgataaatgtgtcaggagacctggagaaccggtataacttcccatcttccgaaccccgagctaaacacagtgtcaaaattcgagctgccgatgtgcggatcctgaactggtcttcttggtcagaggccattgaatttggctctcattcagtgacacaggctggggtgcaatggcataacctcggcagcctgcaaccgccatcgccgagactgaaacgcttcagttgtcttcggctgcctggatctgatgatgggaatttgggatcagtttacatttatgtcctactgatagtgggaaccttagtatgcggaatcgtcctcggattccttttcaaaaggttcctgcggatacagcgcttgttcccgcccgtccctcaaataaaagataaactgaacgataaccacgaggtggaggatgagatcatttgggaagagttcacacccgaagaaggcaaaggatatcgggaggaggtgctgaccgtcaaagagatcacatag

SEQ ID NO: 183517 - DNA, 567 bp, synthetic construct
  misc_feature 1..567: note = Description of Artificial Sequence: Synthetic coding sequence
  source 1..567: mol_type = other DNA
atgctgctgctggtgaccagcctgctgctgtgcgagctgccccacccggccttcttactgatcccggaaaaatctgacctgaggacggttgctccagcttcctctctcaacgttcgattcgattccaggactatgaacctgtcctgggattgccaagagaatacaacatttagtaaatgctttctgaccgataaaaaaaatagagtggttgagccacggttatcaaacaacgaatgctcatgtaccttccgcgaaatctgccttcatgaaggtgtgacattcgaagttcatgtcaatacgagccaaagagggttccagcaaaagttgctttacccaaacagcggcagagaggggaccgctgcacagaattttagctgttttatttataacgccgatcttatgaattgtacctgggcccgaggtccaacagctccccgcgacgtgcagtacttcctgtatataagaaactctaaaagacgccgcgagattcggtgcccctactatatccaggacagtggcacacatgtgggttgtcacctggacaacttgtctggcctgacatcatag

SEQ ID NO: 183518 - DNA, 1203 bp, synthetic construct
  misc_feature 1..1203: note = Description of Artificial Sequence: Synthetic coding sequence
  source 1..1203: mol_type = other DNA
atgctgctgctggtgaccagcctgctgctgtgcgagctgccccacccagcatttcttttgatccccgaaaagtccgacctgagaacagtagccccagcgtcaagcctgaacgtgcggttcgattcacgcactatgaatttaagctgggattgtcaggaaaatactacttttagcaagtgcttcctgaccgacaaaaagaaccgggttgttgagcctaggctctctaataatgagtgctcttgcacttttcgcgaaatctgccttcacgagggcgtgacatttgaggtgcacgtgaatacctcacagcgcggcttccagcaaaaactgttgtacccaaattctggacgcgagggcactgccgcgcagaacttctcctgctttatctacaatgctgacctgatgaactgtacatgggcacgaggcccgacagcacctagggatgtgcagtacttcctgtatatcaggaattcaaaaaggcgacgcgaaatcaggtgcccctattacatccaagactctggaacacatgtgggttgccacctcgacaatttgtccggactcacttcacggaactacttcctcgtgaacggtactagcagggaaattggcattcaattcttcgactctttgttggacacaaagaaaatcgaaaggtttaatccaccatctaacgtgaccgtgcgttgcaacacaactcattgtttggtccggtggaaacagcctagaacttaccagaaacttagctacctcgacttccaatatcagttagatgtccacaggaagaacactcaaccgggtactgagaatctgctcatcaacgtgtcgggggacctggagaatcgctacaattttccctccagcgagccccgtgcaaagcattctgtgaagatccgcgccgccgatgtgcgaatcctgaactggtcttcctggagcgaagccatcgaattcgggagtgacgacgggaacctgggcagtgtctacatctacgtcctgctcattgtcggaacattggtgtgcggaattgtgctcgggtttctttttaagcgctttctccgaattcaacgcctgtttccgccggttcctcaaataaaggacaagttgaatgataaccacgaggttgaggacgaaattatctgggaggagttcactcctgaggagggtaagggatatagggaggaagtgttaaccgtgaaagaaatcacctag

SEQ ID NO: 183519 - DNA, 804 bp, synthetic construct
  misc_feature 1..804: note = Description of Artificial Sequence: Synthetic coding sequence
  source 1..804: mol_type = other DNA
atgaactgcacctgggcccggggccccaccgccccccgggacgtgcagtactttttatacatccgcaattcaaaacggagacgggagattcggtgtccatattatatccaagattctggaacacatgtgggatgccatcttgataatctgagtggcttgacgagccggaattactttctcgttaacggcaccagtagagagattgggatccagtttttcgattcccttcttgacacgaagaaaatcgagaggtttaatccaccctccaatgtgacagtacgatgcaacaccacccactgcttagtgaggtggaagcaaccacgcacataccagaagctgtcttatttagacttccagtaccagctcgacgtgcatagaaagaatacgcaacccggcaccgagaacctccttatcaatgtttcgggggacctcgaaaatcgctacaattttccaagctccgaacctcgggcgaagcattccgtgaaaatacgggccgctgatgtgaggatcctcaattggtcctcttggagcgaggctattgagtttggaagtgatgacggcaacctcgggtccgtttatatctacgtgctgctgatcgtgggtacccttgtatgcggcatcgttttgggctttttatttaagcgcttcctgcgaatccagcgccttttccccccagtgccccagatcaaggacaagctcaatgataaccatgaagtggaggacgaaattatctgggaagagtttaccccagaggaaggcaagggctacagagaagaggttcttacagtcaaagagataacatag

SEQ ID NO: 183520 - DNA, 2712 bp, synthetic construct
  misc_feature 1..2712: note = Description of Artificial Sequence: Synthetic coding sequence
  source 1..2712: mol_type = other DNA
atggtgctggcccagggcctgctgagcatggccctgctggccctgtgctgggagcggtcactcgccggagcagaagaaacaataccactccagaccttgcggtgctacaatgattacacgtcccacatcacttgccgctgggctgatactcaggatgctcagaggctggtgaatgtgacattgatccgtcgcgtgaacgaggatctgctggagcctgtgtcttgcgacttgtctgacgacatgccctggtcagcatgcccccatccacgttgtgtcccacggagatgcgtgattccctgccagagtttcgtcgtgactgacgtcgactattttagctttcagcccgaccgccccctggggacacgacttacagttaccctgacacagcatgttcagccacccgagccacgggatctgcagatttcgactgatcaggatcattttttgctcacctggtccgtggccctcggatcgccacagagtcactggctatcacctggcgatttagaattcgaggtggtgtataaaaggttgcaggacagctgggaagatgcggccatcctcctgtctaatacgtctcaagcgacgcttgggcctgaacaccttatgccaagcagcacatacgttgccagggtcaggactaggctcgccccagggtcccgcctctccggacggccatctaaatggtctcccgaggtatgctgggacagccagccaggggatgaagcccagccccaaaacttagagtgcttcttcgatggggctgcggttctgagctgttcatgggaggttaggaaagaggtggcctcgagcgtctcgttcggcctgttttacaagccaagtccagacgccggttcagctgttctgcttcgcgaggaagaatgctcccctgtgctgagggaaggcctcggatcactccataccagacatcattgtcagatcccggtgccagaccccgcaactcatgggcagtatatcgtaagcgttcaaccgaggcgtgctgagaagcacatcaagtcctctgtcaatattcagatggcccccccttccttgaatgtcactaaggacggtgatagctattccctgagatgggagacaatgaaaatgcgctatgagcacatcgaccatacctttgagattcagtatcgcaaggatacagcaacgtggaaagactccaagactgagactctgcagaatgcccatagtatggccctccccgcactggaaccatccacccgatattgggccagagtgcgagtacgcacctcccggacaggctataatgggatatggtccgagtggagtgaggccaggtcctgggacacagagagtgtcttgcctatgtgggtgttggcattgattgtgatttttttaaccattgcagtgctcctcgccctccgtttctgtggcatctatggctatagactgcgtagaaagtgggaggagaagataccaaatccttcaaaaagtcacctgttccaaaacggctcggccgaactctggcctccaggctctatgagcgctttcacttctggatctccaccacatcagggcccttggggaagcagattccccgagctggagggggtgttcccagtggggttcggcgactctgaggtgtctccacttactatcgaggatcctaagcacgtctgcgacccaccatccggtcccgacacgacgccagccgccagtgacctgcctaccgaacagcccccctctccccagccgggacctccagcagcgtcccacacacctgaaaaacaggcttccagctttgatttcaatggcccctacctgggccctccccactctaggagcctccctgatatcttaggacaacccgagcccccccaggaaggggggtctcagaagagtcctcctcctggaagcctggagtacttatgtctacccgcgggaggtcaagtgcagctcgttcccctggctcaggccatggggccaggccaggcggtggaggttgagcgtagaccctctcagggagcggcggggagcccatcactggagtcaggggggggcccagctcccccagcccttgggccgcgtgtcggcggtcaagaccagaaggacagtccagtagctattcccatgtcctctggtgacacagaagatcctggggtagctagcgggtacgtgagcagcgctgatctggtgtttactcccaatagcggtgcctcaagcgtcagcctcgtgccctccctgggattaccgagtgatcagaccccaagtctttgtcccgggctggcttccgggccccctggggctcctggccctgttaaaagcgggttcgagggttatgtggaactcccacccatagagggtagatcacctagaagtccaagaaacaatcctgttccccctgaagccaagtctcccgttctcaacccaggcgaacggcccgcggatgtgagtcccacctctcctcagcctgaaggcttactggtgctgcagcaagtgggggattattgcttcctgcctggccttggacctggccccctgtcgttgcgtagcaaaccctccagccctggccctgggcccgagattaagaatctggatcaggcttttcaggtaaaaaaacctcccggccaggctgtacctcaggtgccagtaatccagctgtttaaagctctgaaacaacaagactacctatctctgcctccttgggaggtgaataaaccaggagaggtatgttag

SEQ ID NO: 183521 - DNA, 2694 bp, synthetic construct
  misc_feature 1..2694: note = Description of Artificial Sequence: Synthetic coding sequence
  source 1..2694: mol_type = other DNA
atggtgctggcccagggcctgctgagcatggccctgctggccctgtgttgggagcgatccctggccggcgctgaggagacaatacctctgcagacgctgcggtgttacaacgattacacctcacatattacttgtcgctgggccgatacccaggatgcccagagactggtgaacgtgactcttattagacgcgtaaatgaggatctccttgagccagtctcctgcgacctgagtgatgacatgccgtggtcagcctgtccgcatccgagatgtgtgcctcggcggtgcgtgattccgtgccagagcttcgtggtgaccgatgtagactactttagcttccagccggaccgaccactcggtaccagactgacggtgacactcacacagcacgttcaacctcctgagcccagagatctgcagataagcacagaccaggatcactttctgctgacgtggtccgtcgcactggggtcaccacagtctcattggctctccccaggagacctggaattcgaggtggtatataagcgtcttcaggattcctgggaggacgccgccatcttgctgagcaatacgtcacaggccacgcttggacctgagcatcttatgccctcctcgacctacgtggctagagtaagaactaggctggcaccagggagccgcctctccgggcggccttcaaaatggtcccccgaagtatgttgggattcacagccgggcgacgaggctcagccgcaaaaccttgagtgctttttcgacggcgcggcggtgctctcatgtagttgggaagtcagaaaagaggttgcttccagtgtgtcgttcggactgttctataagccaagccccgacgctggagaggaagaatgcagcccagtcttacgcgaaggattagggtccctgcacacacgtcaccactgtcaaatcccagtgccggacccggctacacatggtcaatatatcgtgtccgtccagccacgacgcgccgagaagcacattaagtctagtgttaatattcagatggcacctccttctcttaatgtcacaaaggacggggattcttacagccttcgatgggagactatgaaaatgcggtacgaacatatcgatcacactttcgagattcagtacagaaaggacacagccacttggaaagactccaagaccgagaccttacaaaatgcccacagcatggcactgcctgctctggagccttccaccaggtactgggctagggttagagttagaacatcaagaacaggctacaatggtatttggagcgagtggagtgaagccagatcttgggacaccgaaagtgtactccctatgtgggttttagcactgatagtcattttcctgaccatcgccgtcctgctagccctgcgcttctgcgggatatatggttatagactgcgccgtaagtgggaggagaagattcccaacccatccaaaagtcatctgttccagaatgggagcgcagagctgtggcctccaggatctatgtccgcctttacctctgggagtcctccgcaccagggtccctggggctctcggttcccggaattagagggagtattccctgtgggcttcggagattctgaggtgagcccactgaccattgaggaccccaagcacgtctgcgaccccccctccggtccggataccactcctgccgcctctgacctccccactgagcagccaccatccccacagcccgggccccctgcagcttcccacacacctgagaagcaagcctcctcttttgattttaatggcccctacctgggacctcctcactctagatcactgcccgacatcctgggccagccagaacctccacaggaaggtggctcccagaaatccccgccgcctggatcactcgagtatctctgcctcccggccgggggccaggtccaactggtacccctggcacaggccatgggacccggacaggcagtggaggtggaaaggaggccttcccaaggggccgctggctctcccagcttagaaagcggcgggggacccgctcctcctgcacttggtccccgtgtgggcggccaagaccagaaagacagcccagtagctatacctatgtccagcggagacactgaggatcctggcgtcgccagtggctacgtgtctagtgccgacctggtgtttacacctaattcaggcgccagttcagtgtctctggtcccttccctcggccttcccagtgaccagactcctagtctgtgtcccggcttagctagcggcccacctggggccccaggtccggtgaaatccggcttcgaaggatatgtcgagctccctcccatcgaggggaggtccccccgaagtccacgaaataatcctgtgccccctgaggcgaagagtcccgtcctgaaccctggcgagagaccagcagatgtgtcccccactagcccacagccagagggcctccttgtgctccagcaggtgggagattattgctttctccctgggttgggccccgggcccctatccctgcgaagcaagccaagttcccctggccctggccccgaaattaagaatcttgatcaggcgtttcaagtgaaaaagccccctgggcaagctgtgcctcaagtgcccgtcatccagctcttcaaggccttaaagcagcaagattacttatcactgccgccctgggaagtgaataaacctggggaggtgtgttag

SEQ ID NO: 183522 - DNA, 690 bp, synthetic construct
  misc_feature 1..690: note = Description of Artificial Sequence: Synthetic coding sequence
  source 1..690: mol_type = other DNA
atgccctggagcgcctgcccccacccccggtgcgtgccccggcggtgtgtcattccatgtcagagctttgtagtgactgatgtggattacttctcttttcagcctgaccgacctcttggaactcgcttgaccgtcacactgacacagcatgtacagcccccagagcctagagatttacagatttctactgaccaggatcatttcctattaacatggtcggtagccctcgggtcacctcaatcccattggctgagtcccggagatctagaattcgaggtggtgtataagcgtctgcaggactcctgggaagatgccgctatactcttgagcaacaccagccaggcgactcttggccctgaacatttgatgcccagttcaacgtacgtagcaagagtccgaaccaggctggcaccgggtagcagactttcaggtagaccttccaaatggtctccagaggtttgctgggactcacagcccggggacgaggcccagcctcagaatttagaatgtttttttgacggagccgctgttctaagttgctcctgggaggttaggaaggaggtggctagctctgtctcgtttggcctgttttacaaaccttcacctgatgcaggcgaggaggaatgctctccggtgttgagggagggactgggcagcctgcacacgcgccaccactgtcaaattccctag

SEQ ID NO: 183523 - DNA, 2535 bp, synthetic construct
  misc_feature 1..2535: note = Description of Artificial Sequence: Synthetic coding sequence
  source 1..2535: mol_type = other DNA
atgggcaagctgcggccctggcgggacctgctggagcccgtgagctgcgatctttcggatgatatgccttggtcagcatgcccacaccctaggtgcgtacctaggcggtgtgtgatcccatgtcagagtttcgtggtaaccgatgtggattacttttcatttcaacctgaccgcccgctgggaactagactgaccgtcaccctgactcaacatgttcagccgcccgagcctcgagatcttcagatctccacagaccaagaccattttttgctcacctggtctgtagcgctgggctccccccaatctcactggctgtcccccggagacctcgagtttgaggtggtttacaagcggcttcaggactcctgggaggacgccgccatcctactgtccaacacctcacaggcaaccttagggccagaacacctgatgccctcatcgacctatgtcgcccgggtgaggacgaggctggctcccggctccaggctgagcggtcggccgtcaaagtggtcgccagaggtgtgttgggattctcagccaggcgatgaggcccagccccagaacttggagtgcttcttcgacggcgctgctgttttaagctgttcctgggaggtgcgcaaagaggtcgcgagcagtgtttcgtttggactgttctataagcctagtccagacgctggctctgccgttctgcttcgcgaagaagagtgctctcccgtccttcgggaaggtttgggcagcctgcatactagacatcactgccagataccggttcccgatcctgctacccatggccaatatatcgtcagcgtgcagccccgccgcgcagaaaagcacatcaaatcatccgtgaatatccagatggccccacccagcttaaatgtgacgaaagacggcgacagttacagtttacgttgggagaccatgaaaatgcgctacgaacatattgatcacactttcgaaatccaatatcgcaaagacacagccacctggaaggattctaagaccgaaactttgcagaacgcacactctatggcactacccgcactggaaccttcgaccagatactgggcgagagtgcgggtcagaacctcccgcaccgggtataacggaatctggagcgagtggagcgaagcgagatcatgggacacagagtccgtccttccaatgtgggttcttgcactcatagttattttccttactatcgctgtgctgctcgcgttgaggttctgtggcatctacggttatcggctgaggcggaagtgggaggaaaaaatcccgaacccaagcaagtcccatctgttccaaaatggctctgctgaattgtggccccctggaagtatgtccgccttcacaagcgggagtccacctcatcaaggcccatggggatcccgctttcccgagcttgagggcgtgttccctgttgggtttggggactctgaggtcagtccattgactattgaggatcctaagcacgtgtgcgacccccccagcggcccggataccaccccggccgctagtgacttacccaccgaacagccacccagccctcagcctggccctcctgccgctagtcacaccccagaaaagcaagcaagctctttcgacttcaatggcccctacttaggaccgccccattcacgaagcctgccagacatcctgggacaaccggaacccccacaggagggcggaagccagaagagcccaccccctgggagcctggagtatctgtgcctgccagccggcgggcaggtccagctcgtgccgcttgcccaagctatgggccccggccaggctgtggaagtggagaggaggcctagccaaggtgcagctgggtcaccctcacttgagagcggaggtgggcccgccccacccgccctggggccccgcgtgggcggtcaggatcagaaggattcaccggtcgccatcccaatgtcctctggtgataccgaagaccccggtgtggcgtctggctatgtgtcgagcgcggacctcgtgttcactccaaattcgggggcttccagtgtgagcctggttccgagtttaggactgccgagtgaccagacaccttccctgtgccccggcctggctagcggacctcccggcgccccgggtcccgttaaatcggggttcgaggggtatgttgagctgccgcctatcgaggggaggtctccccggtcaccccgcaataatcccgttccacctgaagccaagtctccagttttgaatccaggggagaggcctgcagatgtgtccccaacatccccacagcccgaaggcctgctggttctgcagcaggttggcgactattgttttctgccgggtctaggtcccggacctttgagcctgcgctcaaagcctagctctccaggacctggcccagagatcaagaacctggatcaggccttccaggtaaaaaagccacctgggcaggccgtgccacaggtgccagtgattcagcttttcaaggccttaaagcagcaagattatctatccctcccaccatgggaggtaaacaagcccggcgaggtgtgttag

SEQ ID NO: 183524 - DNA, 2670 bp, synthetic construct
  misc_feature 1..2670: note = Description of Artificial Sequence: Synthetic coding sequence
  source 1..2670: mol_type = other DNA
atggtgctggcccagggcctgctgagcatggccctgctggccctgtgttgggaacgctctctggccggcgctgaggagaccatcccactccagacgctgagatgttacaatgactacacttcacacattacatgtaggtgggctgatacacaagatgcccagcggcttgtgaacgtcactttgatccggagagtgaacgaagacctgctggagcccgtgtcctgtgatctaagtgatgacatgccctggagcgcttgcccccatccgcggtgtgtacccaggaggtgtgtgattccatgccagtcattcgtggtgactgatgtggactatttttcgtttcaacccgataggccactagggacgcgcctgaccgtcacactgacacagcatgtccagcctccggaaccccgcgacttgcagatctcaaccgatcaggaccattttctacttacctggagtgttgccttaggaagcccccagagccactggctcagtccaggcgacttagaattcgaggtcgtctacaagaggctgcaagattcatgggaggatgctgctatcctgctcagcaacacctcacaggctacactcgggcccgaacatctgatgccgtcatcgacgtacgtagccagagttcggactcgactggccccgggctctagactcagtggaaggccttccaagtggagtccagaggtgtgctgggacagccagcctggggatgaggcccagccacaaaatctcgagtgcttcttcgacggggccgccgtgttgtcttgcagctgggaggtgagaaaggaagtcgcttcttccgtttctttcggcctattctataagcctagccctgatgccggggaagaagaatgctcgcctgttctccgggaaggacttggatccttgcacacccgacaccattgccagatccctgttcccgaccctgcaacacacggccagtacattgtcagtgtccagccacgacgcgcagaaaaacatattaagagctcagtaaatatccaaatggcacctccttcactaaacgtgaccaaagacggtgattcatacagtctcagatgggaaacaatgaaaatgcggtacgagcacatcgatcacaccttcgagatccagtaccgaaaagatacagccacgtggaaggattctaagacagagactctgcagaacgctcactccatggccctccctgccctggaaccttccacgcgctattgggctagagtccgcgtgcgcactagcagaactggctataacggcatttggagtgaatggagtgaggcacgctcttgggacaccgaaagcgtgctcccaatgtgggtgttggcactgatcgtgatctttcttacaatcgcagttctcctggccctaaggttctgcggcatttatggctacaggctccggcggaagtgggaagagaaaattcccaatccgtccaagtctcacttattccagaacggcagtgccgagctgtggccccctggaagtatgagcgccttcacctccggaagccctccccaccaggggccgtggggctcccgatttcccgagctggaaggggtgttccccgtgggctttggggacagtgaagtgagtccactgacgatcgaagaccccaagcatgtatgcgacccaccctcgggacccgatactacgcccgccgcaagtgacttgcccacagaacagcctccctccccacagccagggcctcctgccgcctcccacacaccagagaagcaggccagcagtttcgatttcaatggtccttacctggggccaccacactccagatctttgcctgacatcctgggacagccggagcccccgcaggaagggggatctcagaaatcgcctccccctggaagcctcgagtacctgtgcctccccgccggcgggcaggtgcagctcgtgcctctggcccaggcaatgggcccaggccaagcggtcgaagtcgaacggagaccatctcaaggcgctgccgggtcccccagcctggagtctggaggagggcctgcgccacctgcattgggccctcgagtgggcggccaggaccagaaagactcccccgtggcaatccctatgagcagcggtgataccgaagaccctggggtggctagcggttacgttagctctgctgatttagtgtttacacccaacagtggggcttcaagcgtgagtctggtaccttcgttaggtctcccatccgatcagactccgtctctttgtccgggccttgccagcggtcccccgggggcgccgggccccgttaagtcaggattcgagggatatgtcgaactgccgccaatagagggcagaagtccccggagcccacgtaacaatccagtcccaccggaagccaagtctccagtgctgaatcctggagaaagacccgctgatgtgagcccaacctcacctcaacccgagggactgttggtcctgcagcaggtaggtgactattgcttcttgccggggctgggcccaggtccactatccctgaggtctaaaccttctagccccgggcctggtcctgagatcaagaacctggaccaggcattccaggtgaaaaagccccccggtcaagccgtaccccaggtgcctgtgatccaactgtttaaagccttggtggtaagcgtgatgagtgtaggcccaccggtgccatag

SEQ ID NO: 183525 - DNA, 2352 bp, synthetic construct
  misc_feature 1..2352: note = Description of Artificial Sequence: Synthetic coding sequence
  source 1..2352: mol_type = other DNA
atggcccggctgggcaactgcagcctgacctgggccgccctgatcatattgctactccccggatcactggaggagtgtggacacatttcagtttcggctcctatcgtccatctgggggatccaatcaccgcaagttgcattattaagcagaactgtagccacctggatccagagccccagatactctggagacttggagctgagctgcagcctggaggtcggcagcagcgtctttcggatggcacacaggagtctatcataaccctccctcacctgaatcacacccaagccttcctctcatgttgcctcaactgggggaactccctccagattctcgatcaggtcgagcttcgtgctggataccctcccgctatcccacacaacctctcctgtctcatgaatctgaccacctcttcattgatatgccagtgggaaccaggtccggaaacacacctgcccaccagctttacactaaaatcctttaaatccaggggcaattgccagacccaaggggattcaattctggactgcgtgccaaaggacggtcaatctcattgctgtattcctcgcaagcatctgctcctgtaccagaatatggggatttgggtgcaggcggaaaatgcgctcgggactagtatgtctcctcagctttgcctcgatccaatggacgttgttaagctagaaccaccgatgctccggaccatggaccccagccctgaagctgctccacctcaggcgggctgcctgcagctgtgctgggaaccttggcaacccggactgcacatcaaccagaaatgtgagctaaggcacaagccccagcgtggagaggccagctgggcactggttggccctttgccgctcgaggctctgcagtatgagttatgtgggcttctacctgccactgcatacaccctgcaaatccgttgcattcgctggcctttgccgggtcattggtcagactggtctccttccttagagttgcgaactacagaaagagcgcccacagttcgtctggatacttggtggaggcaacggcaactggatcctaggactgttcaactgttctggaaaccagtgccactggaagaggacagtggtaggatccaggggtatgtagtcagttggagacccagtggtcaggctggtgctatcctgcccctgtgtaataccaccgagctgtcctgtacctttcatctccctagcgaggcccaggaagtagccctcgtggcgtacaacagtgcaggcacatcccgaccaactccagtagtcttttccgaatcacggggaccagcgctcacaagactgcatgcaatggcgagggatccacactccctatgggtaggctgggaacctcctaacccatggcctcaagggtatgttattgaatggggattagggccaccctccgctagcaattcaaataaaacatggcgcatggagcagaatggtagagccactgggtttctgttgaaagaaaatattcgacctttccaactttacgagattatcgtcacacctctgtatcaggatacgatggggccgagtcagcacgtttacgcttactctcaggagatggctccttcccacgcgcctgagttgcacctgaagcacatcgggaagacatgggcccagctcgagtgggtgcctgagccccccgagctcggaaagagtcctctgactcactatacaattttctggactaacgcgcagaaccaaagtttctccgcaattttaaatgcctccagcagggggttcgttcttcacgggctggagcctgcgagtctgtaccacattcatttaatggctgcaagccaggccggtgcgaccaacagcacagtgttaactctgatgacccttacacccgagggatctgaactgcacatcatcctgggcctctttggtttgctgcttctgctgacttgtttatgcggaactgcttggctgtgttgttcccccaatcgcaaaaaccctctgtggccatctgtccccgatcctgctcatagctctcttggtagctgggtacccaccattatggaggaggatgcttttcagctccccggcctcgggacaccccccattaccaagctgactgttctcgaggaagacgagaagaaaccagtaccatgggagagtcataatagttctgaaacttgcggtctccctacattggtgcagacctacgttctgcagggtgatcccagagctgtctcaacacagccccagtctcagtccggcaccagcgatcaggccggacctcctcgccgatcagcatattttaaggaccaaatcatgctgcaccccgcgccacctaacgggttgctttgcctgttcccaataactagcgtgctgtag

SEQ ID NO: 183526 - DNA, 2310 bp, synthetic construct
  misc_feature 1..2310: note = Description of Artificial Sequence: Synthetic coding sequence
  source 1..2310: mol_type = other DNA
atggcccggctgggcaactgcagcctgacctgggccgccctgatcattctgctcctccctggttccttggaagaatgcggccacatctcagtgagcgcccctattgtgcatttgggcgatccaatcaccgcttcatgcataatcaaacagaattgctcgcacttagacccagagccccagattctatggcgcctcggtgccgagctgcagccaggaggccgccaacaaagactgtctgacggtacccaagagtccatcattaccttaccccacttgaaccacactcaggcatttctgtcctgttgcctgaactggggcaacagcctgcagattcttgaccaggtggagttgagagccggatacccaccagccatcccgcacaacctgagttgtttaatgaacctgaccacctcaagcctcatttgccagtgggaacccgggcccgagacacatttgcccacttcctttacactcaaatcttttaagtccagagggaactgccagactcagggcgatagtatactcgactgcgttccaaaggacggccagagccactgctgtattcctcgcaagcatctgctcctgtaccagaacatgggcatttgggtgcaggccgaaaacgctctaggtacttcgatgagcccccagctgtgtttagatccgatggatgtagtgaaactcgaacctccgatgctgcggacaatggacccatcccctgaggctgcaccccctcaggcaggctgcttgcaactctgctgggagccttggcagcccggactgcatatcaaccagaagtgtgaactgaggcacaagccccagcgtggtgaagccagttgggctctggttggacctctgccattggaagccctccagtacgagctctgcggattgttaccggccaccgcatatacattgcaaatacggtgtattagatggcctctgcccggtcactggagcgactggagcccctcattggagctcaggaccaccgagagggcgcccaccgtgcgcctcgatacctggtggcgacagaggcagctggatcctcgcactgtgcaactgttttggaaaccagtccccttggaggaggatagtgggaggatccaaggatacgtggtgtcatggcggccttctggccaggcaggtgctattcttcccttgtgtaacaccactgagctctcctgcactttccacctgccatccgaagcccaggaggtagccctcgttgcttataactctgccggtacctcaagacccacgcccgtcgtatttagcgagtcaagaggccccgcgcttacaaggctgcacgccatggcaagagaccctcattctctctgggtcgggtgggagccacctaatccgtggccacaagggtacgtgatcgagtggggcctcggaccaccctccgcctccaactcgaataaaacctggcgcatggagcaaaacggacgggcaactggattccttttgaaggagaacatacgcccatttcagctctatgaaatcatcgtaacacccttgtatcaggatacgatggggccctcccagcacgtctatgcttattcacaagagatggctccgagccatgcacccgagttgcatcttaaacacattggaaaaacttgggcccaactggaatgggtgcccgagcctccagagttgggtaaatcgcccttgactcattatactatattctggactaatgctcagaaccagagctttagtgcaatcctgaatgcctcctcgcggggcttcgttcttcacggcttggagcccgcaagcctgtaccatatccacctaatggcagcatcccaggccggcgccaccaacagtaccgtgctcactctcatgaccctcacaccggccggccggatcccttccggacaagtgtcccagacgcagctgaccgctgcctgggcacctggatgcccacaaagttggcgccgaatgcccagtagttgccctgccctggctcggcatccttcaccttcaagccaatgctggagacgaatgaagcgaagcaggtgtcccggatcaccgataactgcacagcgacccgttgcgagcccgctctggtctcggcccatgtgttctcgtggaactcaggaacagtttcctccgagccccaacccctcacttgccccagctatcagatcattcatggggtcatgctgggcagcgccgcaagctcagggtcagggcaccatttccgctgtcacaccactgagcccatcctggcgggcatcgcccccagcccccagtcctatgagaacgagtggttctagaccggccccttggggcccttggtag

SEQ ID NO: 183527 - DNA, 2511 bp, synthetic construct
  misc_feature 1..2511: note = Description of Artificial Sequence: Synthetic coding sequence
  source 1..2511: mol_type = other DNA
atggcccggctgggcaactgcagcctgacctgggccgccctgatcatcctgctcctccctgggtccctcgaagagtgtggacacatttcagtgagcgcccccatcgtgcacctaggcgaccccataacggctagctgcattatcaaacagaactgtagccatttggacccggagcctcagattctatggcgcctgggtgccgaattacagcctggcgggaggcaacagcgattatccgacggaactcaagaatcgattattaccctcccccatttgaatcacactcaagccttcctctcctgctgtctcaattggggcaatagtctccagattctggatcaggtggagctgagggccggctaccccccggcgattccgcataacctcagctgcttgatgaatctgacaaccagttccctgatctgtcagtgggagccaggtcctgagacccacttgccaacctcttttacccttaagagcttcaaatccaggggaaattgtcagacccagggcgattctattttggactgtgttccaaaagacgggcaatctcattgctgcattcctcgaaagcatttactgttgtaccagaacatgggcatttgggtgcaggctgaaaacgcactgggcacgtcgatgagtcctcagctctgcctggaccccatggatgtggtgaagcttgagccaccaatgctccgtactatggatccctctccggaggcagcaccacctcaagccggttgtctgcaactgtgttgggaaccttggcagccaggacttcacataaaccagaagtgcgagctcagacacaagcctcaaagaggcgaggcgtcttgggcgctcgtgggcccactgcctctagaggcccttcagtacgaactgtgcggtttacttccggccacagcttacacgttgcagatcaggtgcatacgatggccgttacccggtcattggtccgactggtctccaagcctggaactgcgtacaacggaaagagcgcccactgtgcggctggatacatggtggagacagcggcagctcgacccccggaccgtgcagctgttctggaagccggttccactggaagaggactcaggaagaatccagggatacgtggtttcctggcgacccagtgggcaagccggagcgattctgccgctttgcaacacgaccgagcttagctgtacattccacctgccgagtgaggctcaagaggtagccctggttgcatataattctgccggaacatctagacctacccccgtggtattttccgagtcacgaggacccgccttaacgcgactgcacgcaatggcccgcgacccgcatagcctttgggtcggctgggagcctccgaacccctggcctcaagggtacgtgattgaatgggggctgggaccaccatcagcctccaactctaataaaacttggcggatggagcaaaacgggcgcgctactggcttccttttgaaggagaatattaggccttttcaattgtacgaaatcatcgtaaccccactgtaccaggacacaatgggccccagccaacacgtatacgcgtacagccaggaaatggcaccctcacatgctccagagctgcatctgaaacatatcggaaaaacgtgggcccaattggaatgggtccccgagcctccggagctggggaaatcaccactcacccactatacaatcttctggactaacgcccagaaccaaagtttctccgcaatcttaaatgcctcaagcaggggctttgtactgcacggcctggaaccagcctccctatatcacatccatctgatggctgcctctcaggctggcgccactaatagcaccgtgcttaccttaatgacgttaacccctgaaggctcagagctgcacattatcctcgggctcttcggtctcctgttgctgctcacatgcctatgtggtactgcttggctctgttgtagccccaatagaaagaacccactttggccctcggtgcccgatccagcccactcttccttaggcagctgggtacccaccattatggaggaagacgcgtttcagctacccgggttgggtacaccgcccatcacaaaattaacagtcctagaggaagacgagaagaaacccgttccctgggagtctcataactcgtcagaaacctgcggtctgcctacattagttcagacctatgtactccaaggcgatccccgtgcggtgagcacccagcctcagtcccagtccggtacctctgatcaggttctctacgggcagttgctcgggtcccctacttcaccaggccccggacactacctgcgttgtgattctacacagcccctgttagcaggcctgacaccctctccaaagtcctatgagaacttgtggttccaagcttccccattgggcactttagtcacaccagctcccagccaggaggatgactgtgttttcgggccgctcctgaatttcccgctgttacagggaataagggtgcacgggatggaggctttgggctcattttag

SEQ ID NO: 183528 - DNA, 2592 bp, synthetic construct
  misc_feature 1..2592: note = Description of Artificial Sequence: Synthetic coding sequence
  source 1..2592: mol_type = other DNA
atggcccggctgggcaactgcagcctgacctgggccgccctgatcatattactgctgcctggttccctagaggaatgtggtcacatatcagtctcggcccctatcgtgcacctgggcgaccctataaccgcatcttgcatcataaaacagaattgctctcacctagatcccgagcctcagatcttatggcgactgggcgcagagctgcagccaggcggcagacagcagcgtttgtctgacgggacgcaggagagtattattaccctgccccatctcaatcacacccaagcctttctgtcgtgctgtctgaactggggcaattctttgcagattctggaccaggtggagctcagggccggttacccacccgccattccacataatctttcttgccttatgaatctgacaactagctcgctcatttgccagtgggaacctggtcccgagacacacctgcccaccagtttcacactcaaatcttttaaaagtcgaggaaattgccagacccagggggatagtatcctcgactgcgtgccaaaggatggacagtcgcactgttgcatccctcgtaaacatctcttgttataccaaaacatgggtatctgggtacaggctgagaacgctcttggcacatcgatgagccctcagctctgcttagatcctatggacgtggtgaaactggagcccccaatgctgaggacaatggacccatcgccagaggccgcccctcctcaggcagggtgcctgcagctgtgttgggagccttggcaacccggcctgcatattaaccagaagtgcgagctcagacacaagcctcaaaggggcgaagcctcatgggctttggtgggtccactgccccttgaggcactgcagtatgagctgtgcggcttgctaccagcgacagcgtatactttgcagatccggtgtattagatggcccttgcccggccattggtctgactggagcccatcgctcgagttacgtactaccgaaagagcccccacagttcggctggacacgtggtggcggcagaggcagctggatccaaggacagtccaactcttctggaaacctgtgccccttgaagaagacagcggccgcattcaaggctacgtggtaagctggaggccgtcaggccaggccggcgctatcctgccactctgtaacacaaccgagctgtcctgcactttccacctcccaagtgaagctcaagaagttgccttagtggcgtataactcggcagggacaagccggcctacgcccgtcgtgttcagcgagagtcgggggcccgcactaacgaggctacatgcaatggccagggatccgcattccctgtgggtgggatgggagccacccaacccctggccccaaggatatgtgatcgaatggggtttgggccctccctccgcgagtaacagtaacaagacctggagaatggaacagaatgggcgagctactggttttttgctcaaggaaaacatccggccttttcaactgtacgaaatcatcgtcaccccattgtatcaggacaccatggggccaagtcaacatgtttacgcctactcccaggagatggcaccctcacacgctccagaactccatcttaaacatatcggcaagacgtgggcacagttggaatgggtgccagagccacccgagctcggaaagtcacccctgacacactacacaatcttttggaccaatgcccagaatcaatcctttagcgctattctgaacgcctcgtcccgtggattcgtcctgcacgggctggagcctgctagcctgtaccacatccacctcatggccgcatcccaagctggagccacaaactcaaccgtcttgaccttaatgacattgactcctgaggggtccgagctgcacatcattttaggattgtttgggttgcttctgctgctgacttgcttatgtggcactgcttggctctgctgttcacctaaccgcaaaaacccactatggccaagtgtgcctgaccccgctcacagcagcctgggcagttgggttccaaccattatggaggagctgccaggccctcgtcagggacagtggctgggtcagacgtctgagatgtctagagccctgactccccatccctgtgtccaggacgctttccagcttccgggccttggcactccacctataacaaaactgacggtactcgaagaggatgaaaaaaagcctgtcccttgggaatcccacaactcctccgagacttgcggattgcccaccttagtccagacgtacgtgctgcagggcgatcctcgggccgtctcaactcagccacagagccaatccggcacaagcgaccaggtcctctatggtcagctgcttggaagccccacctctccaggccctggacattacctgaggtgtgacagcacccaaccactcctggccggactgacaccttctcccaagagctatgagaacctctggttccaggccagtccactgggcacgctggtgacccctgctcccagccaggaggatgattgtgtgttcgggccactgctgaactttcccctgctacagggcatcagagtgcacggcatggaggccctgggctccttttag

SEQ ID NO: 183529 - DNA, 2352 bp, synthetic construct
  misc_feature 1..2352: note = Description of Artificial Sequence: Synthetic coding sequence
  source 1..2352: mol_type = other DNA
atggcccggctgggcaactgcagcctgacctgggccgccctgatcatcttgctcctccccggcagtctcgaggagtgtggtcatatcagcgttagtgcacccatcgtccatctcggagaccccattaccgcctcatgcattatcaagcagaattgcagtcatctggaccctgagccacaaatcctgtggcgcctgggggcggagctccagcccggaggacggcagcaacgtctgagcgacggtacccaggaaagcataattactcttcctcaccttaaccatactcaggcattcctgtcgtgttgtctcaattgggggaattctctgcagattttagaccaggtggagctgcgggcgggctatccccccgcaattccccacaacctgtcttgtttgatgaacctcacaacctcctctctcatttgtcagtgggaacccggacctgaaacccacctgcctacgtcttttactctgaaaagctttaaaagcagaggaaattgtcagacccaaggtgacagtattctggattgtgtacctaaggacggccagagtcattgttgcatacccagaaagcatttgctgttataccagaatatgggaatctgggttcaagccgaaaacgccttggggacgagcatgagtccccaactctgcctggacccaatggacgtggtgaagttggagcctccgatgcttaggacaatggatccatcccctgaagctgcacctccccaagctggatgcctgcaactctgttgggagccgtggcagccgggactgcacataaaccagaagtgcgaactgcggcataagccccagaggggggaggccagctgggctctagtgggaccgttacccctggaagcattgcaatacgagctctgcgggctattgccggccacagcctacaccttacaaataagatgtatccgttggccactgcccgggcactggtccgattggagccccagtctggagcttaggaccacagaacgggcacctacagtgaggctggacacgtggtggcggcagcggcagttggacccgagaaccgttcaactgttttggaagcctgtaccgctagaggaggatagtggccggatccagggctatgtggttagttggcgcccttctggacaagccggggccatactgccactctgcaatacaacagagctatcttgtactttccacctgccctccgaagctcaagaagtggccctggtggcgtataacagcgccggcaccagccgtccgacgccagtcgtgttctccgagtctcgcggccctgctctcacccgccttcacgctatggccagggacccacactcattgtgggtggggtgggagccacctaacccatggccccagggttacgtgattgagtgggggctcggtccacctagtgccagcaattcaaataaaacttggcggatggaacagaacggacgtgctacaggttttttattaaaggagaacattagaccatttcagctgtatgagataatcgtgaccccactctaccaggataccatgggccccagtcaacacgtctatgcatacagccaagagatggcccccagccatgcaccggagttacacttgaagcacatcggaaaaacgtgggcgcagctggagtgggtccccgagcccccagagttagggaagtcacctctcacacactatacaattttctggaccaatgcccaaaatcagtccttttccgcaattcttaacgcctcttcccgcggatttgtgttgcatggactggaaccagcctctctgtatcacatccacctcatggccgcctctcaggcaggtgcaaccaacagtactgttctgactcttatgacactcactccagagggctctgaactgcatataatcctgggcctgtttggattgctcctgcttctgacttgcctgtgcggcaccgcctggctatgctgtagccctaatcgtaaaaacccgctgtggccctccgtgcctgacccagcacattcctcgctcggtagctgggtccctactatcatggaggaggacgcattccaacttcccgggctggggacacctcctatcaccaaactgacagtccttgaagaagatgagaagaagcctgtgccatgggagtcacacaactcctcggagacctgcggactgccaacccttgtccagacctatgtgctacaaggagaccccagggccgtgagtacccagccccaaagccagtccggcacgtcagatcaggcggggcctccaagaagaagcgcttactttaaagatcagattatgctccaccctgcacctcctaatggtttgctatgcctgtttccaatcacatcggtgctctag

SEQ ID NO: 183530 - DNA, 2511 bp, synthetic construct
  misc_feature 1..2511: note = Description of Artificial Sequence: Synthetic coding sequence
  source 1..2511: mol_type = other DNA
atggcccggctgggcaactgcagcctgacctgggccgccctgatcatcctgctgttgccgggatcccttgaggagtgtgggcatattagcgtgtcggccccgattgtgcaccttggtgaccctattaccgccagctgtatcattaagcaaaactgctcgcacctagaccctgaacctcagatcctgtggcggctcggcgcggagttacagcccgggggtaggcagcagaggctgtccgacgggacacaggaatctattatcactctccctcatctcaaccacactcaggcattcctgagttgctgcctgaactggggcaactccctgcagatcctggaccaggtggaacttcgggcaggctatccacccgccataccccataacttatcttgtcttatgaatcttactacctcgagcttaatctgtcaatgggaacccggcccagaaacacacctgccaacttcgttcactctgaaatcatttaaaagcagggggaactgtcagactcaaggtgacagtatcctcgactgcgtgcccaaagatggacagtctcattgctgcataccccgcaagcacctgctattgtatcagaacatgggcatatgggtgcaagccgaaaacgccctgggaacaagcatgtcacctcagttgtgtctcgatcctatggacgtcgtcaaacttgagccaccgatgcttcggaccatggatcccagcccagaggccgcccccccccaggccggatgtcttcaactctgctgggaaccttggcagcccggcctgcacataaatcagaagtgtgagctgcgtcataaaccccaacgcggggaagcaagctgggcgttggtaggccccctccctcttgaagctctccagtacgagttgtgcggcctacttcccgcaactgcatataccctccagataagatgtattcgatggcctctccctggccactggtccgactggtctccttcacttgaattaaggaccaccgagcgcgcccctaccgtccgcctagacacctggtggcgtcagcggcagctggatccacgcaccgtgcaactcttctggaagccagttccgctcgaggaagattctggcagaatccagggatatgtggtgagctggaggcctagcggccaggccggcgctatcttgccactttgtaataccactgaactgagttgcacattccatctgccgtcagaggcccaagaggtcgcacttgtagcatataacagcgcaggtacttcaaggcccactccagtggtcttttcagagtctcgggggccggcattgacacgcctccacgcaatggccagggatccacattcactgtgggtgggctgggagcctcccaacccatggccccagggctatgtaatcgaatggggcctgggacctcccagtgcttctaattctaataagacttggcgaatggaacagaatggccgagcgacgggcttccttctcaaagagaacatcagacccttccagttgtatgagattattgtcacccctctctaccaagataccatgggcccctcacagcatgtttatgcttactcccaagaaatggccccatctcacgccccagagctccacctaaaacatattgggaaaacctgggctcagctcgagtgggttcccgagcctcctgagttgggaaagtcaccccttactcactacactatcttctggactaacgcacagaaccaaagcttttcagccattctgaacgctagttccagaggttttgtgctacacggcctggagccggctagcctgtatcacattcatttgatggctgcctcacaagcaggggctaccaattccaccgtgttaaccctgatgaccctgacacccgagggtagcgagctacacatcatcctggggctctttggactgctgctgttactgacctgcctgtgtggcacagcctggctgtgttgttcacccaaccggaagaatccgctgtggccgtctgtccctgatcctgcacacagctctctgggatcctgggtgcctaccatcatggaagaagacgccttccagctccctgggctgggaactcctccaattactaagctcaccgtactggaagaagatgaaaagaagcctgttccttgggaaagccacaattcatctgaaacatgtgggctgccgacgctggtgcagacgtacgtgttgcagggagatccccgggccgtttctacccagccgcaatctcagtccggcacgagcgatcaagtcctgtacggtcaactgctggggtcccctactagtcccggccctggacactatctgcgatgtgattctacacaacctctgctggccggactgactccatcgccaaagagttatgagaacttatggttccaagcatctcctctcggcacccttgttacgcccgccccctcacaggaagatgactgtgtgttcggcccgcttctgaattttccactactgcaggggatcagagtgcatggcatggaggccctgggcagcttttag

SEQ ID NO: 183531 - DNA, 2511 bp, synthetic construct
  misc_feature 1..2511: note = Description of Artificial Sequence: Synthetic coding sequence
  source 1..2511: mol_type = other DNA
atggcccggctgggcaactgcagcctgacctgggccgccctgatcatactgctgctgccgggatcactggaggaatgcggccatattagcgtgagcgctcctatagtgcacctaggcgacccaataacagcttcgtgcattatcaagcagaactgttcccacctcgaccctgaaccccaaattctttggcgcctcggggcagagctacaacctggaggcaggcagcagcgcctgtcagacggcacgcaggaatccatcattactctgcctcacctgaaccatactcaggcattcttgagctgctgtcttaactggggcaatagccttcagattctcgaccaggtggagctgcgcgctggatatcctcccgccatcccccataatctttcatgcctaatgaacttgaccacatcgtccctcatatgtcaatgggagcctggaccggagacccaccttcccacgtctttcacactaaaaagctttaagtcacgggggaattgccaaacccaaggtgattctattctggattgcgtgccaaaagatggacagtcccattgctgcattccgcggaagcacctcttactgtaccagaacatgggcatctgggtgcaggctgaaaatgctttaggcaccagcatgtctccccagttgtgcctcgaccctatggatgtcgtgaagctggagccgcccatgctcaggaccatggatccgtcccctgaggctgcccctccacaggccggttgcttgcagctctgctgggaaccctggcagccagggctccatataaatcagaagtgtgagctgcgccacaaacctcagcggggagaggccagttgggcactggtgggccccctcccattggaggctttacagtacgagctctgtggtcttctccctgctacagcctataccttacagattcgctgcatccggtggcccctccctggccactggtcagattggtcaccttcattggaactccgtactacagagcgggcaccaacagtcaggttggatacctggtggcgtcagcgccaactggatcccaggaccgtacagctcttctggaaaccggttccacttgaagaggatagcggtcgaatacaggggtacgttgtgtcatggagaccctcaggccaggccggcgcaatcctgcccctgtgtaataccaccgagctgagttgcacatttcaccttccgagtgaagcccaggaggtcgctctcgtggcctataatagcgctggaacctcacgacctactccagtagtttttagtgagagccgggggccagctctgaccagactccacgcaatggctcgagacccccactccctttgggtgggctgggaaccaccaaacccatggccacagggatacgtgatcgaatggggactgggaccgccaagcgcatccaattcgaacaagacatggcggatggaacagaacggccgcgctacaggattcctgcttaaagaaaatattaggccatttcaattatacgagatcatagtaactccactgtaccaggatactatggggccttcccagcatgtgtacgcgtattcgcaggagatggcgcctagtcacgctcctgagcttcacctgaaacatattgggaagacgtgggctcagctggaatgggtaccagagccccccgaacttggcaaatcaccactcacccattacaccatcttctggaccaacgctcagaaccagtcgttttccgccatcttgaacgccagttcccggggttttgtgctgcatggcctagagcctgccagcctttatcatattcacctgatggctgcctctcaggccggagccaccaatagcaccgtgctgaccttgatgacccttacaccagaaggctctgagcttcacattattttagggctctttgggctgctcctcctgctcacttgtttgtgtggcactgcctggctttgttgtagtcctaacagaaaaaaccctctgtggccctccgtccccgaccccgcgcattccagtctcggtagctgggtgccaaccatcatggaggaagacgctttccaactgccaggattaggcaccccacctatcacgaagttaaccgtccttgaagaagatgagaaaaagccagttccgtgggaaagccacaattcttctgagacttgtggcttaccaacccttgtgcagacctatgtgctgcaaggagacccccgcgccgtgagtacacagccccagtcccaatcaggcaccagcgatcaggtcttatatgggcagctacttggctccccaacatcccccgggccaggccattacctgcgctgtgactccacccaaccactgctagcgggactaacgccaagccctaaatcttatgaaaatctgtggttccaagctagccctttaggcaccctggtaacccctgctccctcacaggaggacgattgtgtttttggccctctgctgaacttcccattgctgcagggtatccgcgtgcacggcatggaagccctgggcagcttttag

SEQ ID NO: 183532 - DNA, 2592 bp, synthetic construct
  misc_feature 1..2592: note = Description of Artificial Sequence: Synthetic coding sequence
  source 1..2592: mol_type = other DNA
atggcccggctgggcaactgcagcctgacctgggccgccctgatcatcttactcctgcccgggagcctcgaggaatgcggacacatttccgttagcgctccgatagttcatctgggcgaccccataactgcctcctgcataatcaaacagaactgctcgcacctggacccagagcctcaaatactgtggagactgggtgccgagttgcagcctggtggacggcagcagaggctctccgacggcacgcaggagtcaatcattaccctgccccatctgaatcacacacaggccttccttagttgttgtctcaattgggggaatagtcttcagatacttgaccaggtcgagttgcgagctggctatccacctgctattccccataacctctcttgtcttatgaatctcactacaagctccttgatttgccaatgggagcccgggccagagactcacctccccacctcctttacacttaaaagctttaagagtcggggcaattgccagacacagggagactctatccttgactgtgtccccaaggatgggcagtcacactgctgcatcccgaggaaacatctcttactttaccaaaatatgggcatctgggtgcaggcagaaaacgcactcggtacctcaatgtccccgcagctctgtctcgatcccatggacgtggttaagctggaaccacctatgcttcggaccatggatcctagccccgaagctgcaccaccacaggccgggtgtctgcagctgtgctgggagccctggcaacccgggttgcatatcaatcagaaatgcgagcttagacacaagccccagcgcggtgaggcatcttgggcgctggtgggccctctccctctggaggctcttcagtacgagctgtgtggtttactgccagcaacggcctataccctgcaaatcagatgcatccggtggccgctgcctggacattggtcagactggagtccatcgctggaactccgcaccactgagagggcccccactgtccgcctggacacctggtggagacaacgacaacttgaccccaggactgtgcagctcttctggaagcccgtgcctctggaagaggactccggccggatccagggttatgtggtctcctggcgaccaagcggccaggcaggggccatccttccattgtgtaacaccacggagctatcatgtacttttcacctaccgtccgaggcccaggaggttgctttggttgcttacaattccgcagggacttcccgtcccacgcctgtggtcttctctgaatcaaggggacccgctttgacccgtttacacgctatggcccgcgatcctcattctctatgggttggctgggagcccccaaacccctggccacagggatatgtgatcgagtgggggctgggacctccctcagcatccaactctaataaaacgtggcgcatggagcagaatggccgcgcgacaggctttctgctcaaggagaatatcaggccgttccaattgtacgaaataattgtaacacctctctatcaagacacgatgggccctagccagcacgtgtacgcctactcccaggagatggcgccgagtcatgcccctgagctgcacctgaagcacattggcaagacctgggcccagctcgagtgggttcccgagcccccggaactgggcaagagtcccttaacccactacacaatcttctggacaaatgcccagaaccagagcttctcagcaattcttaacgcatcaagtcgagggttcgtgcttcatgggctggaacccgcctccctgtaccatattcacctgatggctgcatctcaggcaggcgcaaccaactctaccgttctgacactaatgaccctgacacctgagggttcagagttgcacattattctaggccttttcggcctcttactcctgttgacatgtctctgcggaacggcttggctgtgttgctcaccgaaccgcaaaaatcccctgtggccttccgttcccgaccctgctcactcttcattaggtagctgggtgccaacgattatggaagaactcccaggccccagacaggggcaatggctggggcagacaagcgagatgtcccgcgcactgactccccatccctgcgtgcaagatgccttccagttacccggtctggggactcctccgatcacaaagctcaccgtcctggaggaagacgagaaaaaacctgtgccctgggagtcccacaacagtagcgagacatgcggtttgccaaccctggtgcagacctatgtgctccagggggatccgagagctgtgtcgacacagccccagtctcagtcgggaacaagcgaccaggtgctgtacggacagctgctaggcagccccacaagccccggtccaggtcactacctgaggtgcgacagcacacagccccttttagctgggctgacaccgtcccctaaatcatatgaaaacctgtggttccaggccagtccacttgggaccctcgtaacaccagctccctctcaagaggatgattgcgtgtttggtccactgctgaacttccctctcctccaggggatccgcgtccatggaatggaggccttaggatcattctag

SEQ ID NO: 183533 - DNA, 1167 bp, synthetic construct
  misc_feature 1..1167: note = Description of Artificial Sequence: Synthetic coding sequence
  source 1..1167: mol_type = other DNA
tgaaccagccggcccacccccgtggtgttcagcgagagccggggccccgctctgactagactgcatgcgatggccagagacccccacagtctgtgggttgggtgggagccccctaatccctggccacagggatacgtgatagaatggggactaggccctccttctgcgtcaaattcgaacaagacatggagaatggagcagaacgggagagccacggggttcctcctgaaggcgccctcccatgcccccgaactccacctgaagcacattggcaaaacctgggcacagttagagtgggtgcctgagccccccgagctcggcaaaagtcccctgacccattacacaattttttggaccaacgcccagaaccagtccttcagcgccatcctcaatgcaagttctagggggtttgttctccacggacttgagcctgcctccttataccacatccatctgatggctgcttcccaggcgggtgccactaactctactgtgctgacgttgatgacgctaaccccagaaggctccgaattgcatattattttgggtctgttcggactgcttctcctactgacctgcttgtgcggtactgcctggctttgttgcagtcctaacagaaagaatccattgtggccctccgtgcctgacccagctcacagctcgttaggctcatgggtgcccacaatcatggaagaggacgcctttcagctacctgggcttggaacccctccaattacaaaacttactgtgctggaggaagatgagaaaaagccggtcccatgggaaagtcataattcctctgaaacgtgcgggctgcccactctcgtgcagacttacgtacttcagggtgacccgcgagccgtgtctactcagcctcagtcacaatccggtacgtctgatcaagtgctttacggccagctactggggtcccccactagtccgggccctggtcattatctccggtgtgattcaacacagccattattggcaggtctgacccccagccccaagagttacgagaacctctggtttcaggccagccctttggggacacttgttacccccgcgccatcccaggaagatgactgcgtgttcggtcctctgctcaacttccccttgttgcaggggatccgcgtccatggcatggaggccctaggttctttctag

SEQ ID NO: 183534 - DNA, 66 bp, synthetic construct
  misc_feature 1..66: note = Description of Artificial Sequence: Synthetic coding sequence
  source 1..66: mol_type = other DNA
atggcccggctgggcaactgcagcctgacctgggccgccctgatcatcctattgctgcccgggtag

SEQ ID NO: 183535 - DNA, 675 bp, synthetic construct
  misc_feature 1..675: note = Description of Artificial Sequence: Synthetic coding sequence
  source 1..675: mol_type = other DNA
atgagcgccgtgggcgccgccaccccctacctgcaccaccccggcgacagtcactctggacgcgtgtcattcttgggtgcacagttgcctcctgaggttgcagcgatggcacgcttactaggcgacctcgatagatccaccttccgtaagctgttgaagttcgtagtgtcatctcttcagggcgaggattgtcgggaggctgtccaacgcctgggagtgtcagccaacctgcccgaagagcagctgggcgctctgctggcagggatgcacaccttgcttcagcaagctctgagattaccacccacttccctgaagccagatacgtttcgggaccagctgcaggaactgtgcatcccacaggatctcgtcggcgacctcgcttctgtggtcttcgggtctcagcgaccccttctggacagcgttgcccagcagcagggggcctggctcccgcacgtggcggactttcgctggcgcgtggacgtcgccattagcacatctgcgttagcccgaagtctccagcctagtgtgctgatgcagctgaaactcagcgacggcagcgcttatcgctttgaggttcccactgcaaaattccaggagctgaggtatagcgtcgccctggtcttaaaggagatggcggatctggagaagaggtgtgaacgcaggctgcaggactag

SEQ ID NO: 183536 - DNA, 675 bp, synthetic construct
  misc_feature 1..675: note = Description of Artificial Sequence: Synthetic coding sequence
  source 1..675: mol_type = other DNA
atgagcgccgtgggcgccgccaccccctacctgcaccaccccggcgatagtcatagcggcagggtgtcttttctgggggcgcaactgcccccggaagtcgctgcgatggctaggctcctgggagatctcgaccgctcaacgttcaggaagctgctcaaatttgtggtgagctcactgcagggggaggactgccgggaagctgtgcagagactcggagtgagtgctaatctacctgaggaacagctcggggccctgctggctgggatgcatactctcctgcaacaagcactcagacttccgcctacatcactgaagccggacacctttcgggatcagctgcaggagctttgcataccgcaggatctcgttggagacctcgcaagtgtggttttcgggtcacaaaggcctttgttagattcagtggcacagcagcagggggcatggctcccacatgtggccgatttcaggtggcgggttgatgtcgctatctccacgagcgccctcgcacgctcgttgcaacctagcgtgttgatgcaactgaaactcagtgacggttcagcctaccggttcgaggttccaacagccaagtttcaggagctgagatattcagtcgccttagtcttgaaagaaatggccgatctcgaaaaaagatgcgagcggcgcctccaggattag

SEQ ID NO: 183537 - DNA, 675 bp, synthetic construct
  misc_feature 1..675: note = Description of Artificial Sequence: Synthetic coding sequence
  source 1..675: mol_type = other DNA
atgagcgccgtgggcgccgccaccccctacctgcaccaccccggcgactcccatagtggaagagtgtcatttctgggcgctcagcttccgcctgaagtggcagccatggcccgcctgctgggcgatctcgacagaagtacgttcaggaagctgctgaaattcgtggtcagctcattacagggcgaagactgcagggaggccgttcaacggctcggggtgtcagccaatttaccagaggaacaactcggagccttgctggccggcatgcacacactactccagcaggcgctcaggttgccaccaacaagcctgaagccagacaccttccgtgaccagctccaggaattgtgcattccccaggatctagttggggatctggcatctgttgtctttggcagccagcggcctcttctagattctgtggcacaacagcagggtgcatggctgccacatgtggccgattttaggtggcgcgtggatgtggccatctccacatccgccttggctcgctccttgcagccctctgtccttatgcaactcaagctgagtgatggaagcgcctacaggttcgaggtacctacagcgaagttccaggagttacgctattctgtggcacttgttctgaaggaaatggcagacctggagaagcgttgcgaaaggcgcctccaggattag

SEQ ID NO: 183538 - DNA, 297 bp, synthetic construct
  misc_feature 1..297: note = Description of Artificial Sequence: Synthetic coding sequence
  source 1..297: mol_type = other DNA
atggaggccagcagcgagccccccctggacgccaagagcgacgtgacaaatcagcttgtcgactttcagtggaaactcggaatggcagtgagttcagatacatgtcgaagcttgaagtatccctacgtagcggtcatgctaaaagtggccgaccatagcgggcaggtcaaaacgaagtgcttcgagatgaccattccccaatttcagccccagcttctagctacttcttcactcttgtcagcctccaacttctacaggcagttcaaggaaatcgcagctgttattgaaactgtttag

SEQ ID NO: 183539 - DNA, 258 bp, synthetic construct
  misc_feature 1..258: note = Description of Artificial Sequence: Synthetic coding sequence
  source 1..258: mol_type = other DNA
atggaggccagcagcgagccccccctggacgccaagagcgacgtgacaaatcagctcgtcgactttcagtggaaactgggaatggccgtttcttcagacacctgtcggtcgctcaagtacccttacgtcgccgtgatgcttaaggtcgctgaccactctggccaagttaaaaccaagtgcttcgaaatgacaattcctcaattccagaacttctaccggcaattcaaagagattgctgctgtcatagagacggtgtag

SEQ ID NO: 183540 - DNA, 258 bp, synthetic construct
  misc_feature 1..258: note = Description of Artificial Sequence: Synthetic coding sequence
  source 1..258: mol_type = other DNA
atggaggccagcagcgagccccccctggacgccaagagcgacgtgactaatcagctcgtagactttcagtggaaactgggaatggctgtttcctcagatacgtgtagatccttaaagtatccttatgtggctgtaatgttgaaagttgctgatcattcgggccaagtgaagacaaaatgtttcgaaatgacaatcccacagttccaaaacttctaccgccagttcaaggaaatagccgcagtgatcgaaacggtttag

SEQ ID NO: 183541 - DNA, 7470 bp, synthetic construct
  misc_feature 1..7470: note = Description of Artificial Sequence: Synthetic coding sequence
  source 1..7470: mol_type = other DNA
atgggcgccagcagcccccggagccccgagcccgtgggcccccccgcacccggtctaccattttgttgtgggggctccctgcttgccgttgtcgtacttctggctctcccggtggcttgggggcaatgcaatgcacccgaatggttgccatttgcacgccccacaaatctcactgatgaatttgagtttccaatcggcacctatctcaattatgagtgtcggcctgggtatagtggcagaccattttccatcatatgcttgaaaaactccgtgtggacaggggcgaaagataggtgtcggaggaaatcttgcaggaaccctcccgatcctgtaaacggcatggtgcatgtaattaaagggatccagtttggcagccagattaagtacagttgtaccaagggttatagactgattggcagctcctcagctacttgtatcatcagcggggataccgtgatttgggacaacgagacacccatttgcgaccgaatcccatgtggcctgccccctaccatcacaaatggggacttcattagcacgaatcgcgagaactttcattacggctctgtggtgacctacaggtgtaacccaggctccggtggccgaaaggtcttcgagcttgtcggggagccctctatttactgcactagcaacgacgaccaggtgggcatttggtctggcccagctcctcagtgcatcattcctaataaatgcacacccccaaacgtggaaaatgggatactcgttagcgataatcggagcctcttttctctcaatgaagtagtcgaattccgttgtcaacccgggttcgtcatgaaagggcctaggagagtgaaatgtcaggctttgaataagtgggagcctgaactgccaagttgcagccgggtgtgtcagcccccccctgatgtgctgcacgctgagcgcacccagcgcgataaagacaatttttctccaggtcaggaggtgttctacagttgcgagcccggttacgatctcaggggtgctgcctccatgcgttgcacacctcagggtgattggtctcctgcagccccgacatgcgaggttaaaagttgcgatgactttatgggacagctgttgaacggcagagtgcttttccctgtaaatcttcaactaggggcaaaagttgattttgtgtgcgacgaaggtttccagctcaaggggtcttccgctagctattgtgtcctagctggcatggagtccctctggaattcctcggtgccagtgtgcgaacagatcttttgcccatctccacccgtgatacccaacggcaggcacaccgggaagcctctggaagtgtttccatttggtaagactgtaaactatacgtgcgatccgcatccagatcggggcacatcttttgaccttatcggtgaatccaccatccgatgcaccagtgacccacaagggaatggcgtatggagttccccggctcccagatgtggcatcttaggtcactgccaagcccctgatcattttctcttcgccaaattaaaaacccagaccaacgcatcagatttccccatcggaacaagtctcaaatacgaatgcaggcctgagtattacggccggcctttcagcatcacgtgcctggataacttggtctggtcctcccccaaggatgtctgtaagcgcaaatcttgtaaaactcctcctgaccctgtgaacgggatggttcacgtgatcacagatatacaggtgggaagcagaataaactattcatgcactacgggccaccggttgattggacattcttcagctgagtgcattttaagcgggaacgctgcccactggtccacaaagccgcctatatgtcagcgcattccatgtggcttgcctccaaccatcgccaacggagattttatctcaacgaatagagaaaactttcattatgggtcggtggtcacgtaccggtgtaaccccggcagcggaggccggaaggtgtttgagctggtcggcgagccatcaatctattgcacaagtaacgacgaccaagtcggaatttggtcagggcccgctcctcagtgtatcattcccaacaagtgcaccccgccaaacgtagagaatggaatcctggtctctgacaacaggtccttatttagtttgaacgaggtcgtggaatttcgctgtcagccaggctttgtcatgaaaggaccaagaagagtcaagtgccaggctttaaacaagtgggaacctgaattgccctcatgcagccgcgtgtgccagcccccccctgacgtgcttcatgccgagcgaacacagcgcgataaagacaacttcagtcccggccaggaggtattctactcttgtgagcccgggtacgacttgagaggggcagcctccatgaggtgtacacctcagggagactggtcccccgcggcgcccacctgtgaagttaaatcttgcgacgattttatgggacagctgttaaatggccgggtgctgttccctgtaaacctacaacttggagctaaggtggacttcgtttgcgacgaagggtttcaactgaagggcagcagtgcaagttactgcgttctggccgggatggaatcactctggaacagttccgtccctgtatgtgagcaaatcttttgtcctagcccaccagtaatcccaaatggacgccacaccggcaagcctctggaagtatttccgtttggaaagacagtcaattatacctgcgacccccatcccgacagaggtacaagctttgatctgatcggcgaatcaaccatcagatgcaccagtgatccccagggcaatggggtttggtcttccccagccccaagatgtggaatccttggtcattgtcaggctcctgatcattttttgttcgcaaaactgaaaacacaaaccaacgcttctgattttcccattggaacatcgcttaaatatgagtgtagaccagaatactacggacggcccttctctatcacatgtctggataatctggtgtggtcgtctcccaaggacgtgtgcaagaggaaatcatgtaagactccgccagacccagtcaacggcatggtgcacgttatcaccgatatacaagttggaagccgtataaattatagctgcactacgggccataggcttatcggacattcctcagctgaatgcatactctctgggaatgctgcccactggtccactaagcctcccatctgtcagagaatcccctgtggccttccacccaccattgcaaatggcgatttcatatctactaatcgagaaaactttcactatgggtccgttgtcacgtacaggtgcaaccctggctctggggggagaaaagtctttgaactggtcggagagccatctatttactgcaccagtaatgacgaccaagttgggatatggtcaggtccagcaccacagtgcatcatccccaataagtgtacacctccgaacgttgaaaacggaattctggtgagcgataaccgttctttgttcagcctgaatgaggtagtggagttcaggtgtcaacctgggtttgtcatgaaagggcctcgtagggtgaaatgccaagcacttaataaatgggaaccagaactgcctagctgtagcagagtctgccagcccccccctgatgtactgcacgcggaacgcacacaacgcgataaagacaatttctccccagggcaggaggtcttttactcatgcgaacccggttacgacttaaggggcgccgcttctatgcgatgcaccccacaaggagactggtcacccgctgcgccgacttgtgaagtcaagagttgcgatgacttcatggggcagctgttaaatgggcgcgtgttgtttccagtaaacctgcagctgggtgccaaggtggattttgtgtgcgacgaaggcttccaactgaaggggagctcagccagctactgtgtgctcgccgggatggaaagcctgtggaattcaagtgtcccagtttgcgaacagatcttctgccctagtcctcctgtgatacctaatggacgccatactgggaaacccctggaggtgttcccgttcgggaaggctgtaaattacacttgtgacccccatcccgatcgaggcacaagtttcgatctgatcggggagtccacaattaggtgcacttcagatccacagggcaacggggtgtggagctccccagcgccacgctgcggcatacttgggcactgccaggctccagaccatttcctgtttgccaaattgaagactcagacaaatgcttccgactttccgatcggaacttccctcaagtatgagtgtcgcccagagtattacggccgccctttcagcatcacgtgtctggacaatctggtgtggagctcaccaaaggacgtctgtaagcggaagtcctgtaaaaccccgcctgatcctgtcaacgggatggttcacgttatcactgacatccaagtcggtagccggattaactattcgtgtacgactgggcatagattgataggccactcctctgccgagtgcattcttagtggtaacaccgctcactggtcgactaagccgcccatttgccagaggattccctgtggtctgcctccgacaatcgcaaatggtgactttatctccacgaaccgcgaaaacttccattatgggtctgttgttacctacaggtgcaacttgggttcccgcgggcggaaagtgttcgagctggtcggtgaaccttctatctactgcacttcaaacgatgatcaggtgggcatttggagcggtcctgcaccccagtgtattattccgaacaaatgcacacctcctaatgttgaaaatggaattctcgtttctgacaaccgcagcctgtttagtcttaatgaggtcgtagagttcaggtgtcaaccaggattcgtcatgaaaggccctcgcagagttaaatgtcaggccttgaataaatgggagcctgaactgccctcatgttcccgggtatgccagccccctccagagattctgcatggtgagcacactccaagccatcaggataactttagtcccgggcaggaggtgttctatagttgcgagccgggctatgatctgcgtggggcagcctcactacattgcacccctcagggcgattggtcgccggaggccccccgctgcgccgtaaaaagttgcgacgactttttgggccaactgccccacggcagagtgctgttcccactgaatttgcaactcggagccaaggtgtcattcgtctgcgacgagggatttagattgaaagggtcatcagtgagccactgcgttcttgtcggcatgcgcagcctgtggaacaattcggtccccgtgtgtgagcacatcttctgcccaaatcctcctgctattctgaacggccgccatactggcaccccctccggagacataccctacgggaaagaaatttcttacacttgtgatccgcacccggacaggggtatgactttcaacctgattggcgaaagtactatcaggtgtacttctgatccccacggaaatggtgtctggtcctcgcctgccccccgttgcgagctttctgtgagagccggccattgtaaaactcccgaacagtttccgtttgcgagtccgaccattcctatcaacgacttcgaattccccgtcggaacaagcttgaattacgagtgccgacccggttatttcggaaagatgttcagcatctcttgcttggaaaaccttgtgtggtcttccgttgaagataactgtcggcgcaagtcttgtgggccaccccctgagcccttcaacgggatggtgcacattaacacggacacacaattcggtagtaccgtgaattactcatgcaacgagggctttaggctgataggctcaccctcaactacttgcctggtaagcggaaataatgtgacttgggataagaaggctccaatctgcgaaattatctcttgtgaaccccccccaaccatatccaacggtgacttctattcgaacaatcggacgtcttttcacaacggaacagtggtgacataccagtgtcacaccggacctgacggggaacagctctttgaattggtcggggaaaggtctatttactgtacttcaaaggacgaccaggtaggtgtgtggagctcccccccaccccgatgcattagcactaataagtgtactgccccagaggtcgaaaacgccatccgtgtccctggcaaccgttcattcttcaccctgactgaaataattagatttcggtgtcaaccgggcttcgttatggtcggaagtcacaccgtccagtgccagaccaatggccggtgggggcctaagttgccccattgcagccgcgtttgccagccgccaccagaaattctgcacggtgagcacaccctgtcccaccaggataacttcagccctggtcaggaggttttctatagctgcgagccatcgtatgatctcagaggggctgcgagcttgcactgtactccccagggagattggagtcccgaagctccaagatgcacagtcaagtcttgtgacgacttcttgggacagctcccacatggccgcgttctgctgcccctaaatctgcagcttggcgctaaagtctcattcgtatgtgacgaaggcttccgcctgaaaggcaggtccgcctcacactgcgtactcgccggcatgaaggcactctggaattcgagtgtgcccgtttgtgagcagatcttctgcccgaacccccctgcgattctgaatgggcgccacacagggacaccattcggggacatcccttacggcaaggagattagttacgcttgtgacacccaccctgaccgcgggatgaccttcaacctcatcggtgagagcagcatcagatgtacctcagatcctcaaggaaacggcgtatggtcaagccccgccccacgatgtgaactgtctgttcccgcggcttgtccgcacccgccaaagatccagaacgggcattatatcgggggacacgtgtccttgtatctgcccggtatgaccatttcttatatttgtgaccctggctacctcttggtaggcaaggggtttattttctgcaccgatcagggtatctggtcgcaactggaccactattgcaaagaagtcaattgttcttttcccctcttcatgaatgggatttccaaggagctggagatgaagaaggtttaccactatggagattatgtgactctcaagtgtgaagacggttacacactggaaggttcaccctggtcccagtgccaagcggacgaccgatgggatccgcccctcgcaaagtgcacttctcggacccacgacgcgttgattgtgggaacactttccggcacgatcttctttattctattaatcattttcctgtcctggattattctgaaacaccgcaagggaaataacgcccacgaaaatcccaaggaagtggccatccatttgcacagtcagggcgggtcctcggtgcatcctcggactctgcagacaaatgaggagaacagcagggtcctgccgtag

SEQ ID NO: 183542 - DNA, 6120 bp, synthetic construct
  misc_feature 1..6120: note = Description of Artificial Sequence: Synthetic coding sequence
  source 1..6120: mol_type = other DNA
atgggcgccagcagcccccggagccccgagcccgtgggcccccccgcccctgggctgccattttgctgcggaggctccctgctcgctgtggtagtgctattagccttgcctgtggcgtggggtcagtgcaacgcacccgaatggcttccttttgcgcggcccactaacctcactgatgagtttgagttcccgattggcacgtatctgaattacgaatgtcgcccaggatactcagggaggccgttcagcatcatttgcctgaagaacagcgtctggaccggcgcaaaggaccgttgccggagaaagtcctgtagaaaccctccggaccccgttaacggtatggtgcatgttattaaagggattcagttcgggagtcagattaagtatagctgcaccaagggatatagactgatcggcagctccagcgcaacatgtatcatctcaggcgatacggtgatatgggacaatgagacccctatctgtgacaggattccctgtgggttaccacctaccattgccaacggggatttcattagtaccaatcgagagaacttccactacgggagcgtagttacatataggtgtaaccctggcagcgggggccggaaggtttttgaattggtgggcgagccttcgatttattgtacttctaacgatgaccaggtggggatttggtccggacccgccccacagtgtattatccccaataaatgcaccccgcccaacgttgaaaatggaattctggtttctgataatagaagtctgttttctcttaacgaggtggtggaattcaggtgtcagcccgggttcgtgatgaagggacctcggcgcgtgaaatgtcaggctctgaacaagtgggagccggagcttccaagctgctcacgcgtctgccaaccccccccagatgtgttgcatgccgaacgcactcagcgcgataaagataacttctcccccgggcaagaggtgttctacagctgcgaacccggctacgacctccgaggagccgccagcatgagatgcaccccacagggggattggtccccggccgctcccacttgtgaggtcaagtcatgcgatgacttcatgggccagctgttgaatgggcgcgttctattcccagttaatctgcagctcggcgccaaggttgatttcgtgtgcgatgagggctttcagctcaagggcagtagtgcatcttactgcgtactggcaggcatggaatcactttggaactcttcggtgcctgtctgtgagcagattttctgtccatccccacctgtgatcccgaacggacggcatacaggcaagccactcgaggtgttcccattcggtaagactgtgaactacacctgcgatccacatcccgatagaggaacttcctttgatctgatcggcgaatcaaccatcagatgcactagcgacccgcagggtaacggcgtatggtcaagccctgcacccaggtgcgggattcttgggcactgtcaggcaccggatcactttttgtttgccaaacttaaaacacaaactaacgcttctgattttcctataggaacatccctcaagtatgagtgcagacccgagtattatggaagacctttctcgatcacctgtctcgacaacttggtttggagttctcccaaggatgtctgtaaaaggaagtcttgcaagacaccacctgatcctgtgaatggcatggtgcatgtgatcacagacattcaagttgggagccggatcaattattcatgtaccaccggccacaggctaatcgggcatagctcagcagaatgtatcttaagcgggaatgccgctcactggtcaaccaagccccctatttgtcagcgtatcccctgcggactgccacccaccatcgcaaatggcgacttcatttccactaaccgggagaactttcactatggttctgtggtcacatacagatgtaatcctggatccggtggcaggaaggtcttcgagctcgtgggtgaaccttctatctattgtacgtccaacgatgaccaggtgggaatctggagcggccctgctcctcagtgcataattcccaacaaatgtactccccccaatgtggagaatggaattctcgtctctgacaaccgatccttgttctcactgaacgaggtagtcgaatttaggtgccagcccggctttgtgatgaaggggcccaggagggtcaagtgccaagccttgaataaatgggagcctgaactgccttcttgctcacgagtgtgccagccacccccggacgtacttcacgcggaacgcacacagagagacaaggacaatttctcacccggacaggaagtgttctacagttgtgaacctggctacgacttaaggggggctgcttcgatgaggtgcactccacagggagactggagcccggccgctcccacctgcgaggtgaagagctgtgatgatttcatgggacagctcttaaatggacgtgtgctctttcccgtgaatttacagctgggcgccaaggttgacttcgtgtgtgacgaaggattccagttaaaggggagctctgcatcctactgtgtccttgccggcatggaaagtctttggaattcatcagtccctgtctgtgagcaaatcttttgcccgagcccaccagtgattccgaacgggagacacaccggcaagccacttgaagtgtttccttttggtaaggcagtgaattacacctgcgacccacaccctgatcgaggcacatcatttgacctgatcggcgagagtacaattagatgtacaagtgatcctcaggggaatggagtgtggtcaagccccgccccgcgctgcggaattctgggccattgtcaagccccagaccactttctcttcgccaagttaaagactcagacaaacgcgtctgacttccccattggaacaagcctgaagtacgaatgccggcccgagtactatggccgaccttttagtatcacctgcctggataaccttgtgtggtcatccccaaaggatgtgtgtaagcggaagtcctgtaaaacacccccggaccctgttaacggtatggtccacgtcatcacagacattcaggtcggctctaggattaactattcatgcaccactggacataggctgattggtcactcttccgctgaatgcattctaagcgggaataccgcacattggagcaccaagccccccatctgccagcgcataccatgcggcttgccccctacaatcgctaatggagatttcatttcgacaaatagggaaaattttcattatgggagtgtggttacatatcgatgcaatctgggcagccggggacggaaggttttcgagctggttggcgagcccagcatatactgcaccagtaatgacgaccaagtgggcatatggtctggacccgcgccacagtgtatcattcctaataagtgtacacccccaaatgtggaaaatgggatacttgtctcagataaccgttccttgttctccctaaatgaagtcgtggagttccgttgtcaaccgggcttcgtgatgaagggtcctaggagagtgaaatgccaggctcttaacaagtgggagcccgagttacctagctgcagtcgggtctgtcagccccctccagaaattctgcacggtgaacatactccaagtcatcaggacaacttcagccctggacaggaagtattctatagctgcgaaccagggtacgatctcagaggagccgccagccttcattgcacacctcagggagactggtcccctgaggctccgaggtgcgccgtgaagagttgcgacgactttctaggccagctgccacacggcagggtgctcttcccgctaaacctgcagctcggcgctaaagtttcttttgtctgcgatgaggggtttcgcctgaagggttcctccgtcagccactgtgttctggtgggcatgagatccctttggaacaacagcgtgccggtgtgcgaacacattttttgcccaaaccccccggctattcttaacgggagacatacagggaccccctccggggatattccctatggcaaagagatctcgtacacctgtgatccccatcccgaccgtggaatgacgtttaatcttatcggcgagtccactatcagatgcaccagcgatccacacggaaacggcgtttggtcctcccctgctcctagatgcgagttgagcgttagggcaggacactgtaagacacccgaacagtttccgttcgcttcccctacgatccctattaacgattttgagttccctgttgggacatctttgaactacgagtgtagacctggctacttcggcaaaatgttttccattagttgcctagagaaccttgtctggtcaagcgtagaagataattgtcggcgcaagagctgtggccctcctcccgagcccttcaacggaatggtccatatcaacacagatacccaatttggatctacagtaaattactcttgtaacgagggctttaggttaatcgggagcccatctaccacctgcctggtcagtgggaacaacgtcacctgggataaaaaggcaccaatctgcgaaataatcagttgcgaaccccctccgactataagtaatggtgacttttactctaacaacagaacctcttttcacaacggaacagtggttacctatcagtgccacactggtcccgatggagaacaactgttcgaactagtgggggagagatccatctattgcacttcaaaggacgaccaggtcggggtgtggtcctctccaccaccacgttgcataagtaccaataaatgcaccgcccctgaagtggaaaacgccattagggtgcccgggaatagaagctttttcacattgacagagataattagattcagatgtcagccgggttttgtgatggttgggtcgcatactgtccagtgccaaaccaacgggaggtggggtccaaagttaccacactgtagccgcgtgtgccagcccccacccgagattctgcacggagagcacactctttcccaccaagataacttctcccctggccaagaggtcttttatagttgcgaaccttcttacgatctgcgaggcgccgcaagcctgcattgcacccctcagggcgattggtctcccgaggccccaagatgtacggtcaagtcttgtgacgatttcctagggcaactcccgcacgggagagttctgctgcctctgaacttgcagctcggagctaaggtttctttcgtgtgcgatgaaggatttcgactcaaagggagatcagcgtcccactgcgtgctcgctgggatgaaggctctttggaatagcagcgtgcctgtgtgtgagcagattttctgccccaatccccccgcgatcctcaacggaagacatacaggcactccctttggtgatataccctacggcaaagaaattagctatgcctgtgatacccatcctgacagaggcatgacttttaacctgatcggcgagagcagcattcgctgcactagtgacccgcaggggaacggcgtttggtcttcacccgctccacgttgtgagctgtccgtgcccgccgcttgcccacacccgccaaagattcagaacggccactatatcgggggacacgtgtctctctaccttcccggcatgacaatttcttatatctgcgaccctggatacctgctcgtgggcaaaggctttatcttttgcactgatcagggcatttggtctcagctcgatcattactgcaaggaagttaattgctctttcccactcttcatgaacggcattagtaaggagctcgaaatgaagaaagtataccattacggcgactacgtaacccttaagtgtgaggacgggtatacattagaaggttccccgtggtcacaatgccaagctgacgacagatgggatcctccactcgccaagtgcacttcacgcactcacgacgctctgatcgttggtacactgtccggaacgatcttttttatactgcttattattttcctgtcctggattattttgaaacacagaaagggcaacaacgctcacgagaaccccaaagaggtcgctatacacctgcactctcagggcggctcgtccgtgcacccaaggacccttcagaccaatgaagagaactctcgagtcttgccttag

SEQ ID NO: 183543 - DNA, 6120 bp, synthetic construct
  misc_feature 1..6120: note = Description of Artificial Sequence: Synthetic coding sequence
  source 1..6120: mol_type = other DNA
atgggcgccagcagcccccggagccccgagcccgtgggcccccccgccccaggcttacccttttgttgcggaggaagtttactggccgtagtggtcttactcgcactccccgttgcctgggggcaatgtaacgcgcccgagtggctcccgttcgctaggcccacaaatctcaccgatgagttcgaattccctattggcacatacctgaattacgagtgcaggcccggatatagtggccgcccattttcaatcatatgcctgaagaatagcgtgtggactggagccaaagatcgatgtaggaggaaaagctgtcgcaatccacccgaccctgttaacgggatggtgcatgtgataaagggtattcagttcggtagccagattaaatattcctgtaccaagggctacaggctcattggaagctcatccgctacctgcattatctcaggcgacaccgtgatctgggacaatgagaccccaatttgcgaccgaatcccctgcggattgccccccaccattaccaatggggactttatctcgacaaatcgcgagaacttccattatggaagtgtggtcacctacaggtgcaatcctggctcaggggggcgaaaggttttcgaacttgtgggggagcccagcatctactgcaccagtaatgatgaccaggtgggaatctggagtggtccggcgcctcaatgtataataccgaacaaatgcacaccccctaatgtggaaaatggtatactcgtgtccgataaccgctctctattttccctcaacgaagtggtcgaattccgatgtcagcccgggtttgtcatgaaaggcccacgccgcgttaaatgtcaggccctgaacaagtgggaacccgagttgccttcctgtagtagggtttgccagccccctccagacgtgcttcatgcggagcgcacacagagggataaggataacttttcccccggacaagaggttttctattcatgcgagccaggctatgatctgaggggggcggcttcaatgcggtgcactccccaaggtgattggagtccagcagcaccaacgtgcgaggttaagtcctgcgatgattttatgggacaactgctgaatggaagagtgctgtttcccgtgaacctgcaattaggggctaaggttgacttcgtctgcgacgagggctttcaactgaaagggagcagtgcgtcctattgtgtgctggcggggatggagagcctttggaattcgtcagttcctgtctgcgagcaaatcttctgccccagtcccccagtgatacccaatggacggcacaccggaaaacccttggaggtgttcccatttggcaagaccgtgaattacacgtgcgatccccaccccgatcgaggcacctccttcgacctgatcggcgagtccaccattcggtgcacttcagatccccagggaaatggcgtgtggtcgtcgccagccccgcgctgcggaattctaggacactgccaggcacctgatcatttcttgttcgctaagctcaagacccagaccaacgcgtccgacttccccatcggcacctccctaaagtatgagtgtagaccagaatattacggccggccatttagtattacatgcctggataatctggtgtggtcctcccccaaagacgtatgtaaacggaagtcttgcaaaacaccacccgaccctgttaatggcatggtccacgtgattacagacattcaggtgggctctcggataaattattcctgcaccacgggacaccgcttgatagggcatagctccgccgaatgcattctctcagggaacgctgcccactggtctactaagcctccaatttgccagaggataccatgtggactaccccccactatagccaacggagattttatctccaccaacagagaaaactttcattatggctcagtagtgacttatcggtgcaaccccgggagcggcgggcgcaaagtgtttgaactcgtcggcgagccctccatctattgcacatcaaacgacgaccaggtgggcatctggtcaggtcctgctcctcagtgtattattcctaacaagtgcacaccccccaacgttgagaatgggattctcgtgtccgataaccggagcctattttcgcttaacgaggtcgtcgagtttcgatgtcagccaggcttcgtgatgaagggaccacgtcgggtcaaatgccaggccctgaacaaatgggaacccgaattgcctagttgcagcagggtgtgccagccaccacccgatgtcttgcacgccgaacgcactcagagggataaggacaactttagcccggggcaggaagtcttctactcatgcgagcccggttacgatctgaggggggctgcttctatgaggtgcacaccccagggtgactggtcacccgccgcccccacatgtgaggtcaagtcctgtgacgacttcatggggcagcttctcaatggaagagtgttattcccggtgaatctccagttaggagccaaggttgactttgtgtgcgatgaaggctttcagctaaaaggctcctcggcatcgtactgcgtgttggccggtatggagtcactctggaactctagtgtacccgtttgtgagcagattttctgccccagcccccctgtcattcccaatggacgacatacaggcaagcccctggaagtctttccatttggtaaaactgtgaattacacctgcgacccccacccggaccggggaacatccttcgacctgatcggtgaatccaccatcagatgtactagtgacccacagggcaatggggtgtggtcctccccagctcctcgttgcggaatcctcggccattgtcaggctccggaccacttcttgttcgccaaattgaaaacacagactaatgcttccgatttccccattggcacttccttaaagtatgagtgtaggcccgaatactatgggcgtcctttttcaattacctgcctggataaccttgtgtggtcttcacccaaggatgtatgtaagcgcaagtcctgtaagactcctcccgatcccgttaatggaatggtccacgtaatcaccgatatccaagtcggatctcgcataaactactcctgcactaccgggcaccgattaatcggacacagctctgcagagtgtatcctttctggaaacaccgcacattggtctaccaagcctcccatttgtcaacggatcccgtgtggcctgccacctactatcgcgaatggagactttattagcacaaacagagagaattttcattatggctcagtagtgacgtacaggtgcaacctcgggagtagaggacggaaggtctttgaactggtgggcgagccgtccatctactgcactagtaatgacgaccaagtgggcatatggagcggacccgcacctcagtgcattatccccaacaaatgcacgcctccaaacgtggaaaatggcatcctggtatcagacaaccgctctctcttctctctgaacgaggtggtggaattcaggtgccaaccggggtttgtgatgaaaggtccgcgccgtgtgaagtgccaggccctcaacaaatgggagccggaactcccctcctgttcccgtgtgtgtcaacctcccccggagatcctccacggcgaacacacaccatcccaccaagataacttttcccccgggcaagaagtgttttattcctgtgagcccggttatgatttgaggggggctgcttccctccactgtactcctcagggggactggtcccctgaggcaccacgatgcgctgtaaagtcatgcgatgatttcctcggtcagctgccccatggacgagtccttttcccattgaatctgcagttaggagccaaggtatcatttgtttgcgacgagggcttccgcctgaaagggagcagcgtctcccactgtgttctcgtggggatgagatcactatggaataactctgttccagtctgcgaacatatcttttgccctaatccaccagcaatcctgaacggacgccacacagggaccccgagcggggacatcccatacggtaaggagatcagctacacgtgcgacccacaccctgaccgcggaatgactttcaacctgatcggcgagtctaccatcaggtgtacatccgatcctcacgggaacggggtgtggtcttccccagcaccacgctgcgagctctctgtcagggccgggcattgcaagaccccagaacagttcccgttcgccagccccacgatccctattaacgacttcgagttcccagtcggaacaagtctgaattatgagtgccgtcctggttactttggtaaaatgttcagtatcagctgtcttgagaacctggtgtggagctcagtggaagataattgccgcagaaaatcctgcgggcccccaccagagccatttaacggcatggttcacataaacacagacacacaatttggaagtactgttaattattcttgtaacgaggggttccgtttgattgggagcccgagcaccacctgtcttgtctcaggaaacaatgtaacttgggataagaaagccccaatttgcgagataatctcttgcgagccaccccccacaatctctaatggagacttctactcgaacaatagaaccagcttccataatgggaccgttgtaacctatcaatgtcacacaggccctgacggagaacagttgttcgagctcgtgggagagcggtctatttactgcacatccaaggatgatcaggttggggtgtggtcatcaccaccccctagatgcatatctaccaacaagtgtactgcccccgaagttgagaatgcaattcgggtccccggaaaccgatccttcttcaccctcaccgaaatcattcggttccgctgtcaacccggttttgttatggtcggaagccacactgtgcagtgccaaacgaatggccgctggggcccaaagctgccacactgctcccgggtgtgccagccaccacctgagattctccatggcgaacatacccttagccatcaggacaatttctctccagggcaggaggtgttctactcttgcgagccttcttacgacctgcgtggcgccgctagcctgcattgtactccccagggcgattggagccccgaagccccacgctgtaccgtaaaatcctgcgacgactttcttggccagctgccccacggaagggtgttactgcccctgaacctacagttaggcgccaaggtgagcttcgtttgtgacgaggggtttaggctgaaaggtcgttctgccagtcattgcgtattggctgggatgaaggccctgtggaattcttctgtgcctgtgtgcgagcagatcttttgccctaatccacccgccatactcaacggacggcacaccggtactccttttggagacataccttatggaaaagaaataagctacgcatgcgatacacaccccgatagaggaatgacttttaatctgataggtgaatcctcaattcgctgtaccagtgatccacagggtaatggagtatggagttctcctgcaccacgctgtgaactctcagtgccagcggcttgccctcatcctccaaagatacagaatgggcactacattggaggccacgtaagtctgtacctgcccggcatgacaatatcctatatctgcgacccaggctatctcctcgtgggaaaaggcttcatcttttgcacagaccaagggatctggagccagctggaccactattgcaaggaggttaattgcagcttcccactatttatgaatggtatcagcaaagagctcgagatgaagaaggtctaccactacggcgattatgtgacacttaagtgtgaagacggctatactttggagggttccccgtggagtcagtgtcaggccgatgaccgttgggacccgccactagccaagtgcacaagccgaacacacgacgcactaatcgtgggcacgctgtcaggcaccatcttcttcatcttgctgattatttttctgagctggatcattctcaagcatagaaagggcaataacgcccacgagaatccaaaagaagtcgccatccacttgcacagccagggtggctcatctgtccacccaaggacccttcagaccaatgaggagaacagtcgcgtgttaccctag

SEQ ID NO: 183544 - DNA, 6120 bp, synthetic construct
  misc_feature 1..6120: note = Description of Artificial Sequence: Synthetic coding sequence
  source 1..6120: mol_type = other DNA
atgggcgccagcagcccccggagccccgagcccgtgggcccccccgcccctggcctgcctttctgttgcggggggtcactgctagcagttgtcgtgttacttgcgttgcctgtggcttggggacagtgtaacgcacctgagtggttgccctttgctcgtcccaccaatctcacagacgagttcgaattcccaattgggacctacttaaattatgaatgccgccccggttacagtggccgccctttcagtatcatatgcttaaagaatagcgtgtggacgggcgcaaaggacagatgcagacgaaagtcctgccgcaaccctccagatcctgtgaacggcatggtccacgtgattaaaggcatccagttcggaagccagattaagtacagctgcacaaaaggctaccgtctgatcggctcttcatcagcgacctgcataatttccggagataccgtcatctgggacaacgagacccccatatgcgaccgtattccgtgtgggttaccgcctaccatcactaatggcgactttattagcacgaacagggagaattttcactatggttccgtggttacatacagatgtaaccccggttccggagggagaaaagtgttcgagcttgtgggtgaaccaagcatttattgtaccagcaacgatgaccaggtgggcatttggtcaggacctgctccccaatgcatcatcccaaataagtgcacacccccaaacgttgaaaatggcatcctagtgtctgacaaccggtcactgttctcattgaacgaagtggtggaattccgctgtcaaccaggtttcgtcatgaagggacctcggagagtgaagtgtcaagcactgaacaaatgggaaccagagcttccgagctgctcgcgcgtctgtcaaccacccccagacgtactccacgcagagcgtacgcagcgcgacaaggacaactttagtcctgggcaggaagtcttttattcctgcgaaccaggttatgatcttcggggcgctgctagcatgcggtgtacaccgcagggagattggtcaccagccgctccaacatgtgaggtaaagtcttgtgacgattttatgggacagctcctgaacggcagagtcttgttcccagtgaacttgcagctgggcgctaaggtggactttgtgtgtgacgaagggttccagctgaagggcagctcagcttcctattgtgtcctggcaggtatggaatccctctggaatagctcagtccccgtctgcgagcagatcttctgcccctccccacccgtaatccccaatggacgtcatactggtaaacccctggaggtgtttcctttcggaaagacagtgaattacacgtgcgatccccatcccgacaggggcacttcctttgatttgataggggagtctactatccggtgcacctccgatccgcagggcaacggcgtatggagcagcccagcacccaggtgtggcatcctggggcactgccaggcccccgaccattttctgttcgccaagcttaagactcaaaccaatgccagcgacttccctatcggcacgagcctcaagtatgagtgcagacccgagtactacggaagaccctttagcattacctgtctagacaacctcgtatggagttcaccaaaggacgtgtgcaagaggaagtcctgcaagactccacctgatcccgtgaacggcatggtccacgtgataacagatatccaggttggatctcggatcaactatagttgcacaaccggacaccgcctcatcggacattctagcgcagaatgtatcttatctgggaatgccgctcactggagcaccaaacctccaatctgccagaggatcccctgtgggctcccgcccaccattgccaacggcgactttatttcgacaaaccgcgaaaattttcactacggcagcgtggtaacctatcgctgcaaccccggaagtggaggtcgaaaagttttcgaactggtgggagagccgagcatctattgcaccagtaatgatgatcaggtcggcatttggtcagggcctgcgcctcagtgcattatccccaacaagtgcaccccccctaatgttgagaatggcattctcgtaagcgacaatagatcgttgttctcactaaacgaagtagttgagttcaggtgccagccgggtttcgttatgaaggggcctaggcgggttaagtgtcaggctttaaacaagtgggaaccggagctcccttcatgctcccgggtctgtcagccaccaccagatgtacttcatgcagagagaacgcagagggataaagacaatttttcacctggccaagaggtgttctacagttgcgaaccgggctacgaccttaggggcgcggctagcatgcgatgcacgccccaaggtgattggagccccgccgcccctacttgcgaagtgaagtcgtgtgatgattttatggggcagctgctgaacggccgggtgctctttccagtgaaccttcaattgggggccaaggtggatttcgtgtgcgatgaagggttccaactcaaaggcagcagtgcttcttactgcgtgctcgcgggaatggagtcactttggaattcaagtgtgcccgtgtgcgaacagatcttttgcccctcaccccccgtgataccaaacggccggcacactggaaagccactggaagtgtttccattcgggaaggctgtaaattatacatgcgacccccacccagacagaggaacatcattcgatttgatcggagagtcaactattaggtgtacctcagatccacagggcaatggcgtgtggtcgagccctgcacctcggtgtggaatcctgggacactgtcaggctcctgaccactttcttttcgccaagctcaagacccagactaatgccagtgatttcccgattggtaccagcctgaagtatgagtgtcggcctgaatactacggtaggcctttcagcatcacttgtcttgataacctggtgtggagtagtccgaaggatgtttgcaaaaggaaatcgtgtaaaacccctccagaccccgtgaatggcatggtgcacgtgattactgatattcaagtggggagtcggatcaattattcttgcaccacagggcacagattaattggccactcttccgccgagtgcatcctctcgggtaatactgctcactggtctactaagcctcctatatgtcagcgcattccatgcggcttgccaccaacgatcgcgaatggtgattttatttctacaaatcgggagaactttcactacggaagcgtggtcacatataggtgtaaccttggatcaagaggcaggaaggtgttcgaactggttggagagccctcaatatactgcacctctaatgatgaccaagtgggtatctggagcgggcctgccccgcagtgcatcatccctaacaagtgcactccgcctaacgtggaaaacggcatactggtatccgataatcgtagtcttttctcactaaacgaggtcgtcgaatttcgttgccagccggggtttgttatgaagggccctcggcgggtcaaatgtcaggcactcaacaagtgggaacctgagctcccttcttgtagccgggtctgtcagccacctccggaaatccttcacggggagcacaccccgagtcaccaggataacttctcacccggacaggaagtattttactcgtgcgaacccggatacgatctgaggggtgctgccagtctgcattgtactccccagggcgactggagcccagaagcacctagatgtgcggtgaagtcttgcgacgacttcttaggacaattaccccatggccgcgtgctgttcccactaaacctacagctgggggccaaggtttcctttgtctgcgatgaagggttcagactcaagggctcctcagttagccattgcgttctagtcggaatgagatcactgtggaataacagcgtgccagtgtgtgagcacattttctgtcccaacccccctgctatcttaaatggacgtcacacgggaacaccatctggagatatcccctatggtaaggagatttcttacacgtgtgacccacaccctgaccggggaatgacgtttaacctgatcggagagtcaacgataagatgtaccagcgatccccatggaaacggcgtgtggagcagccctgctccccgttgtgaactgagcgtccgggctggacactgtaaaacccctgaacagtttccatttgcgtcacctactattcctattaacgattttgaattccccgttggcacgagtcttaattacgagtgtcgacctggttattttgggaaaatgttttcaattagctgcctggaaaacctggtttggtcatctgtggaagacaattgtcggagaaagtcctgtggccctccacctgagcccttcaacgggatggtgcatattaacaccgacacacagttcggctccactgtcaactattcttgcaatgagggcttccgtttaattggcagtccatctacaacatgtctggtgtctgggaacaacgttacctgggacaaaaaagctcctatttgcgagatcattagctgtgagccccctccaacaattagcaatggagacttttatagcaacaaccggaccagcttccacaacggaacggtggtcacctaccagtgtcacacgggacctgatggcgagcagctcttcgaattggtgggcgaaagatcaatctactgtacttctaaagacgatcaggtaggagtgtggtcatccccaccgccccgatgcatttctacaaacaagtgtactgctcctgaggttgagaacgctatccgggtgcccggcaacagatcattttttacgctaactgagatcattcgtttccgttgtcagcccggctttgtcatggttggctcccacaccgtgcagtgtcaaaccaatggaagatggggacccaagctgccacactgctccagggtttgccagcctccacccgaaattctccacggtgagcacacactgtcccatcaagataacttttcccccggccaagaagtattttacagttgtgaaccgtcctacgacctaaggggcgccgcctcgctgcactgcaccccacagggcgattggtcaccagaggcgcccaggtgcaccgtgaaaagctgtgacgactttctgggccaacttcctcacggcagagttttgctgccactgaaccttcagctgggcgctaaagttagttttgtgtgcgatgaagggtttcggctaaagggacggtccgcctcacactgcgtgctcgctgggatgaaggcactgtggaactcttccgtacctgtgtgcgagcaaattttttgtcctaaccccccagctatattgaatggccgtcacactgggacaccctttggcgacattccctacgggaaggagatatcctacgcgtgtgatacacaccctgatcgcggcatgacttttaacttaattggcgagtccagtatccgatgcacatcggaccctcagggcaatggagtttggtctagtccggccccccgctgtgagctcagcgtccctgctgcctgcccccatcctcctaaaattcagaatggtcattacataggcggccacgtgtctctgtatttgcctggaatgactatatcttacatttgcgaccccggttacttgctggtggggaagggatttatattctgcacagatcaggggatctggtctcaattggaccattattgtaaggaagtgaactgttcattccccctgttcatgaacggaatcagcaaagaactagagatgaaaaaagtgtaccattacggcgactatgtcacactaaaatgtgaggatgggtacactctcgaagggtcaccatggagtcagtgccaggctgatgaccgctgggatccccctctggctaaatgcacaagtcggacacacgatgctctgattgtgggaaccttgtccggtaccatcttctttattctacttataatctttttaagctggataatcttgaagcacaggaaggggaacaatgctcatgagaatcccaaagaggtggcaatccacctgcactcccagggtggcagctctgtccaccctcgcacactgcagaccaacgaggaaaacagccgggtgctgccatag

SEQ ID NO: 183545 - DNA, 6120 bp, synthetic construct
  misc_feature 1..6120: note = Description of Artificial Sequence: Synthetic coding sequence
  source 1..6120: mol_type = other DNA
atgggcgccagcagcccccggagccccgagcccgtgggcccccccgccccaggactccccttttgctgcggcggatcactgctggccgtggtggtactgctggcccttcctgtggcatggggtcagtgcaatgcgccagaatggctcccatttgcacggccaacaaacttaactgacgagttcgaatttccaattggcacctatctgaactacgaatgtcgaccgggttacagcggcaggccgttcagtatcatttgtctgaagaactccgtctggactggcgccaaagaccggtgtcggcggaaatcctgcaggaatccccccgacccagtcaatgggatggtgcatgtcatcaagggcatacaattcggaagtcagatcaaatattcatgtaccaagggctaccggctaatcgggtcttcaagcgccacctgcattatttctggggacaccgtgatttgggacaacgagactccaatctgtgatagaataccatgcggcttgccacccaccattaccaatggggactttatatcaaccaatcgtgaaaatttccactacggttccgtggtcacttacaggtgcaacccaggatctggcggcaggaaagtctttgagcttgttggtgagcctagtatttactgcacatcgaacgacgaccaagtcggcatatggagtggtcctgcgcctcagtgcatcattccaaataaatgtacaccgcccaatgtggaaaacggaattctcgtttccgacaaccggagtttgttctcgctcaatgaggtggtggaattccgctgccaaccagggtttgtcatgaaaggaccccgtagagttaaatgccaggccctgaacaaatgggaaccagaactgcccagctgcagccgggtatgtcaacctcctccagatgtcctgcacgcggagcggactcagcgggacaaggataactttagccctgggcaggaggttttctattcttgcgagcccgggtacgatctcaggggggcggcctctatgagatgcaccccacagggggactggtcaccagctgcccccacttgtgaagttaaatcttgtgatgacttcatgggtcagctgctgaacggcagggtgttgttccccgttaatctgcagctgggcgctaaggtcgactttgtatgcgatgagggatttcagctgaaagggtcaagtgcctcttactgcgtcctggctggaatggagagtctttggaatagttccgtgcccgtctgcgagcagatcttttgtcccagcccacctgtaatcccaaatggcagacacactgggaaaccactggaggttttccccttcggtaaaacagtgaattacacttgcgatcctcaccctgaccgcgggacttctttcgacctaatcggagaaagcaccattcgctgtacctccgacccccaggggaacggcgtgtggtctagtcccgccccgcgatgtggtatcctgggacactgccaggcaccggatcacttcctgttcgctaaactcaaaactcagacaaacgcaagtgacttcccaattgggacctcacttaagtatgagtgtagacccgagtattatggcaggccattttcaataacctgcttggataacctcgtgtggtcctcacccaaggatgtgtgtaaaaggaaatcttgtaagaccccgcctgatccagtcaacggaatggtccacgtgattaccgatatccaagtgggcagtagaatcaactacagctgcaccacaggacaccggcttattggccattcgagcgctgaatgcattctcagtggcaacgctgctcactggagcaccaagcctccaatctgccagagaataccctgtggtctcccccctaccatcgccaacggagactttatatccacaaacagggaaaattttcattatggcagcgtggtgacttaccgctgtaaccctggcagcggaggacggaaggtcttcgagctggtgggggaaccttccatttactgtacctcaaatgacgaccaggtgggcatctggagcgggccggctccccagtgcatcatcccgaataagtgtaccccccccaatgtggagaacgggattctggtcagcgacaaccgaagtctgttctctcttaacgaggtggtggagtttcgctgtcagccaggtttcgtgatgaaagggccccggcgagtgaagtgccaggctctgaataaatgggagcctgagttgccatcatgttctagagtttgtcaacccccacctgacgtgctccatgccgagaggacccaacgggacaaggacaacttttcgcctggccaagaagtgttttattcttgtgagcctggatatgatctccgtggagccgctagcatgaggtgtaccccacagggcgactggtctccagctgccccaacttgtgaggtgaaatcatgcgacgattttatggggcagcttctcaacggccgggttctgttccctgtgaaccttcaactgggtgcaaaagtggactttgtgtgcgatgagggatttcagctgaaaggatcttctgcctcttactgcgttctggccggcatggagtctctgtggaatagctccgtgccagtatgcgagcagatcttttgcccaagcccacctgtcataccaaatgggagacacaccggaaagcctctcgaggtatttccttttggcaaagcggtcaattacacttgcgacccccacccggatcgggggacctcctttgacctaattggtgagagtaccattagatgcactagcgatccccagggaaacggggtgtggtccagccctgcccctaggtgcggcatcctcggtcactgtcaggcccctgatcattttctatttgctaagctcaagacacagactaatgcaagtgattttccaataggaacctccttgaaatatgagtgcagacctgagtactatggcagaccctttagtattacctgtcttgacaacctagtgtggtcttcgccaaaagatgtgtgcaaaaggaagtcctgcaagacccccccagaccctgtaaatggaatggtgcatgtgataaccgacattcaggttggatcacgcattaactacagttgcactaccgggcacagactgataggacacagctccgctgagtgcatactcagcggtaacaccgcccactggagcactaaaccccctatctgtcagaggattccatgcgggctcccccccacgatcgctaatggcgacttcatttctactaatagggagaacttccactatggatctgtagtcacatatcgttgtaacttaggcagccgagggcgcaaagtcttcgagctggtgggggagccgtcaatctactgtacctcaaacgacgatcaggtgggcatctggtctgggccagcaccgcagtgcatcatacccaataagtgcactccgcctaacgtcgagaatggcatactggtctctgataatagatcgctgttctccctgaacgaagttgtcgagtttaggtgccagccagggttcgtgatgaaggggcctaggcgggttaaatgtcaggcgctcaacaaatgggagcccgaacttccttcctgttctcgcgtttgtcaaccccctccggagatactacacggagagcatacgccctcacaccaggataacttctctcctggacaggaagtattctacagctgtgaacctggctatgatctccgtggcgccgcctcacttcactgcactccccaaggcgattggtcacccgaggccccacggtgcgcagttaaatcatgcgacgactttctgggacagcttccacacgggagagttctcttccctctgaatctccaacttggggcgaaagttagcttcgtgtgtgatgaggggttcaggttgaagggttcttccgtgtctcattgcgttctcgtcggtatgcgaagtctgtggaacaactccgtgcccgtctgtgaacacatattctgtccaaatccccctgctatattgaatgggaggcatactggaacaccctctggtgatatcccatatgggaaagagatctcttacacctgtgacccccatcccgacagggggatgactttcaaccttatcggggagagcaccatccgctgcacttctgacccacacggtaacggagtttggagtagtcctgctccccgctgtgagctgtctgtaagagccggccattgtaagactcccgagcagttcccatttgctagccctactatccctatcaatgactttgaatttcccgttgggactagtctcaactacgaatgtaggccggggtacttcggtaaaatgttcagtatcagctgcctggagaacctggtctggtccagcgtcgaggataactgtaggagaaaaagctgtggaccaccccccgagcccttcaatgggatggttcacatcaatactgacacccagttcggctctacagtcaactactcttgtaacgagggatttcgcctgattgggagtccctccaccacctgtctggtgtcaggaaacaatgtaacttgggacaagaaagcgccaatatgtgagatcatttcctgcgagccacctccaaccatttcaaacggtgatttttatagcaacaataggacaagcttccacaatggaaccgtggtgacctaccagtgtcataccgggccagatggagaacagctttttgaactcgtgggtgaacgctcaatctattgcaccagcaaagacgatcaggttggagtgtggagctcccctcctccccgctgcatctcgacaaataagtgtaccgcacccgaggtcgaaaacgcaatccgagtgcccgggaacaggtcctttttcacgctgactgaaataattcgcttccgttgccagccaggtttcgtcatggtggggagtcacacagtccagtgtcagactaacgggaggtgggggccaaaactgcctcactgtagtcgcgtatgtcagccacccccagaaatccttcacggagagcacactctcagtcaccaggataactttagtcccgggcaggaagtattctacagttgtgaaccctcctacgacctaaggggagctgcaagcctgcactgtactccccagggcgattggtctccggaagcccccaggtgtaccgtcaagagctgcgacgacttcctcgggcaactgccccatggccgagttctcttgccccttaatttgcaactgggagccaaagtgagctttgtgtgcgatgaaggatttcgcctgaaagggcgatcagcctctcactgtgtactagctggcatgaaagcactctggaattccagcgtgccagtgtgtgagcagatcttttgtcccaaccctcctgcaatactaaatggacgccacacgggcactcctttcggggatatcccctacggcaaggaaatctcttacgcttgtgacactcatcccgacagaggcatgacttttaacctgatcggagagtcaagcatccgctgtacctctgaccctcaggggaatggggtatggtcatcccctgccccccggtgcgagttatccgttccagctgcatgcccacaccctccaaaaattcagaacggtcattatattgggggccatgtatctctgtacctgccggggatgaccatttcctacatatgtgaccccggctatctgctcgtgggaaaaggtttcattttttgtactgatcaaggtatttggagtcagctggatcattactgtaaagaggtaaactgtagcttcccgctcttcatgaatgggatttccaaagagctcgagatgaagaaagtttaccactatggagattacgtcactttaaaatgcgaggacggctacacgcttgaaggttctccttggtctcagtgtcaggccgatgacaggtgggacccacccttggccaagtgcaccagtaggacccacgacgcactcatcgtgggcacattaagcggaactatttttttcatactgctgattatcttcttgtcctggatcatcctgaaacaccgtaaggggaataatgctcacgaaaaccctaaggaagtggcaattcacctacactctcaaggtgggtcctctgtgcatcccagaacgttgcagacaaatgaggagaatagtcgcgtgcttccttag

SEQ ID NO: 183546 - DNA, 1755 bp, synthetic construct
  misc_feature 1..1755: note = Description of Artificial Sequence: Synthetic coding sequence
  source 1..1755: mol_type = other DNA
ggccactgccaggcccccgaccacttcctgttcgccaagctgaagacccaaacgaatgcctccgacttccctatcggcacatcactgaaatacgagtgccgtcccgaatattatgggaggccgttttccattacatgcctggataacttggtctggagcagccctaaagatgtgtgcaagcggaagtcctgtaaaacacctcccgatcctgtcaatggtatggtacatgtgataacagacattcaagtgggaagcaggatcaattatagttgcacaactggtcatcgccttatcggacactcatcagccgagtgcattctgagcgggaacgcagctcactggtctactaagccacccatctgccagaggattccttgcggcctgccacctaccatcgctaacggcgacttcattagtacaaacagagagaactttcactacggaagcgtggttacatatcgatgcaacccgggctcaggggggcgcaaggtttttgaactggtgggggagccgagcatttactgtacaagcaacgacgaccaggtcggaatctggtccggcccagccccacagtgcatcatccccaacaagtgcacaccacccaatgtggagaatggtatcctcgttagtgacaacagatccctgttttcccttaacgaggtggtggagttcagatgtcagcccggctttgttatgaagggtccgaggagggtgaaatgccaggcactcaataaatgggaaccggaattaccttcttgctctagggtgtgccagccccctcccgacgtccttcatgccgagcgcacccagcgcgataaagataacttcagcccggggcaagaagttttctactcttgcgagccaggttacgatttgcgcggcgccgctagcatgagatgcactccccaaggggattggtcccccgctgcccccacttgtgaggtcaagagctgcgatgatttcatgggccaactcttgaacggacgagttctgtttcctgttaacctgcagttgggcgccaaagtggactttgtgtgcgatgaggggttccagttgaaagggagctctgctagctactgcgttctggcgggaatggagagcctgtggaacagcagtgtgcctgtgtgcgaacagatcttttgcccttcgccacccgtgatcccaaacggtcgccacacaggaaaaccactcgaagtgtttccatttggaaagacagtgaattacacctgcgacccacaccccgacagagggacaagcttcgaccttatcggcgagagcacaatcaggtgcaccagcgacccgcagggtaatggcgtctggtcatctcctgctccaagatgtggcatattgggacattgtcaggcccccgaccacttcctatttgccaaactcaagacccaaacgaatgcgagcgatttcccaatagggacctctttaaagtacgagtgtcgaccagaatactacggacgtcctttcagtatcacatgtctggacaacctggtgtggagtagccctaaagatgtgtgcaaaagaaagtcctgcaaaacgcctcccgatccggtgaacggaatggtgcacgtaattacagacatccaggtcggaagtcgtattaactatagttgcactactggacacaggctgatcggccatagcagcgccgagtgcattttgtcaggcaatgccgcccactggtcaactaaacctccgatttgtcaaagaagttgtcatcttccttgcgaactgtttgggcggtag

SEQ ID NO: 183547 - DNA, 1335 bp, synthetic construct
  misc_feature 1..1335: note = Description of Artificial Sequence: Synthetic coding sequence
  source 1..1335: mol_type = other DNA
atggccccccccgtgcggctggagcggcccttccccagccggcggttcccggggttactgctcgcggctttagtcctgctgctttcttcattctccgaccaatgtaacgttccagaatggctgccgtttgcaagacccacaaatctaaccgacgatttcgagttccctattggaacatacctgaactacgaatgccggcccggttattctgggaggccattctctattatctgcctgaagaactctgtatggacctccgccaaggacaaatgcaaaaggaagtcctgtcgcaatccacccgatcctgtgaacgggatggctcacgtcattaaggatattcagtttcggtcacagataaagtacagctgccccaaaggatataggctgattgggagttcctctgccacatgcataatcagtggaaacacggtgatttgggacaataaaactcccgtctgcgacagaatcatctgcggcctgccaccaactatcgctaatggggattttacgtcaattagtcgggagtattttcactatggatcggtggtaacctaccactgtaacctgggctcaagaggcaaaaaagtgttcgagctggtcggtgaacccagcatttattgcactagcaaagacgaccaggtaggtatctggagcgggccggctccacagtgtattatcccgaacaagtgtactccccccaacgtagagaatgggattttggtgagtgataaccggtctctcttttctcttaatgaagtagtcgagttcagatgccaacccggattcggaatgaaaggaccgagccatgtgaaatgccaagccctgaacaaatgggaacccgagttgccttcatgttcgcgcgtctgccaacccccgccagacgtcctgcacgcagagagaacccaaagagataaggacaacttttcaccgggacaggaagtgttctactcgtgtgaaccgggttatgacttgcgcggaagcacatatctccattgtactccccagggggactggtcgccagcagctcctaggtgtgaagtgaaatcctgtgatgacttcctaggccagctccctaacgggcacgtcctgtttcctctgaatctgcaactaggggctaaagtagatttcgtgtgcgatgagggcttccagctgaaaggaagtagtgcctcgtactgcgtgttggctggaatggagagcctttggaactcgtcagtgccagtttgcgagcggaagtcttgtgagacccctcccgtgccggtgaacggtatggtgcatgtgatcacagatatacacgtggggtcacgaataaactactcctgcacgacaggcttttag

SEQ ID NO: 183548 - DNA, 1710 bp, synthetic construct
  misc_feature 1..1710: note = Description of Artificial Sequence: Synthetic coding sequence
  source 1..1710: mol_type = other DNA
atggccccccccgtgcggctggagcggcccttccccagccggcggtttccagggctcctgctggccgcgctggtcctcttgctttcttcttttagtgatcagtgcaacgtacccgaatggcttcccttcgcccgccctaccaacctcaccgacgacttcgaattccccatcggcacctacttgaattatgagtgtaggccgggctattctggtagacctttcagtataatttgtctgaaaaactcagtctggacctctgccaaggataaatgtaagaggaagtcttgtcgcaacccacccgaccccgtaaatggaatggcccatgtgataaaagacatccaatttcgctcgcaaatcaaatattcctgccctaaaggatatcgattaataggcagttccagtgccacttgcatcattagtggcaacactgtgatatgggacaacaaaacccctgtgtgcgataggattatttgcgggctgccacctacaatcgccaacggggactttacatccatctctcgtgaatactttcactacgggtcagtcgtgacctaccactgtaacctcgggagtcgtggtaaaaaagtgtttgaactggtgggcgaacctagcatttactgtacgtctaaggacgatcaggtcggcatatggagcggtccggccccacagtgcatcatccccaacaaatgtactccgcccaacgtcgagaatgggattctggtttccgataatcgctcactgtttagccttaatgaagttgtggagtttcgttgccaaccgggattcggcatgaaaggtccttcacacgtcaaatgtcaagccttgaataagtgggagcccgagttaccgtcttgtagcagagtctgccaaccacctcccgatgttctgcacgccgaacgcacccagcgagataaggataatttttcacctgggcaggaggttttttatagctgcgaaccgggttacgacctccgaggtagtacttatctccattgtaccccgcaaggagactggtcaccagccgcaccccggtgtgaagtgaaatcttgcgacgacttcctgggccagctgcccaacggtcacgttctgtttcccctaaacttgcaacttggagctaaagtagacttcgtttgtgatgaaggatttcagttaaaaggcagctccgccagttattgcgtgttggccggcatggaatccctttggaatagctctgtgcccgtatgcgagcggaaaagctgtgaaacgcctcctgttcccgtgaacggcatggtgcacgtcattaccgacatccacgtagggtcaagaatcaattattcatgtactacaggtcatcgcctaataggccattcatctgctgaatgcattctgagcggcaataccgcgcattggagcatgaagcctccgatttgccagcagatcttttgcccgaacccacccgcaatcctcaacggccggcacaccggaacacctcttggcgatattccttatggaaaggaggtgtcatacacctgcgatcctcaccccgataggggcatgacttttaatttgatcggcgaatcaacaattcgcagaacctctgaaccacacggtaatggagtgtggagttcccctgctccaaggtgcgagctgcctgttggagccggcagtcatgatgccctgatagtgggcaaattctacgaagtgttcgcagaggagttctgtcatctgtag

SEQ ID NO: 183549 - DNA, 3279 bp, synthetic construct
  misc_feature 1..3279: note = Description of Artificial Sequence: Synthetic coding sequence
  source 1..3279: mol_type = other DNA
atgggcgccgccggcctgctgggcgtgttcctggccctggtggccccaggggtcctgggcatctcctgcgggtctcctcccccgattttaaacgggcgcattagctattatagtacccccatcgctgtgggaacggttattcgctacagctgcagtgggacgtttagacttattggagaaaagtcactcctttgtattacaaaggataaggtcgacggcacttgggacaagcctgcacctaagtgcgagtactttaacaaatatagctcatgtccagagcccattgtacccggagggtacaaaattagaggctcaaccccctaccggcatggcgacagcgtgacctttgcctgtaagactaatttttccatgaatggtaataagtccgtctggtgccaggcaaacaatatgtgggggcccactagattaccaacatgcgtgagcgtctttcccctcgagtgtcctgcactacccatgatccacaatggccaccacacttcagagaacgtgggatccatcgccccgggactgtccgtcacctacagctgtgagtctggatatctgctggtgggggagaaaataatcaattgcttatcgagtgggaagtggagtgcagtccctcctacctgcgaagaagcgcggtgcaaaagtctaggcagatttcccaatgggaaggtgaaggagccgcctattctgcgagtaggagtgaccgcgaacttcttctgtgacgagggctataggctgcaagggcctccctcctcaagatgtgtcattgccggtcagggcgtggcctggaccaaaatgccagtttgcgaagagattttttgccccagtccaccaccaattctgaatggacggcacatcggaaattctctggccaacgtgagttacggttctattgtcacatatacctgcgaccctgatcctgaggaaggcgttaattttattctgatcggagagtcgactctgcgctgtaccgtcgacagccagaaaaccggtacctggtctggacccgctcctcgctgcgagctgtctacttctgcggtgcagtgtccgcatccacaaattctgcgcggccgtatggtgagtggccagaaagatcgatacacttataatgacactgtgatctttgcttgcatgttcggcttcacactgaaagggtctaagcaaatcaggtgtaatgcacaaggaacctgggagccttcagcaccggtgtgcgaaaaggaatgtcaagcccccccgaatatcctgaatgggcaaaaggaggaccgccacatggtgcggttcgacccagggacatccattaagtacagctgtaatcccgggtacgttcttgttggggaggagtcaatccagtgcacctccgagggcgtgtggacccctcccgtcccccaatgtaaagtggctgcttgcgaggcaaccggacgtcagctgctgactaagccccagcaccagtttgtccggccggatgttaattcctcatgtggcgagggctacaaactaagcggctcggtttatcaggagtgccagggtacaataccatggttcatggaaatccggttatgcaaggaaatcacctgtcctccccctccagtgatatacaacggcgcgcacaccggatctagcctggaagactttccctacgggactaccgtgacatatacatgtaatccgggaccagaacgtggagtggaattcagcctaatcggtgagtccactatacggtgcacctctaatgatcaagagcgcggcacctggtctgggcctgcccctctgtgcaagctgagcttgctagctgtgcagtgctcccatgtccacatagctaacggctacaaaattagtggtaaggaagctccatacttttacaacgatactgtcacctttaaatgctattctggctttaccctgaagggatcttctcaaattcggtgtaaggccgataatacatgggacccagagatccccgtttgtgaaaaaggatgtcaatcacctcccggcctgcaccacggccgacacactggcgggaacacagtctttttcgtgagtggaatgactgtcgattacacctgtgaccccggttacctgctggtgggaaataagtctattcactgcatgccctcaggaaattggtctccatcagcccccagatgcgaggaaacctgtcaacacgttcggcagagtttgcaggagctgccagccgggagcagggtggaactagttaacactagctgccaggatggatatcagcttacgggtcacgcataccagatgtgtcaggatgcagagaatggaatctggtttaaaaagattccattgtgcaaagtcatccactgccaccccccaccagtgatcgtgaatgggaagcacactggcatgatggctgagaacttcctgtatggaaacgaagtttcatacgagtgcgatcaagggttttacctgctaggcgagaaaaaacttcagtgcaggtctgattcaaagggacacggaagttggagcggcccgagtccgcagtgtctccggtcacctccagtgacacggtgtccaaacccagaggtaaaacatgggtacaaactcaacaaaactcactcagcctatagtcacaacgatatcgtgtatgttgactgtaaccctggatttatcatgaacggttcaagggtgatcagatgccataccgataacacctgggtgccaggcgtcccaacgtgcataaagaaagccttcatcggctgtccgcctcctcctaaaactcccaatggcaaccatactggaggcaacatagccagattcagccctggaatgtccatcctctattcatgtgaccagggttacctattggtgggcgaggctttactgctatgcactcacgagggaacttggagccagcccgctccacattgcaaagaggtgaattgctcttcacctgctgacatggacggaatccagaagggactcgaaccccgcaagatgtatcagtatggggctgttgtaactttggagtgtgaagacggttatatgctggaaggctcaccacagtcacaatgccaatccgaccaccagtggaatcctcctctcgctgtgtgccgctctcgctccttagctcccgttctgtgtggcatcgcagccggactgatattactgaccttcttaatagtgattacgctgtatgtgatcagcaagcaccgggcccggaattactacacagacaccagtcagaaggaggcatttcatttagaggcacgggaggtgtactccgttgacccgtataaccccgctagctag

SEQ ID NO: 183550 - DNA, 3102 bp, synthetic construct
  misc_feature 1..3102: note = Description of Artificial Sequence: Synthetic coding sequence
  source 1..3102: mol_type = other DNA
atgggcgccgccggcctgctgggcgtgttcctggccctggtggcccccggcgttttggggatctcatgcggctcccccccccctatccttaatggccgcatctcttactacagtacaccaatcgctgttggaaccgtaatccggtattcctgctccgggactttcagacttattggcgaaaaatcgctgctctgcatcactaaggataaagtcgacggcacctgggataagcctgccccaaaatgcgaatacttcaataagtattcgagctgcccggaacccatagttccagggggatacaagatccgcgggagtaccccctatcggcacggcgactctgtgaccttcgcctgcaagaccaatttcagcatgaacgggaataaaagcgtctggtgtcaggccaacaacatgtggggtcccactcggctgcccacctgcgtatctgtttttccccttgaatgtccagccttacctatgatccacaacggtcaccacacctccgaaaatgtaggctccattgcaccaggcctgtctgtaacttattcctgtgaaagcggctatctgctggtcggagaaaagattattaattgcctgtccagtgggaaatggtccgctgtccctccaacatgtgaagaagcacgatgcaagagtctgggaagatttcccaatggcaaggtcaaagaaccacccattttgagggttggtgtgacagcaaacttcttctgcgatgagggctatcgcttgcagggtcccccctcaagtagatgcgttatcgctgggcagggagtcgcctggaccaagatgcctgtctgcgaggaaatcttctgccctagtcccccccctattctgaatgggaggcatattgggaacagcctagctaacgtgtcgtatggttcgatcgtcacctatacttgcgatccagaccctgaggagggtgtgaacttcatccttatcggagagtctactctgcggtgtactgtagattcgcagaagactgggacatggtccggccccgcaccacgatgtgagctcagcacatccgccgtacagtgtcctcatccccaaattttacgcggacgtatggtctcagggcaaaaggaccgatacacttataacgatactgtgatctttgcctgcatgttcgggtttacactgaaaggatcaaagcagattcgttgcaacgcacagggaacctgggaaccctctgcgcctgtgtgtgagaaggaatgtcaggcccctccaaatattttgaatggccagaaggaagacaggcatatggtgcggttcgatccggggacctctattaagtacagctgtaatccgggctacgtccttgtgggcgaggagtctatccagtgcacgagcgagggagtctggaccccccccgtcccacaatgcaaggtcgcagcctgtgaagccacaggccggcagctgctcaccaagcctcagcatcaattcgttcggcctgatgtgaattccagctgcggtgaaggttacaaactgtcaggtagcgtctaccaggagtgccagggcaccattccatggttcatggaaattcgcttgtgtaaggagattacatgccccccccccccagtcatttataacggtgcgcacaccgggagctctcttgaggatttcccttatggcaccaccgttacctatacgtgcaatcccggccctgagcgcggggtagagttcagcctgatcggagagagcaccatcagatgcactagtaatgatcaggagaggggaacctggagcggcccagctccactctgcaagctcagtctcctcgcagtgcagtgtagccatgtacatattgcaaacgggtacaagatctccggtaaagaagctccttacttttacaatgatactgtgactttcaaatgttattctgggtttacacttaagggctccagtcagattcgatgtaaagcggacaacacctgggatccagaaatcccagtgtgcgagaaggaaacttgccaacacgttcgacagagcctgcaggaactccctgccggctccagggtggagctggtaaacacatcgtgtcaggatggttaccagctgacaggtcatgcataccagatgtgccaggatgcagagaatggtatctggtttaagaaaatccccttgtgcaaggtgattcactgccatccaccccctgtgattgtaaacggtaagcacaccggaatgatggccgagaactttctgtatggaaacgaagtgtcatatgagtgtgatcagggtttttacctcctgggagagaaaaaactacagtgccgttctgattctaaaggtcatgggagctggtccggccccagtcctcagtgtttacgctctccaccagtaaccagatgtcctaaccccgaagttaaacatggctataagctgaacaagacccactcagcttattcccacaatgacattgtctacgtggattgcaacccaggattcattatgaatgggtcccgggtgatccgctgccacacagacaacacttgggtgccaggggtgcccacatgcattaagaaggccttcattggatgcccccctccccccaagacccccaacggtaatcatactgggggcaacattgcccgcttcagcccgggaatgagcatactgtactcatgtgatcaaggatatctcctcgtgggcgaggctctgcttttatgcacccacgaaggcacctggtcacaacccgcgccacactgtaaagaggtcaattgttcctcaccagccgacatggacgggatacaaaagggcctggagcctcgcaagatgtaccagtacggcgccgtggtcaccctcgagtgtgaggacggatatatgcttgagggctcaccgcagtctcagtgtcagagcgatcatcagtggaatccgcctttagcagtatgtagatcacgcagccttgctccggtgttgtgcggcattgctgctgggctgattctgcttaccttcctcattgtgattaccctctatgtaatcagcaaacatcgggctagaaattactataccgacacatctcagaaggaggcctttcacctggaggctcgcgaggtgtattccgttgacccctataatccagcttcttag

SEQ ID NO: 183551 - DNA, 2916 bp, synthetic construct
  misc_feature 1..2916: note = Description of Artificial Sequence: Synthetic coding sequence
  source 1..2916: mol_type = other DNA
atgggcgccgccggcctgctgggcgtgttcctggccctggtggccccgggcgttctaggcatctcctgcggaagccccccacccatcttaaatggccgcatctcctattattctacccccatcgccgtagggaccgtgattcggtacagctgctctggcaccttccgactgataggcgagaaaagtcttctttgcatcaccaaagataaagttgatgggacgtgggacaagcctgcccccaagtgtgaatacttcaataaatattccagctgcccagagccgattgtacctggcggctataaaattcgaggcagcactccttatcggcacggggattcagtaacctttgcttgtaaaacaaacttctccatgaatgggaataaatctgtgtggtgccaggcaaataatatgtggggaccgaccagactcccgacctgtgtttccgtttttccacttgagtgccccgcactgcccatgattcataatggacatcacactagcgagaacgttggatccatcgctcctggcctatcggtcacatatagttgcgagtctggttatctgttggtcggggagaaaattatcaattgcctgtctagcggcaaatggagcgctgtgccacccacatgcgaagaagcccgctgcaaatccctgggtagattccctaatgggaaagtgaaggaacccccgatcctccgggtgggtgtgaccgcaaacttcttctgtgacgagggctataggctgcagggacccccatctagcaggtgtgttatcgccgggcagggggttgcttggacaaaaatgcctgtctgtgaggaaatcttttgcccatcacccccgccaatccttaatggtcgacacatcggtaattccttagccaacgtgtcctacggaagtatcgtcacctacacgtgtgaccctgatccggaagaaggcgtgaacttcatcctgatcggagagtcaacattacggtgcactgtggattctcaaaaaacagggacctggtcaggccctgcgcccagatgtgagctaagcaccagcgccgtccagtgtcctcacccgcagattctgcgggggaggatggtcagtggtcaaaaggaccggtacacctacaatgacactgtaatcttcgcatgtatgttcggctttacactcaaggggtctaaacaaatcagatgcaacgctcagggaacctgggagcccagcgcacctgtatgcgagaaagagtgtcaggcccctccaaatatcctgaatggacagaaggaggatagacacatggtccgatttgatcctgggacaagcatcaagtacagctgtaatcccgggtacgttcttgtgggcgaggagagcatacaatgcaccagcgaaggcgtgtggaccccccccgtgcctcaatgtaaggttgcagcctgcgaagcaacaggtcgccagctgctgacaaaaccacagcatcagttcgtgcgccctgacgttaattcatcctgcggagaagggtataaactatccggttcagtctaccaagagtgccaggggacaatcccatggttcatggagatccggctgtgcaaagaaataacttgcccccctccgcctgtcatctataacggtgcacacacggggagttctctcgaagattttccttatggcactactgtcacctatacatgtaaccctgggcccgaaaggggggtggagttctctctcattggtgaaagtactatacgctgcacaagcaacgatcaggagagagggacgtggagcgggcctgccccactatgcaagctgagccttttggcggtgcagtgtagtcatgtccacattgccaacggatataagatatctgggaaagaggccccctacttctacaatgacaccgtcacttttaagtgctactctggttttaccctgaagggctcctcccaaattagatgcaaggctgacaatacttgggacccggaaatccccgtctgtgagaaggaaacatgtcagcacgtgaggcagagcctacaggagctccccgccgggtctagagtagagctggtcaatacctcatgtcaggatggttatcaattgacaggacacgcttatcagatgtgtcaagatgccgaaaatgggatttggttcaaaaagatcccgctctgtaaggtgatacactgtcatcctccccccgtgatcgttaatgggaagcatacaggaatgatggccgagaacttcctctatggaaacgaagtttcttatgaatgcgatcaggggttctatctacttggtgagaaaaagctgcagtgcaggtctgattctaagggacatggctcatggtccggcccttccccccagtgcctacggtcacctcccgtcacacggtgccctaacccagaggtaaagcacggatacaagctgaacaaaacacactccgcctactcacataacgacatcgtctacgtggactgtaatcctggctttattatgaatgggtcgcgggttattaggtgccacacagacaatacctgggtgccaggagtcccaacatgtattaaaaaggaagttaattgctcttcaccggccgatatggacggtatccagaaaggattggagccgaggaagatgtatcagtatggcgcagtggtgactctggagtgtgaagacggctatatgctcgagggaagccctcagtcccagtgtcagagcgatcatcaatggaacccccctttggccgtttgtaggtctagaagtctggcccctgtgctctgtggcatcgcggcaggactgatcctgctcacctttctcattgtcattactctgtacgttatctctaagcaccgggcaaggaattactacaccgatacttcccaaaaggaggcgtttcacctggaggccagagaggtgtattccgtggatccttacaatcctgcctcctag

SEQ ID NO: 183552 - DNA, 3021 bp, synthetic construct
  misc_feature 1..3021: note = Description of Artificial Sequence: Synthetic coding sequence
  source 1..3021: mol_type = other DNA
atgggcgccgccggcctgctgggcgtgttcctggccctggtggccccaggggtgttggggatatcttgtggcagtcctccaccgattttgaacggccggatatcctattactcaaccccgatcgctgtgggcacggtcatccggtacagctgtagtggtacatttaggcttattggagagaagtccttgctgtgcatcaccaaggacaaggtcgatgggacctgggacaaacccgctcccaaatgtgaatatttcaataaatattccagttgccccgagccaattgtgcctggtggctacaagattcgcggctcgacaccctacagacatggcgacagtgtcacattcgcttgcaaaactaacttctcaatgaacggcaataagtcagtctggtgtcaggccaacaacatgtggggccccacaaggctgcccacctgtgtctctgtcttcccactagaatgcccagctctgcctatgatccacaacggccaccataccagcgaaaatgttggctcgatcgccccaggcttgtccgtgacctacagctgcgaatcgggatatctgctcgtgggcgaaaaaatcattaattgcctttcctcagggaagtggagtgcagtccccccaacatgtgaggaagctcgttgtaaatccttaggtcggttccctaatggaaaggtgaaggaacctccaatcctgcgcgtcggagtaacagcgaactttttttgtgacgaagggtaccgcctacaaggaccaccaagctcccgctgcgttatcgcaggacagggcgttgcttggactaagatgccagtgtgtgaagagatcttttgcccctcacctccgccaatcctgaatggccggcatattggcaactctttagccaatgtctcctatgggagcattgtcacttacacatgtgaccccgacccagaggaaggggtcaacttcatcttgattggagagtcaaccctaagatgtaccgtagacagtcagaagacaggcacttggagcggtcctgctccacgttgtgagctgagcactagcgccgttcagtgccctcacccacagatacttaggggacgaatggtgagcgggcagaaagaccggtatacctataacgatacagtaatcttcgcttgcatgttcggattcaccctgaagggaagcaaacaaatcaggtgcaacgcgcagggaacctgggaaccaagcgcgccagtctgcgagaaggagtgccaagcccctcctaacattctcaacggacaaaaggaagataggcacatggtgcgtttcgaccccggcacatctatcaagtattcctgtaacccaggctatgtcctcgttggtgaggaaagcatacagtgtactagtgagggcgtgtggaccccgcccgtcccccagtgcaaggttgccgcctgtgaggccaccggcagacagttgctcacaaaaccacagcaccagtttgtacgccctgatgtgaattcctcctgcggcgaggggaaccacctgccaactacaccgtgttatctacagtggggtacacatcgggagtttctgaggagattttccatctggaatcatggccatctacatatgccaggccctgagagaggcgtggaatttagtctgattggcgagtcaaccatcagatgtacatccaatgatcaggagaggggaacctggagcgggcctgccccgctttgcaaactttcgctgctcgctgttcagtgctcacatgtccatatagctaacgggtacaagattagtggaaaagaagcaccctatttttataatgatacagtgactttcaagtgctatagtggcttcaccctgaaaggaagtagccagattcggtgcaaggcagacaacacctgggatccggaaatccccgtgtgtgaaaaagagacctgtcagcacgtgcgccagtccctgcaggagctaccagccggatcacgagtagagttagtcaatacttcctgccaggatggatatcagttgactgggcacgcttaccagatgtgccaagatgccgagaatgggatttggttcaagaagatccccctgtgcaaggtcatccactgccacccaccccccgtgattgtaaatggaaaacatacaggcatgatggcagagaattttctgtatgggaacgaggtatcttacgaatgtgatcagggattctatttgttgggagaaaaaaaacttcagtgcagatcagatagcaaaggtcacgggtcctggtcagggccctccccccagtgccttcgtagccctcccgtgaccagatgcccaaaccctgaggtgaaacacggctacaagttgaataagactcactcagcatactctcacaatgacatcgtgtacgtagactgcaaccccggcttcattatgaacggatctagggtcatcaggtgccacacggacaacacatgggtccctggcgttcccacttgcatcaagaaagctttcattggctgccctccacctccaaaaactcccaacggcaatcatacaggtggcaacattgctaggttctcaccagggatgtcaatcctctatagctgcgatcaaggttacctgctcgttggcgaagccttgttgttgtgcacgcatgaaggcacttggtctcagcccgctccccactgcaaggaggttaactgtagttcccccgctgacatggatggcattcagaaaggtctggaaccgagaaagatgtatcagtacggggctgtagtcaccctggaatgcgaggacgggtacatgcttgaggggtcgccacagtcgcagtgtcaatctgatcaccagtggaaccctccactcgctgtctgcaggagcaggagtctcgcaccggtactctgcggcatcgcggccggcctaatcctactcacttttctgatcgtgatcactctgtacgttattagcaagcaccgtgccagaaattactataccgacactagccagaaagaggcgttccatttggaggccagggaggtctactccgtggatccttataatccagcttcttag

SEQ ID NO: 183553 - DNA, 2226 bp, synthetic construct
  misc_feature 1..2226: note = Description of Artificial Sequence: Synthetic coding sequence
  source 1..2226: mol_type = other DNA
atggccgccgccgagggccccgtgggcgacggcgagctgtggcagacctggctgcctaaccacgtggtattccttcgtctgcgggaaggtctgaaaaaccaaagcccaaccgaggccgagaaaccagcaagcagctctttgccgagctccccaccaccccagcttctgacgcggaatgtggtgttcggccttggcggtgaactgtttctgtgggatggtgaagacagcagtttcctggtcgtcaggctgcgcggcccgtccggtggcggagaagagccagccctcagccagtaccagcgtcttctatgcatcaatcccccacttttcgagatctaccaagtgctattgtctcctacccagcatcatgtcgctctgattggaattaagggtctgatggtgttagaacttccaaagaggtgggggaaaaattccgaattcgagggcggcaaatcaacggtcaactgcagcactacaccggttgcagagcgcttctttacatccagcacctccctgactttgaaacacgctgcctggtacccgtctgagatactggacccccatgtggtgcttctgacttctgacaatgtcataagaatttactctctcagggaacctcagacccccacaaatgtgataatactctctgaggctgaagaagagtcccttgtcctgaataaaggcagggcttacaccgcatcactcggtgagaccgcagtggccttcgattttggcccgctggcagccgttcctaaaaccctcttcggacagaacggcaaagatgaagtcgtcgcatacccattatatatcctgtacgaaaatggggaaactttcctaacttatatctcgctgttacactcccccggcaatatcggaaaactcctggggcccctgcctatgcatccggcagcggaggacaattacggctacgatgcctgcgctgtgctctgcctcccctgcgtacctaacattctcgttattgccacggagtcaggaatgctgtatcattgtgtggttcttgagggggaagaagaggatgaccacacgtctgagaagagttgggattcacggatcgatctgatcccttcattgtacgtttttgagtgcgtagagttggaactggctctcaaactggctagcggagaagacgacccgtttgattccgatttctcctgccctgttaaacttcatagggatcctaagtgtccctctcgttaccattgcactcacgaggctggagtccactcagtgggacttacttggattcacaagctgcacaaatttctggggagcgacgaggaagacaaggatagcctccaggaactgtctacagagcagaagtgctttgtggaacacatcttgtgcactaagccgttaccatgtcgccagccagcgcctatcaggggcttctggattgttccagatatattgggcccgaccatgatctgcatcacctctacatacgagtgcctcatatggcctctgctgagtactgtccacccagcttcccccccactgctatgcacccgggaggacgtggaggtggcagaatcccccttgagggtcctggcagaaacaccagatagtttcgaaaagcacattagatccatcttgcaacgttccgtggcaaaccctgcttttcttaaagcctcagaaaaagacatcgctccacctcctgaagagtgcctgcagctactctccagggccactcaagtgttccgggagcaatacatcctgaaacaagatctggcaaaagaggagatccaaagacgggtgaaactgttgtgcgaccagaagaagaagcagctggaggatctgtcatattgcagagaggaacgcaagagcctaagagagatggccgagaggctagctgacaaatacgaggaagccaaggagaaacaggaagatatcatgaaccgtatgaaaaaacttctccacagtttccattctgaactgcccgtgcttagcgattctgagcgtgatatgaagaaagagctccagctcatcccagaccagttaaggcatctgggaaacgccattaaacaagtcaccatgaagaaagattaccaacaacaaaaaatggaaaaggtcctaagcctgcctaagcctactattattctcagcgcctatcaacgaaaatgcattcagtctatcctgaaagaggaaggtgagcacatccgcgaaatggtgaaacagatcaacgatattcgcaatcatgtcaatttttag

SEQ ID NO: 183554 - DNA, 762 bp, synthetic construct
  misc_feature 1..762: note = Description of Artificial Sequence: Synthetic coding sequence
  source 1..762: mol_type = other DNA
atgatgatgaagatcccctggggcagcatccccgtgctgatgctgctgcttctcctggggctcatcgatatttcacaggcacaactgagttgcacaggaccacctgcgatccccggcatccccggcattccaggcactccaggtccagacggtcagcctggtacccctggcattaaaggagaaaaaggccttcctggcctggctggggatcatggagagtttggcgaaaaaggggatcccggtatacctggcaacccaggcaaagttggcccaaaaggtccaatggggcccaagggcggccctggagcgcctggagcacctgggcccaagggtgaaagtggcgattataaagctacacaaaagatagctttctctgcaaccaggacgatcaatgtgccattaagaagggatcagacaattcgctttgatcacgtgataaccaatatgaacaacaactatgagccacgctcaggtaaattcacgtgtaaggtgcccgggctctactatttcacttaccacgcttcttccaggggaaatttatgtgtaaaccttatgcggggccgcgagcgcgcacagaaagtggtcactttttgcgactacgcctacaacacattccaggtgacaactggtggcatggtcctcaaactggaacagggcgaaaatgtgttcctccaagccaccgacaagaactccctgctcgggatggagggagcgaacagcatattctcaggcttcctgctattcccagatatggaagcttag

SEQ ID NO: 183555 - DNA, 690 bp, synthetic construct
  misc_feature 1..690: note = Description of Artificial Sequence: Synthetic coding sequence
  source 1..690: mol_type = other DNA
atgaagatcccctggggcagcatccccgtgctgatgctgctgctgctgttggggctgattgatatcagtcaggcgcaactttcatgtacaggaccgcccgctatccccggcattcccggaattcccggtacacccggtcccgatggccaacccgggactcccgggattaagggggagaaaggactgcccggtctggcgggcgatcatggggagtttggtgaaaagggcgaccctggcatccccgggaacccgggaaaggtaggcccaaagggtcctatgggtcctaagggcgggccgggagctccaggagcccctggtcctaaaggcgaatccggcgactataaggcaacccagaaaatagccttttcggctactagaactataaatgtccctctacgcagggatcagactatccgcttcgaccatgtgattacgaacatgaataacaactatgaaccgcggagcggaaagttcacctgcaaggtcccaggtctctactactttacttaccatgcaagtagtcgcggtaatctctgcgtcaatctgatgagaggccgggaaagggctcagaaagtcgtgaccttctgcgattatgcttacaatacattccaggtgaccaccgggggcatggtcttaaagcttgagcagggagagaacgtcttcctgcaggcaaccgataagaatagttag

SEQ ID NO: 183556 - DNA, 756 bp, synthetic construct
  misc_feature 1..756: note = Description of Artificial Sequence: Synthetic coding sequence
  source 1..756: mol_type = other DNA
atgaagatcccctggggcagcatccccgtgctgatgctgctgctgcttctgggcctgattgacattagccaggcacagttgagctgcaccggtccacccgcaatacccggaataccgggtatacctggaacacccggacctgatggccagcccggaacacccggcatcaagggtgaaaaaggcttacccgggttagctggtgaccacggagagttcggtgagaagggcgaccctggaatccccgggaatcctggcaaggttggcccaaagggcccaatgggacccaagggaggaccaggcgcccctggagccccaggtccaaaaggggaaagcggggattacaaggccacacaaaagattgcattctctgccactcgtaccatcaatgtccctttacgaagggaccagactattcgattcgatcatgtcataacaaacatgaataacaactatgagcctagaagtggcaagtttacatgcaaggtgcctgggctgtactattttacctatcacgctagtagccggggcaatctgtgcgtgaacctaatgcggggacgtgaacgcgcccaaaaagtggtaaccttttgtgattatgcttacaacacatttcaggtaaccacaggaggcatggtactgaagttggaacaaggagagaatgtgtttctgcaggctacggataaaaattctctgcttggcatggaaggagcgaatagcatcttcagcggttttctcctcttcccagatatggaagcgtag

SEQ ID NO: 183557 - DNA, 462 bp, synthetic construct
  misc_feature 1..462: note = Description of Artificial Sequence: Synthetic coding sequence
  source 1..462: mol_type = other DNA
atgaagatcccctggggcagcatccccgtgctgatgctgctgctgctcctcggcttgatcgacatctcacaggctcagctctcatgtactggacccccagccattcccggtattcccggcatacccggcacacccggccccgacggccaaccgggaactcctggaattaaaggagaaaagggcctgccgggtctcgccggagatcatggcgaatttggcgaaaagggcgacccaggaatacccggcaatcctggcaaagtaggtccaaagggaccaatgggacccaaagggggcccgggtgcgcctggagctcccggaccgaaaggggaatccggcgattacaaagccacccagaagatagcctttagtgctacaaggaccatcaacgtgcccttgagacgggatcagaccatcagatttgatcacgtgataacaaacatgaacaacaattatgaaccctag

SEQ ID NO: 183558 - DNA, 738 bp, synthetic construct
  misc_feature 1..738: note = Description of Artificial Sequence: Synthetic coding sequence
  source 1..738: mol_type = other DNA
atggacgtgggccccagcagcctgccccacctgggcctgaagctgctgttgctacttctgttactgcctctgaggggacaggctaacacagggtgttatggtatccccggtatgccaggactgccgggcgcccctggcaaggatggatacgacggcttgccgggtccaaagggggaacccgggatcccagctattcccggaatccgggggccaaagggacagaaaggggagcccggactgccaggtcaccccggcaagaacggccctatgggaccgccggggatgcccggcgtgcctggccccatgggaatccccggggagcccggcgaagaaggcagatacaagcaaaagttccagagtgtgtttaccgtgaccagacagacacatcagccacccgctcccaactcacttattcgatttaacgccgtgcttacaaacccccaaggcgattatgacaccagcactggaaagttcacctgtaaggtccctgggctgtattacttcgtctatcatgcctctcataccgccaatctgtgcgtcctgctctaccggtcaggagttaaggtcgtgaccttttgcgggcacacatcaaagactaaccaggtgaatagtggcggagtattgctgagactgcaagtaggcgaggaagtgtggctggccgtgaacgattattacgacatggtcgggatccaggggtccgattccgtcttttcgggctttctcctgtttccagattag

SEQ ID NO: 183559 - DNA, 738 bp, synthetic construct
  misc_feature 1..738: note = Description of Artificial Sequence: Synthetic coding sequence
  source 1..738: mol_type = other DNA
atggacgtgggccccagcagcctgccccacctgggcctgaagctgttgctgctgcttctgctcctccctctgcggggtcaggccaatacagggtgctatggtatacccgggatgcccgggctacccggcgctcctgggaaggatggctacgatggcctcccaggtccgaaaggagagcctggcatcccggcaatccccggaattaggggtcctaagggccaaaagggggaacccggcttacccgggcacccaggtaagaatggacccatgggacctcccgggatgccgggagttccggggcccatgggcattcccggcgaacccggcgaagaaggccgttataagcaaaagtttcagagtgtgttcactgttaccagacagacccaccagccccctgcaccgaatagcttgataagattcaacgctgtgttgacaaatccccagggcgattacgatacctcgaccggcaagttcacttgcaaggtgccggggttgtactactttgtgtaccacgcgtcacatacggccaatctgtgtgtgctgctttacagaagtggggttaaagtggttaccttctgtggtcatacctccaaaaccaaccaggttaactcaggcggagtgctcctgagactccaggtaggagaagaggtttggttggctgtgaatgactactatgacatggtcgggattcaaggatctgattcggtcttctcaggctttctcttgttcccagattag

SEQ ID NO: 183560 - DNA, 738 bp, synthetic construct
  misc_feature 1..738: note = Description of Artificial Sequence: Synthetic coding sequence
  source 1..738: mol_type = other DNA
atggacgtgggccccagcagcctgccccacctgggcctgaagctgctgctgctcctgctccttctgcccttgaggggccaagcaaatacaggctgttatgggattcccgggatgcccggtttaccaggggcccccggtaaagatgggtatgacggccttcctggccccaagggagagcctggcatccctgcaataccaggaatacggggtccaaaagggcagaagggcgagcccgggctgcctggccatccaggcaagaacggccctatggggcctcctggaatgcccggcgtgcctggacccatgggcatccccggcgaacccggcgaggaaggacggtacaaacaaaagttccagagcgtattcaccgtcactaggcaaactcaccagcccccagctccaaactctctcataagattcaacgcagtgctgaccaatccccaaggagattatgatactagcactgggaagttcacgtgcaaagtgcctggactgtactattttgtctaccacgcatctcacactgcaaatctctgtgtgctcctttatcggtccggcgtcaaggtggtgactttttgcggacacacctctaaaacaaatcaggtcaacagcggcggggtactgctgagactccaggtcggagaagaagtgtggttggccgtgaacgactattatgacatggtgggcatccagggtagcgattctgtgttctccggctttctgctctttccagactag

SEQ ID NO: 183561 - DNA, 777 bp, synthetic construct
  misc_feature 1..777: note = Description of Artificial Sequence: Synthetic coding sequence
  source 1..777: mol_type = other DNA
atgctgctggtgctggtggtgctgatccccgtgctggtgagcagcggcgggcctgaaggacactatgagatgttgggaacctgccgtatggtctgcgacccataccctgctcggggacccggagcaggggctcgcaccgacggtggtgacgcactgagcgagcagagtggagccccacctcctagcaccctggtgcaaggaccacagggaaaacctggcaggacaggcaaacctggcccacccggcccgccaggcgatcctggccctcccggacctgtgggacctcctggagaaaagggagaaccaggcaaacctggcccgcccggactccctggcgccgggggctcgggggccatctcgacggccacatacactacagtccctcgcgtggctttttacgccggcctgaagaatccccacgaggggtacgaagtgctgaagttcgacgacgtcgtgacaaaccttggaaacaactacgacgctgcatcaggtaaattcacctgcaatattccaggcacgtatttcttcacctatcacgtcctgatgagagggggtgacggaacatctatgtgggctgacctgtgcaagaatgggcaggtgcgggccagcgccatcgcccaagacgccgaccagaattacgactatgctagcaacagtgtcatcttacacctagatgcgggagatgaggtatttatcaagcttgacggaggcaaggctcatggcggaaactccaataaatatagcacattctccgggtttatcatttatagcgactag

SEQ ID NO: 183562 - DNA, 864 bp, synthetic construct
  misc_feature 1..864: note = Description of Artificial Sequence: Synthetic coding sequence
  source 1..864: mol_type = other DNA
atggccctgggcctgctgatcgccgtgcccctgctgctgcaggccgctccacgcggcgcagcccactacgaaatgatggggacctgtaggatgatttgtgatccatatacagccgcccctggcggcgagccgccaggcgcaaaagctcaacctccaggcccatcaacagccgcgctggaggtgatgcaggatttgtccgctaatcctcccccgcccttcattcagggtcctaaaggagaccccggtcgaccaggaaagcccggtccaagagggccacccggcgagcccggacctcccgggcccagggggcctccaggagaaaaaggcgatagcgggagacctggattaccaggccttcagcttaccgcaggcacagcctcaggtgtcggtgtagttggggggggagccggcgtgggcggggacagcgagggggaggtgacgagcgctctgtctgcaaccttctctgggccaaagatcgcgttctatgtcggactgaagagtccccatgagggttacgaggtgcttaaatttgacgacgtggttacaaatctgggcaatcactacgatcctacgactggcaagttttcatgccaggtgagaggtatttacttttttacctatcacattctcatgaggggcggagatggcactagcatgtgggccgatttgtgtaagaatggccaggtccgagcctcggccatcgctcaagatgctgatcaaaattatgattacgcctcaaactctgtggtccttcatttagatagtggcgatgaagtatacgtgaaactggatggcgggaaggctcacggaggtaacaacaataagtacagtactttctccggatttctgttatatccagactag

SEQ ID NO: 183563 - DNA, 2007 bp, synthetic construct
  misc_feature 1..2007: note = Description of Artificial Sequence: Synthetic coding sequence
  source 1..2007: mol_type = other DNA
atgagcgtgcggttccgggtgggccgggaggagaacgcccagtggtggctcctgtatctcctggtgccggccctgttttgccgagcagggggatccattcctatacctcagaaactctttggtgaggtcacctctcccttgttcccgaaaccttacccaaataattttgagaccacaactgtgattacagttcccactggctatagagtgaaactggtcttccagcaatttgacctcgaacccagcgagggttgcttttacgactacgtaaagataagcgccgacaaaaagagtctgggaaggttttgcggccagctgggttcgcccctcggaaatccgccgggaaagaaggaattcatgtctcagggaaataaaatgttgttgacgttccacacagacttctctaatgaggagaacggaacaatcatgttctacaagggctttctggcctactaccaggccgttgatctggacgaatgtgccagtaggtctaaaagcggcgaggaggatccccaacctcagtgccagcacctgtgccataattatgtggggggatacttttgctcttgtcggcctggctacgagctccaggaagaccggcatagctgtcaggccgaatgctctagcgaactgtacactgaagctagcggctatatcagctctctggagtatcccaggagctatcctcctgacctgaggtgtaattactcaatacgggtggaaagaggactcacactgcacctgaaattcctggagccgtttgacattgacgaccatcagcaagtccattgtccgtatgatcagttgcagatttacgcaaacggcaaaaatatcggtgagttttgcggaaagcagagaccacccgacctggatacatcaagtaacgctgtggatctcctgtttttcactgacgaatccggggactcgcgcgggtggaaactgaggtacactacagagatcatcaaatgcccccagccgaaaaccctggatgagtttacaatcattcagaatctgcagcctcagtaccaattcagagactacttcattgccacctgtaaacaagggtatcagttgatagaaggtatacaggtggttgctggggtcgtggacgtgtcagcagggagagtgtcgtggtccacgtcaagtcagacctgctgtacccgggtctacacatgcactgctcagggcatctggaagaatgaacaaaagggagagaagatcccacgttgtctgccagtgtgcggtaaacccgtcaatcctgtagagcagcggcagcggatcataggggggcagaaagccaagatgggcaactttccgtggcaagtgttcacaaacatccacggaaggggaggcggggccctgctgggggatagatggattcttaccgccgcgcataccctatatcccaaggaacatgaggctcagagcaacgcctcattagacgtattcctgggccacaccaatgtggaagagctgatgaaattggggaatcaccccataagacgcgtttcggtacaccccgattatcgccaggacgagagctataattttgagggggacatcgccctacttgagttggaaaatagtgtgactctggggcctaacctattgccgatctgcctcccggataatgacacgttctacgatctcggcttgatgggctacgtctccggctttggtgttatggaggaaaagatagcccacgacttacggtttgtgcgcttgcccgtggccaacccacaggcctgtgagaattggttaagggggaagaaccggatggatgttttttcacagaacatgttctgcgccggccacccttccctgaagcaagacgcgtgccagggggattcaggcggtgtctttgcagtgcgggatcccaataccgacaggtgggtcgccactggcatagtctcttggggtattgggtgcagtcgcgggtatgggttttataccaaggtgctgaactatgtcgattggattaagaaggaaatggaggaggaggattag

SEQ ID NO: 183564 - DNA, 1131 bp, synthetic construct
  misc_feature 1..1131: note = Description of Artificial Sequence: Synthetic coding sequence
  source 1..1131: mol_type = other DNA
atgtggctgctgtacctgctggtgcccgccctgttctgccgggccgggggaagtatccctattccccagaagctttttggtgaagtgaccagtcctctatttccgaaaccttaccccaacaacttcgagaccaccaccgtgatcaccgtccctactggctaccgcgtaaagctggtcttccagcaatttgatcttgaaccgtctgagggctgcttttacgactacgtgaagatatccgccgataagaaatcgctaggaaggttctgtggacagttgggatcaccacttggtaatccacctggaaagaaagagttcatgtcacaggggaacaaaatgctcctgactttccatacagacttctctaatgaggagaacgggacaatcatgttttacaaaggatttcttgcttactaccaggctgtcgatctcgacgaatgtgcctcaagatctaagagtggggaggaagacccccagccgcagtgccagcacctgtgccataattacgtggggggttacttttgctcttgtaggccaggatatgaactgcaggaggaccgccactcatgtcaagcagagtgtagcagcgagctttatactgaagcgtcaggctacatttcctccttggaatatccccggtcctatccaccagatctccggtgcaactattccattagggtcgagcgaggactaacattgcacctcaagttcctggaacccttcgatatcgacgatcaccaacaggtgcactgtccatacgatcagcttcaaatctacgcaaatggcaagaacatcggggaattctgcgggaagcagagaccaccagacttagacacttcttccaatgctgtggacctgctgttcttcacagatgagagtggagacagcagaggatggaagctcaggtacacgaccgagattattaaatgcccccagccaaaaacactcgacgagtttaccatcattcagaatctgcagccccagtatcagttcagagactactttatagcgacctgcaagcagggttaccagctgatcgagggttgtacacccgcccagcaccgtgcttttggccgcatgaataggcgagagcggcggtttctaggagcctgtcaatgcgttggttccccttag

SEQ ID NO: 183565 - DNA, 1962 bp, synthetic construct
  misc_feature 1..1962: note = Description of Artificial Sequence: Synthetic coding sequence
  source 1..1962: mol_type = other DNA
tggctgctgtacctgctggtgcccgccctgttctgccgggccggcggaagcatcccaattccccaaaagctgttcggcgaagtaacctcccctctgttccccaagccttatcccaataatttcgagactactactgtgataactgtcccgaccggctatagagttaagttggttttccagcagtttgatctggagccctctgagggctgcttttacgactatgtgaagatttctgccgataagaagagcttaggcagattttgcggccaacttggcagtcctctcggaaacccacccggaaaaaaagagttcatgagccaggggaataagatgttgttgaccttccacacggacttctctaatgaagaaaacggaacgatcatgttttataagggatttctagcctattatcaagccgtggatctggatgagtgtgcttcacgcagtaaatccggcgaggaagaccctcagcctcagtgccagcatctctgtcacaactatgtcggcggttacttctgttcatgcagaccaggatatgaactgcaggaggatcgccattcctgtcaagcggaatgttctagtgagctgtacacggaagcatctggttacatctcctcattagaatatcctcgcagttacccacccgatcttagatgtaattatagcatcagagtcgaaagggggctgaccctgcacttaaaattcctcgaacccttcgacatcgatgatcatcagcaggtccactgtccctatgaccagctgcagatttacgcgaacggaaaaaatattggagagttttgtggtaaacagaggcctcctgatctcgacacgagctccaacgccgtggatctcctcttcttcacagacgaaagcggcgactcacggggctggaagcttagatatactactgagataattaagtgcccccaacccaaaacgctcgatgagtttaccattatccagaacttacagcctcagtaccagttcagggactactttatcgcaacgtgcaagcagggttatcagctcatcgagggcatacaagtggtggctggcgtggtggatgtgagcgctggacgcgtgagttggtcaacctcaagccagacgtgctgcacaagggtgtatacctgcacagctcagggcatctggaagaatgaacagaagggcgagaaaattccccgctgtctccctgtgtgcggtaagccagtgaatccggtggagcagaggcaacgcatcatcgggggtcagaaggccaagatgggaaatttcccatggcaggtatttacaaatatccacggacgcggtggaggagcactgttgggtgacaggtggattttgaccgcagcccatacactgtatcctaaagaacacgaggcccagtcaaacgcctcactagacgtattcttggggcacacaaacgttgaagaactgatgaagcttggtaatcacccaatccgacgggttagtgtacacccggattatcgccaagacgagtcctataattttgaaggcgacatagcactgctcgaacttgaaaattccgtgaccctagggccgaatctgctgcctatttgcctaccagacaatgacaccttttatgacctcggtttgatgggatatgtgtcaggtttcggagtcatggaagaaaagattgcacacgatctcaggtttgtgaggctgccagtagccaacccgcaggcctgtgagaactggctacgtggaaagaaccgcatggacgtgttcagccaaaacatgttctgcgccggccaccctagcctgaagcaagacgcatgtcagggggattccggcggagtatttgctgtgcgcgaccccaacacagataggtgggtggctaccgggattgtgagctgggggatcggctgtagtcgggggtacgggttctacacaaaggtcctcaactacgtagactggatcaagaaggaaatggaggaggaagactag

SEQ ID NO: 183566 - DNA, 1464 bp, synthetic construct
  misc_feature 1..1464: note = Description of Artificial Sequence: Synthetic coding sequence
  source 1..1464: mol_type = other DNA
atgcccggcccccgggtgtggggcaagtacctgtggcggagcccccattctaaggggtgcccaggcgcgatgtggtggctgctgctgtggggcgtcctacaggcgtgcccgacaaggggaagtgtgttgctggctcaggagttgccccagcagctcacatccccgggttacccggaaccctatggcaagggtcaggagagctcaacggacataaaagctccagagggatttgccgttagactcgttttccaggatttcgatctcgagccttcccaggattgcgctggtgatagcgtcactatctccttcgtggggagtgaccccagccagttctgcggacaacaagggagcccgttgggacgcccccctgggcagcgcgaattcgtctctagtggacggtcccttagactgacattcaggacacaaccaagctccgaaaacaaaacggcgcatttacacaaaggctttctggccctctatcaaacagtggctgtgaactacagccaaccaatttctgaagcttctcggggtagcgaggccattaatgccccaggcgacaatcccgccaaagtgcagaatcactgccaggagccatactaccaggctgccgctgctggagcactgacttgcgccacccccggcacctggaaggaccgtcaggatggggaagaggtgctgcagtgtatgcctgtgtgcggccgtcctgtgactcccatcgctcaaaaccagaccacgttaggctcgagtcgtgcgaaactgggaaattttccttggcaggcttttacgagcatacatggtaggggaggaggggcactgttgggcgatagatggatcctgaccgcagcccatacaatttatcccaaagactccgtgagcctaaggaagaatcagagcgtcaatgtctttcttggacacactgcgattgacgagatgctcaaattggggaatcaccccgtgcatcgcgtggtcgtgcaccctgactacagacaaaatgagagccataacttcagcggagacatagcactgctggagctgcagcattccattcccttggggcctaacgtgctcccagtgtgtctcccggataatgagactctgtatagatcagggttgcttggttacgttagtgggtttggaatggagatggggtggctgacaactgaactgaagtactctcggctgccagtagccccaagggaagcgtgcaatgcatggttacagaagcgccagaggcccgaggtgttttccgataacatgttttgcgtgggggatgagacacagcggcattcagtatgccagggcgattctggatcagtctacgtcgtgtgggataaccacgcacaccactgggtagcgacagggatcgtgagctgggggatcgggtgtggagaaggatacgacttctatacaaaagtgctgagttatgtcgactggattaagggtgtgatgaatggcaaaaactag

SEQ ID NO: 183567 - DNA, 1317 bp, synthetic construct
  misc_feature 1..1317: note = Description of Artificial Sequence: Synthetic coding sequence
  source 1..1317: mol_type = other DNA
atgcccggcccccgggtgtggggcaagtacctgtggcggagcccccacagcaaaggttgccccggtgctatgtggtggctgctgctctggggcgtcctccaagcatgccccacacgcggcagtgttctgctggctcaggagttgccacagcagcttacgagcccaggctatcctgaaccctacggcaagggtcaagaatcaagcactgacattaaggctcccgaagggttcgcagtcagactcgtgtttcaggatttcgacttggagcccagccaggattgtgccggtgatagtgttacgatctcttttgtagggagtgatcctagccagttttgcggccagcaaggcagcccattaggcaggccaccaggccagcgggagttcgtctcaagcggccgcagcctgcgcctgactttccggactcaacctagctctgaaaacaagaccgcgcatctgcacaaaggcttcctggccttgtatcagacagttgccgtgaactactcacagccaatctccgaggcgtcccggggctctgaagctattaacgctccaggcgacaaccccgcaaaggtccagaaccactgccaggagccctactaccaagctgccgcagccggggctctgacttgcgctactcctgggacatggaaggatagacaggacggggaagaggtgctccaatgcatgcctgtgtgtggacgccctgtcactccaattgcccagaatcagacgaccttgggcagtagtcgggctaagcttggtaatttcccttggcaagcattcacgagcatccacggtcggggaggcggcgcactcctgggcgaccgctggattctaaccgcagcccacacgatttatcctaaagacagcgtgagcctgagaaagaatcagtccgtaaatgtctttctagggcatacggctattgacgaaatgctgaaactgggaaaccacccagtgcatcgcgtggtggtccacccagactaccgccaaaatgagagccataatttctccggtgatatagccctgctggagctccaacacagcattcctctgggccccaacgtgttgcctgtgtgtctccctgataacgagaccctgtaccgcagtggtctactcgggtacgttagcgggttcgggatggagatggggtggctgacgacagaacttaaatattcgaggcttccagtggctccacgcgaagcctgcaatgcctggctccagaaacggcaaaggcccgaggtgttttccgacaacatgttctgcgtgggtgatgaggccggagagagtctggagcccggtaggaggcggcttcagtag

SEQ ID NO: 183568 - DNA, 2067 bp, synthetic construct
  misc_feature 1..2067: note = Description of Artificial Sequence: Synthetic coding sequence
  source 1..2067: mol_type = other DNA
atgtggtgcatcgtgctgttcagcctgctggcctgggtgtacgccgaacctacaatgtatggcgagatactcagtccgaactatcctcaggcttacccctctgaggtggagaagagctgggatatcgaggtgcccgaggggtatggcattcacctttattttacacacctggatatagagttaagtgagaactgcgcttacgatagcgtacaaatcatcagcggcgataccgaggagggtcgtttgtgtggacaaagaagttccaacaacccccactcccctatagtggaagagtttcaggttccttacaataagttacaggtgattttcaaaagtgacttctccaacgaggagcgcttcaccggcttcgcggcttattatgtcgccaccgacatcaatgagtgcacagattttgtagacgtaccttgtagtcatttttgtaataactttatcggcggctacttctgcagttgccctccagagtactttctgcatgacgatatgaagaattgtggggttaactgctctggggacgtctttaccgctctcattggggagatcgccagtccaaattatcccaagccgtatccagaaaattctcgctgcgagtaccagatacgcctggagaagggctttcaggtggtggtgacccttagaagggaggactttgacgtcgaggccgctgacagcgccggaaactgtcttgattcactcgtctttgtggctggagaccgacagtttggaccgtattgcggccacgggttcccaggtcccctgaacatagagaccaagtcaaacgctctcgacattatcttccagacggacctgaccggccaaaagaaaggatggaaactcaggtaccacggcgaccccatgccctgtcccaaggaggatactccaaacagcgtgtgggagcctgccaaagccaaatacgtgttcagggacgtcgtccagatcacatgtctggatggcttcgaagtcgttgaagggcgggtgggagccacatccttttatagcacctgccagtctaacggcaagtggtctaatagcaagctgaaatgccagcccgtcgactgtgggatccccgaatctatagagaacggcaaagtggaagaccctgagtcaactctctttggcagcgtgattcggtatacgtgcgaagaaccatattactacatggagaacggcggcgggggcgagtatcactgtgctggcaacggctcgtgggtgaatgaagtgctcgggcccgaactgcccaaatgcgtgccagtgtgcggagtaccaagggaaccgttcgaagaaaaacagagaattatcggggggtcggacgctgacatcaaaaacttcccctggcaggtgtttttcgataacccctgggctggcggagcattgatcaacgaatattgggtccttaccgccgcccatgtggtcgagggcaatagagaacctaccatgtatgttgggtccacctccgtccagacctcacgtctggcaaagtctaagatgctgacacccgaacacgtgtttatacaccctggctggaagctacttgaagtccccgaggggcgaaccaacttcgataacgacattgccttggtgcggttgaaggaccccgttaagatggggcccactgtgagtcccatctgcctccccgggacttccagtgactataacctgatggatggggatctgggcctgatttccggttggggccgcactgagaagagggacagggccgtccgcctgaaagctgcccgcctgccagtggcacctctacgcaagtgtaaggaggtgaaggtcgaaaagcctacggctgatgccgaggcgtacgtgtttactccaaacatgatctgcgcaggaggagaaaaaggcatggacagctgcaagggagacagcggtggcgcctttgccgtccaggatcctaacgacaagacgaagttctacgcggctggcctggtatcttggggtccacaatgcgggacatatggcctgtatacaagagtgaaaaattatgtggattggatcatgaaaacgatgcaggagaactccacccctagagaagattag

SEQ ID NO: 183569 - DNA, 2067 bp, synthetic construct
  misc_feature 1..2067: note = Description of Artificial Sequence: Synthetic coding sequence
  source 1..2067: mol_type = other DNA
atgtggtgcatcgtgctgttcagcctgctggcctgggtgtacgccgaacccaccatgtacggtgaaatactgtctcccaactatccccaagcttatccctcagaagtggaaaagagctgggacatcgaagtgcctgaaggatacgggatccacctatacttcacacatctcgacattgaactgagcgagaattgtgcgtatgacagcgtccagatcatctccggcgatacagaagagggccggttgtgcgggcagagatcatccaacaatccccatagtccaatcgtcgaagagttccaggttccctacaacaagctgcaagtgatcttcaaatcggatttctccaacgaagagcgatttacagggtttgcagcatactatgtggccacggatatcaacgagtgcacagactttgtcgacgtcccatgctcccacttctgcaacaacttcatcgggggatatttttgttcatgccctcctgagtacttcctccacgatgatatgaagaattgcggcgtgaactgtagtggagatgtctttaccgccctcattggggagattgccagccccaactatccgaagccataccctgagaactccagatgtgagtaccagatccgactagaaaagggcttccaggttgtcgtgactctgaggagagaagattttgatgtggaggctgctgactcggctgggaactgccttgactctcttgtgtttgtggcgggagatcgccagtttgggccctactgtggtcacggcttccctggaccattgaatatagaaactaagtctaacgcccttgatatcattttccaaaccgatctgactggccagaagaaaggatggaagttacggtatcacggggaccctatgccttgtccaaaggaagacacccctaacagcgtgtgggaacccgcgaaggctaaatatgtctttagggacgttgtccaaattacctgtctggacggatttgaggtggtggaaggccgcgtaggagcaacctccttttactctacgtgtcagtccaacggaaagtggtcgaactcaaaactcaaatgtcagcctgttgactgcgggatacccgaatctattgagaacggaaaggtggaagacccagagtccacgctcttcgggtctgtcatcaggtacacctgtgaagagccctactattatatggaaaatggtgggggaggggaatatcattgcgctggaaatggatcatgggtaaatgaagtgctgggacccgagctccctaagtgcgtgccagtgtgcggcgtaccccgtgagccattcgaggagaaacagcgcatcattggggggtctgacgccgacatcaagaactttccgtggcaggtcttctttgacaatccatgggctggaggcgctctgattaacgagtattgggtcctcaccgccgcccacgtggtggagggaaatcgagagccaaccatgtacgtgggatccacaagcgtacagactagccggttggctaagtccaagatgctgacccctgaacacgtgttcatccacccgggctggaaattgctggaagtgcctgaaggaaggaccaatttcgacaatgatatagcactagtgaggctcaaggaccccgtgaagatgggacctaccgtttcccccatctgcctgccgggaacaagctctgattataatttgatggacggggatctgggcttaattagcggttggggcaggacggagaaacgagacagggcagtgcgactgaaggcagctcgactccccgttgctcctctaagaaagtgcaaagaggtaaaggtggaaaagcccacagctgacgcagaagcatacgtattcactcctaatatgatatgcgccggcggggagaaaggcatggatagctgtaagggagattccggcggcgccttcgcggtacaggatcctaacgacaagaccaaattctatgcagcaggcctagtgtcctggggcccacagtgcggaacttacggcctgtatacccgggtgaaaaattatgtggactggatcatgaaaacaatgcaagaaaattctacacctcgcgaggactag

SEQ ID NO: 183570 - DNA, 2049 bp, synthetic construct
  misc_feature 1..2049: note = Description of Artificial Sequence: Synthetic coding sequence
  source 1..2049: mol_type = other DNA
atgtacggcgagatcctgagccccaactacccccaggcctacccctctgaggtcgaaaagagctgggatattgaggtccctgaagggtacggtattcacctgtattttactcacctggacattgagctgagtgagaattgcgcatacgattcggtgcagatcatctctggcgatacagaagaggggaggttgtgtggccagaggagctcgaacaatccccactcgccaatcgttgaagaatttcaggttccttataataaattgcaagtaattttcaaatcagatttcagtaatgaagagcggtttaccgggtttgcagcttactatgttgctactgataaagacgagtgctccgggcgcgcacagctgtggaaccacatgagtgacgtaccatgcagccatttttgtaacaacttcattggcggctatttctgctcttgcccgccagagtactttctgcacgatgatatgaaaaactgtggagtgaattgttccggagatgttttcacggcacttattggggagattgcatccccaaattaccctaagccctatccagagaattcccgatgtgagtatcagatcaggttagagaaggggttccaggtccacctctccctgctgctgaagcttgagtgttctggggcaatcactgctcactgttctctggaccttctgggttcaattgcaggcgacaggcaattcgggccatattgtggacatggctttcctggacctctcaacatagagacaaagagtaacgctctcgatatcattttccagacggacttgaccgggcaaaaaaaggggtggaaattgcggtaccacggtgatccaatgccatgccctaaagaggacacgcccaactccgtttgggagccagctaaagctaaatatgtcttccgggacgtcgtccagattacgtgtctcgacgggttcgaggtcgttgaagggcgcgtgggtgccacaagcttttactccacttgccagtccaacggcaagtggtcaaattccaaactgaagtgtcagcctgtggattgtgggatccccgagtctatcgagaatggaaaggtggaagacccggagtccaccttatttggttctgtgatcaggtacacctgtgaagaaccctattactacatggaaaacggaggcgggggcgaagagcgcgaacgaggagagtaccattgtgccgggaatgggagctgggttaacgaggtgcttggccccgagttgcctaagtgcgtgcctgtgtgtggcgtgcccagagaacccttcgaggaaaagcagcgaatcatcggtggaagcgacgcggatattaaaaatttcccatggcaggtgtttttcgataacccatgggccgggggagctctgattaacgagtattgggtcctcaccgccgctcacgtggtcgagggcaatcgggagcccaccatgtacgtcggttcaacttcagttcagacatctcggctggccaaaagcaagatgcttacgcccgagcatgtgttcatccatcctggctggaagcttctagaagtcccagaaggtcgtaccaactttgataacgacatcgctcttgtgcgcctcaaggaccccgtgaagatggggcctactgtgagtcctatctgcctgccaggcacatcctcggactataacctgatggacggcgaccttgggctaatctctgggtggggcaggactgagaagagagacagagcagtacgcttgaaagcagccagactgcccgtggcccccctccggaagtgcaaggaggtgaaggttgagaaaccgaccgccgatgccgaggcttacgtgtttacaccaaatatgatatgtgcaggcggtgagaagggtatggacagctgcaaaggcgatagtggtggcgccttcgccgtccaagaccccaatgataagaccaaattttacgccgcgggcctggtttcatggggaccgcagtgtggtacatacggtctatacaccagggtcaagaactacgtcgattggatcatgaaaactatgcaagagaattccacaccccgagaagattag

SEQ ID NO: 183571 - DNA, 507 bp, synthetic construct
  misc_feature 1..507: note = Description of Artificial Sequence: Synthetic coding sequence
  source 1..507: mol_type = other DNA
atgtggtgcatcgtgctgttcagcctgctggcctgggtgtacgccgagcccactatgtatggtgagatcctgagtcctaattatccccaggcttacccatccgaggtggaaaagtcatgggatatagaagtgcccgaaggctacgggatccatctgtatttcactcacctggacatcgagctgtctgaaaactgcgcatatgactccgtccaaatcattagcggcgacacagaggaaggtcgtctgtgcggccagcgatccagcaataatcctcattctccaatcgtagaagaatttcaggttccctacaataagctacaggttatctttaagtccgacttcagtaacgaggagcggtttactgggttcgctgcttactatgtggcaacggatatcaacgaatgtacagacttcgtcgacgtgccttgctcacacttttgcaacaatttcattggaggctacttctgctcttgtccacctgagtactttttgcatgatgatatgtag

SEQ ID NO: 183572 - DNA, 2067 bp, synthetic construct
  misc_feature 1..2067: note = Description of Artificial Sequence: Synthetic coding sequence
  source 1..2067: mol_type = other DNA
atgtggtgcatcgtgctgttcagcctgctggcctgggtgtacgccgagccaaccatgtacggtgagatcctctcgcccaactaccctcaagcctatccgtctgaggtggaaaaaagctgggatatcgaggtgccggagggctacggaattcacctgtacttcacccatttggacatcgagctgtcagagaattgcgcctatgactccgtgcagattatcagcggagatacagaagaagggaggctgtgtggccagcgcagctctaataatccccactctccgatcgtggaagaattccaggtcccctataataaactgcaggtcatatttaaaagcgatttttctaatgaagaacggttcactggattcgccgcctattatgtggccactgacattaacgagtgtaccgacttcgtggatgtcccctgcagccacttttgtaataactttatcggcggatatttttgttcctgtccccccgagtatttcttgcatgacgatatgaagaattgcggcgtaaactgttcaggtgacgtgtttacagcacttattggggaaattgccagcccaaactatcccaagccctatcctgaaaattcccggtgcgagtatcagattaggctcgagaagggcttccaagtcgtcgtgacacttaggcgggaagacttcgacgtggaggccgccgactccgctggtaattgtctcgactccctggtgtttgtggccggggatagacagttcggcccctactgtggtcatggattcccaggacccctgaatattgagactaaaagcaatgctctggacataatcttccagaccgacctcactggccaaaagaagggctggaagctgcgatatcacggtgatcccatgccctgtcctaaggaggataccccaaattccgtgtgggagcctgcgaaggccaagtacgtctttagggacgttgtccagattacctgcctcgacggattcgaagtagtggaaggccgagttggggcaacaagcttctattctacgtgtcaatcaaacggaaagtggtcaaattccaagctgaaatgccagccagtagattgcggtatcccagagtctatcgagaacggcaaggtcgaggatcccgagagcacattgtttggttctgttattcgctacacgtgcgaggagccctactattatatggagaacggcggcggtggcgaataccattgcgccggcaacgggtcttgggtgaatgaagtccttgggcctgaattacccaagtgcgtgcctgtttgtggagtgccaagagagcccttcgaagaaaagcagagaattataggcggttctgacgccgatatcaaaaactttccatggcaggtcttcttcgacaacccctgggccggcggcgctctgatcaatgagtattgggtcctgacggcagctcatgtggtcgagggaaatagggagccaacaatgtacgtagggagcacaagtgtgcagacttcccgtttagctaaatctaagatgctgacacccgagcacgtttttattcacccggggtggaaactgctggaggtgcccgagggccgcactaattttgacaacgacatcgctttagtcagattaaaagatccagtgaaaatgggccctacagtaagtcccatttgtcttccagggacaagctccgattataatctcatggacggcgaccttggcctgatttcggggtggggcaggacagagaaacgagacagggctgttaggctgaaagcagccagactgcctgtcgctccacttagaaaatgcaaggaggtaaaggtggaaaagccgacagccgatgctgaagcctacgtgttcacaccaaacatgatttgcgcaggcggagagaagggtatggactcgtgtaaaggggactccggtggcgcctttgcagtgcaagaccctaatgataagactaagttttacgcagcagggctcgtaagctggggcccccaatgcggaacatacggactgtacacgcgtgtgaagaactacgtcgattggataatgaaaaccatgcaggagaacagtactccccgtgaggactag

SEQ ID NO: 183573 - DNA, 312 bp, synthetic construct
  misc_feature 1..312: note = Description of Artificial Sequence: Synthetic coding sequence
  source 1..312: mol_type = other DNA
atgtggtgcatcgtgctgttcagcctgctggcctgggtgtacgccgaaccaactatgtacggggaaatactttcacccaactacccacaggcatacccttcagaggtagagaagtcctgggatatcgaggtgccagaaggatatgggatccatctatatttcacgcatttggatatagagctctcagagaactgcgcgtatgattcagtgcagatcatcagcggagatactgaagaagggagactatgtggtcagagaagtagcaacaacccccacagcccaatagtcgaagaatttcaggtgccctattag

SEQ ID NO: 183574 - DNA, 306 bp, synthetic construct
  misc_feature 1..306: note = Description of Artificial Sequence: Synthetic coding sequence
  source 1..306: mol_type = other DNA
atgtggtgcatcgtgctgttcagcctgctggcctgggtgtacgccgaaccaacaatgtatggtgaaattcttagcccaaattatccacaggcgtaccccagcgaggtagagaagagctgggacatcgaggtgcctgaaggttatgggattcacctatatttcactcacctggatatcgagcttagcgaaaattgcgcctatgacagcgtgcaaataatcagtggcgataccgaggagggcaggttatgcggacaacggtcctcgaacaaccctcacagcccaatagtggaggaatttcaggtgtag

SEQ ID NO: 183575 - DNA, 2259 bp, synthetic construct
  misc_feature 1..2259: note = Description of Artificial Sequence: Synthetic coding sequence
  source 1..2259: mol_type = other DNA
atgggccccctgatggtgctgttctgcctgctgttcctgtaccccggactggccgacagtgcccctagctgtccacagaacgtgaacattagcggcggaactttcactctgtctcacggctgggccccaggatccttactgacatactcctgcccacagggcctgtatccctcccctgcatccaggctctgcaagtcatctggccaatggcaaacaccaggcgccacacggagccttagcaaggccgtgtgcaaaccagtcagatgccccgctcccgtttcttttgagaacggaatttacaccccccgcctgggatcttacccggtgggcggtaacgtgtccttcgagtgcgaagacggctttattctcaggggcagtcctgtgcgacagtgtcgcccaaatggaatgtgggatggagagacagctgtatgcgacaacggcgctggacattgtcccaatcctggtatctccctaggtgcagtgaggactggattcaggtttggtcatggtgacaaggtacgataccggtgctcatctaatctggtgctgacagggtcctccgaacgagagtgtcagggcaatggcgtgtggtcgggcaccgagcccatatgccgccagccttactcctatgactttcccgaagacgtggctcctgctctcggtacctcgttttctcacatgctcggtgccacaaaccctactcaaaagactaaagagtcccttggccgcaaaatacagatacaacggagtggacacctgaacctgtacctcctcctggattgctctcagagtgtatctgagaacgatttcttgatttttaaagaaagcgcgtccttaatggtggacagaatcttcagcttcgagatcaacgtcagcgtcgcaatcattacctttgccagcgagcccaaagtgctcatgagtgtgctcaatgacaattcacgggacatgactgaggttatttcttcgctcgagaacgctaactacaaagatcatgagaatgggactggtactaacacatacgccgcactgaactctgtttacctgatgatgaataatcagatgcggcttctaggcatggagaccatggcctggcaggagatacggcatgccattatcttgctgactgacggaaaaagcaatatgggcggatctcccaagactgcggtagaccacattcgagaaattttaaatatcaatcaaaaacgtaatgactatttggatatctacgctatcggcgttggaaagttggacgtggactggcgcgagctcaatgaactgggcagcaagaaagacggggagaggcacgctttcatcctccaggacaccaaagcgctgcaccaagttttcgagcacatgctcgacgtcagcaagttgacggatacgatctgtggtgtgggaaatatgtccgccaatgctagcgaccaagaaagaaccccctggcacgtgactatcaaacctaaaagccaagagacctgtcggggggctcttattagcgaccagtgggtcttgacggccgctcactgcttcagagacggtaacgatcattccttgtggagagtcaacgtgggtgaccccaagtcccaatgggggaaggaatttcttattgagaaggctgttatctctccgggatttgacgtattcgcgaagaagaatcagggcatccttgagttctacggtgatgatatagccctcttaaagctggctcagaaggttaagatgagcacacatgctcgtcctatttgtctcccctgcacaatggaggccaacctagccctgcgaagaccacagggatccacctgccgcgaccatgagaacgaactgctgaataagcagagcgtacctgcacactttgttgcactcaatggctccaagttaaacattaacctcaagatgggggtggaatggaccagctgcgctgaggtggtgtcccaagaaaagactatgtttcccaatcttacagacgtgcgggaggtagtgactgaccaattcctgtgcagcggtacccaggaggatgaatcaccttgtaagggggagtccggcggcgctgtgttcttggaacgaaggtttcgcttctttcaagttgggttggtgtcctggggcctgtacaacccatgcctaggtagtgctgacaaaaattctcgcaagcgggcacccagaagtaaagtaccgccgcctcgggattttcatatcaacctgtttcgcatgcagccatggctgcggcaacaccttggcgacgtcctcaattttctccctctctag

SEQ ID NO: 183576 - DNA, 1134 bp, synthetic construct
  misc_feature 1..1134: note = Description of Artificial Sequence: Synthetic coding sequence
  source 1..1134: mol_type = other DNA
atgaccgaggtgatcagcagcctggagaacgccaactacaaggaccatgaaaatggaaccggaaccaatacttacgcagccttgaattctgtatacctgatgatgaacaatcagatgaggctccttggcatggagactatggcttggcaggaaattcgccatgccattattctgctgactgatgggaaatctaacatggggggatcgccgaagacggccgttgatcacatccgtgaaattctgaacattaaccagaagcgcaacgattacctggacatctatgctatcggagtcggcaaattggacgtggactggcgcgagttgaatgagttgggatccaagaaagatggggagaggcacgcatttatccttcaggatactaaggccttgcaccaggtgtttgagcatatgttggacgtgtctaagctgacagacacaatctgcggcgtgggtaacatgagtgcgaatgccagtgaccaagagaggaccccgtggcacgtgaccattaagcccaagtcccaggagacttgccgcggagcactgatctctgaccaatgggtgctcaccgcggcccactgttttcgtgacggcaacgaccattccctctggagagtcaacgtgggcgaccccaagagccaatggggcaaagaattcttaatagagaaagcagtgatctcccccggcttcgacgtattcgcaaagaaaaaccaaggtatcttggagttttatggagatgacatcgccctacttaagttggctcaaaaggtcaaaatgtccacccatgcgcgtcccatctgcttaccatgtactatggaggccaatctcgctctgagacggcctcagggctcaacctgtcgggaccatgagaacgagttgcttaataagcagtctgtacctgcgcattttgtggccctgaatgggtctaagttgaacataaacctaaagatgggagtagagtggacctcttgcgcggaggtggtgtcccaggaaaagactatgtttcctaaccttactgacgtaagagaggtggtaactgaccaatttttatgcagcgggacgcaagaggatgagtccccttgtaagggaggatccggcgagttgggctcactgcagcctctgccttggttatgctag

SEQ ID NO: 183577 - DNA, 2259 bp, synthetic construct
  misc_feature 1..2259: note = Description of Artificial Sequence: Synthetic coding sequence
  source 1..2259: mol_type = other DNA
atgggccccctgatggtgctgttctgcctgctgttcctgtaccccggtctggcagattccgccccctcttgtccccagaatgtcaatataagcggagggactttcactttgagccacggctgggctccaggtagtttgctcacctactcctgtcctcaagggttatatccctctcccgcgtctagactgtgcaaatcgtcagggcagtggcagactcctggcgcgacgagaagtctctccaaagcagtgtgtaaacccgtccgatgtccagcccccgtgagcttcgaaaatggcatctatacccccaggttggggtcttacccggtggggggaaatgtgtcatttgagtgcgaggacggcttcattttgagaggttcccccgtgaggcagtgcagaccaaatggaatgtgggacggtgagaccgcagtgtgtgacaacggggccgggcattgccctaatcccggcatctcattaggcgccgtccgcaccggttttaggttcggacacggcgataaggtgcgctaccgctgtagttccaatttagtgctcaccggctcctcagagagagagtgccaaggtaacggcgtttggagtgggaccgaacccatctgtagacagccctatagctacgacttcccggaggatgtggccccagctctggggaccagcttcagccacatgctgggagccactaatcctacccagaagactaaagagtcactcggcaggaagatacagatacagcgatctggacatcttaacctttatttgctgctggattgcagtcaatcggttagcgagaatgattttctgatctttaaagaatccgcaagcctcatggtcgatcgcattttttcttttgagatcaacgtctctgtcgccatcatcacgttcgcatcagagcccaaggttctgatgagcgtattaaacgacaactctagggacatgacggaagtgatttcaagccttgaaaatgccaattataaagatcatgaaaatggaacaggaactaatacctatgccgcactcaattccgtctacctgatgatgaacaaccagatgcgcctgctgggtatggagacaatggcatggcaggaaattaggcatgccatcatactgctgaccgatggcaagagcaatatgggggggagccccaagaccgccgttgatcacattcgggagatacttaatattaaccaaaagagaaacgattatctcgatatctacgctattggcgtgggaaaactggatgtcgactggagggagctgaacgagttaggtagcaagaaggacggcgaaaggcatgcttttatcctccaagacacgaaggcattgcatcaggtttttgaacacatgcttgatgtgagcaaactgaccgacactatctgcggcgtcggaaacatgagtgcaaatgcttcggatcaggaacggaccccctggcacgtcaccatcaaacctaaaagtcaagaaacctgcaggggcgctctgatttctgaccagtgggtcttgactgcagcacactgtttcagagacggaaatgatcattctctgtggagggtgaatgtaggagaccccaagtcacagtggggaaaggagtttctgatcgagaaggcagtgatcagtccaggatttgacgtgtttgccaagaaaaatcaaggcatattggagttctacggggacgacatcgctctcctcaaactggcacaaaaagtgaagatgtccactcacgctcgacccatctgcctcccctgtaccatggaggccaatttggcgttacggcgcccccaagggagcacgtgcagagatcacgagaatgaacttcttaacaaacagtcagtcccagcacactttgtagctctgaatggcagtaagctcaacatcaacttgaaaatgggagttgaatggacctcttgtgcagaagtggtgagtcaagaaaagacaatgttccccaatctaacggatgttagggaggtggtgaccgaccaattcctgtgctctgggacgcaggaagatgaatccccatgtaagggggagagtggcggggcggtcttcctggaaagacggttccgcttttttcaggttggtttagtatcctggggtctttacaatccatgtttagggtccgccgataaaaatagcaggaagcgggcgccgagaagcaaggtacctccgcctagagatttccacatcaatttgtttaggatgcaaccatggctgcgtcagcacctgggcgatgtgctgaatttccttccactatag

SEQ ID NO: 183578 - DNA, 1578 bp, synthetic construct
  misc_feature 1..1578: note = Description of Artificial Sequence: Synthetic coding sequence
  source 1..1578: mol_type = other DNA
atggtgctgttctgcctgctgttcctgtaccccgccggccactgcccaaaccccggcataagtctaggcgccgtgcggaccggtttcaggtttggtcatggggacaaggttcggtaccgctgctccagtaatctggtgttgactggctcgagcgaaagggagtgtcaaggaaacggtgtgtggtctggaaccgaacctatttgtaggcaaccttactcctatgacttccctgaggacgtggcccctgcactgggtaccagcttctctcatatgctgggtgctacaaacccaacacagaagaccaaggatcacgagaatgggactggcaccaacacttacgcagcacttaattccgtctatctgatgatgaacaaccaaatgcggttactggggatggaaacaatggcttggcaggagataagacatgccattattctgctcaccgacggaaaatccaacatgggcggttcccccaaaacggcagtggaccacattcgcgagatcttgaacatcaaccagaagcgcaacgactatctagacatttacgcaattggcgtggggaagttggacgtggattggcgggaattgaatgagttgggcagcaaaaaggacggcgagagacatgccttcattctacaggacaccaaagcacttcaccaggtgtttgagcacatgctcgatgtatccaagcttaccgatactatttgcggggtcggaaatatgagcgctaatgcttcagaccaggaacggacaccatggcatgtcaccattaagcccaaaagccaggagacctgtaggggcgctctgattagcgatcagtgggttctgacagccgcacattgcttccgggacggcaatgatcactccctttggagagtaaacgttggggacccgaagtcccagtggggaaaggagtttcttattgaaaaagctgtgatcagcccaggattcgacgtgtttgcaaagaagaaccaaggcatcctcgagttttacggcgacgatatagccctcctcaagctggctcagaaagtaaagatgtcaacccacgctcgccccatctgccttccttgcacaatggaggccaatctggcactgaggagaccccagggcagcacttgtagagaccacgagaatgagctgctgaacaagcagagtgttcccgcacactttgtcgccctgaacggaagcaagcttaatatcaacttaaaaatgggcgtggagtggacatcgtgcgctgaagtggtgtcccaggaaaaaaccatgtttcccaatctgacggatgtcagagaggtggtcaccgatcagtttctgtgttccggtacccaagaagatgagtctccttgcaagggtgagagtggcggggccgtgtttctggaacgccgatttcgttttttccaggttggactggtgtcctggggactttacaacccatgcttggggagcgctgacaagaattccagaaaaagggcaccccgctccaaagtgccccccccaagagacttccacattaacctgtttagaatgcagccatggctgagacagcatctgggcgacgtgctcaacttcctccctctatag

SEQ ID NO: 183579 - DNA, 2259 bp, synthetic construct
  misc_feature 1..2259: note = Description of Artificial Sequence: Synthetic coding sequence
  source 1..2259: mol_type = other DNA
atgggccccctgatggtgctgttctgcctgctgttcctgtaccccggcctggcagatagtgccccgtcatgcccacaaaacgtgaacataagtggaggcaccttcactctctctcatgggtgggctcccggaagcctgctcacttactcttgtcctcagggactttaccctagcccggcctcccgtctgtgcaagtcctcgggtcagtggcagacccccggcgctacccggagcctgagtaaagccgtatgcaagcctgtccgctgccctgcacctgtgagttttgagaacggaatctacacgccacgtcttggcagctacccagtaggcggaaatgtatcttttgagtgcgaagacggctttatcttacgtggttcacctgtcaggcaatgtcgccctaacggcatgtgggacggcgaaaccgcggtgtgtgacaatggggctggccattgccctaacccagggattagcctcggcgcggtgcgcaccggttttcgcttcggccatggagataaagtgcgctacagatgctctagtaacctcgtactcaccggaagctcagagagagaatgccaaggaaacggtgtttggtctgggactgaacccatctgccggcagccatattcttacgacttcccagaggacgtggccccggcattgggaacatcctttagccacatgctcggcgcgacgaatccaactcaaaaaaccaaggaaagtctcgggcgcaaaatccagatacagcgatcaggtcatcttaacctctatctgctcctggattgctcacagtccgtgtctgaaaacgactttctaatcttcaaagagagcgctagcctaatggtggacagaattttttcgtttgaaattaatgtctctgtggctattatcacatttgcatcggagccaaaggtcttaatgtcagtgcttaatgacaatagccgggatatgacagaagtgatctcatccttagagaatgcaaattataaagaccacgaaaacggtactggtacgaatacgtatgccgctctcaatagtgtatatctgatgatgaacaatcaaatgagactgcttggcatggaaactatggcctggcaggagattagacacgctatcattctcttgaccgatggcaagtcgaatatgggaggttcaccaaaaaccgctgtggatcacatcagagaaattctgaacatcaatcagaagagaaacgactacctggacatctatgctataggtgtgggtaaattggatgtagactggagggagctaaatgagcttggttctaaaaaagatggagaacgacatgctttcattttacaggatactaaagctctccatcaggtttttgagcacatgctagatgtttccaagctgaccgacaccatctgcggcgtggggaatatgagtgctaatgccagtgatcaggagcggactccctggcatgtgacaattaagcccaagtcccaggaaacatgtcgcggcgcactaatttccgaccagtgggtgctgactgccgcccactgctttagggacggaaatgaccacagtttgtggcgtgtgaatgtcggggatcccaagtcccagtgggggaaggagttcctgatagaaaaggctgtgatcagtccaggattcgacgtttttgctaagaagaaccaagggatcctagaattctacggcgacgacattgccctcctgaaattggctcaaaaagtcaagatgtctacacacgccagaccaatatgcctgccgtgcactatggaagcgaacttagccctgcgtaggccccagggttctacatgccgggatcatgagaacgagctgcttaacaagcaaagcgtgccggcacactttgtggctctgaatggatccaagctcaacatcaacctgaaaatgggggtggaatggacctcctgcgcagaggttgtcagccaggagaaaaccatgtttcctaatctcactgacgtgagggaagtggtgaccgaccagtttctgtgttctggcacccaagaagatgagtccccctgtaaaggcgaaagcgggggtgctgtgttccttgaacgccggttcagatttttccaggtgggtcttgtgagctggggtttgtataatccgtgcctggggtcagcggacaaaaactcgaggaagcgggctcctaggtcaaaggtccccccccctcgcgattttcatatcaacctttttagaatgcaaccctggctgcgacaacaccttggggatgtgctgaacttcttgcccctttag

SEQ ID NO: 183580 - DNA, 1578 bp, synthetic construct
  misc_feature 1..1578: note = Description of Artificial Sequence: Synthetic coding sequence
  source 1..1578: mol_type = other DNA
atggtgctgttctgcctgctgttcctgtaccccgccggccactgccctaacccggggatctctctaggcgcagtgaggactggctttcggttcggacacggcgacaaggtgcgttatagatgcagttcaaatctggtactgactggctcctccgagcgagagtgccagggcaacggagtctggtcggggactgagccaatttgcaggcagccatattcatacgacttcccggaggatgtagctccagccctgggcacctcattctcccatatgctgggcgccacaaacccaacccagaaaaccaaggaccacgaaaacggcaccgggacaaatacttatgctgcactcaattcggtgtacctcatgatgaacaatcaaatgagactgttagggatggagactatggcctggcaggaaatccggcatgcaattattctgttgacagacggaaagagcaacatggggggatcccccaaaacagcggtggaccacatcagagaaatactgaacatcaatcagaagagaaacgactatctggatatttacgccatcggcgtgggaaagctagacgtcgactggagagaactgaacgaattagggtcaaagaaggatggagagagacacgctttcatactgcaggacactaaggctcttcaccaggtgtttgagcatatgctggatgtgtccaagcttacagatactatttgtggggtcggtaatatgagcgccaacgcatcagaccaggaaagaaccccctggcacgtaaccatcaaaccaaaaagtcaggaaacatgtcggggagcactgatctccgatcagtgggttctgactgccgcccactgcttcagggacggcaacgaccattctctatggagggtcaacgttggagatcccaaaagccagtggggtaaggagttcttgattgagaaggccgtgatctcgcctgggtttgatgtctttgccaagaagaatcagggaatcctcgagttctacggcgatgatattgccctcctcaaactggctcagaaggttaagatgtccacgcacgccagacctatttgtctcccctgcaccatggaggcaaacctagcattacgcaggcctcagggcagtacgtgcagagaccatgagaacgaattgttgaataagcagtccgtgcctgctcatttcgtagcgcttaacggcagcaaactcaacattaatcttaagatgggggtagagtggacctcttgcgcagaggtggtgagtcaggaaaaaacaatgtttcctaatttgactgatgtgcgggaggttgtaacagaccagtttctgtgctcgggcacacaggaagacgagagcccttgcaaaggggagtcaggtggggccgtgtttctggagcgaaggttccggttcttccaggttggcctcgtcagctggggtttatacaatccgtgtctgggcagtgctgacaaaaactctcgaaaacgagccccccgctccaaggtgcctccaccaagagatttccacatcaacttattcagaatgcagccctggctgagacagcacctgggagatgtgttgaacttcctgcctttgtag

SEQ ID NO: 183581 - DNA, 2259 bp, synthetic construct
  misc_feature 1..2259: note = Description of Artificial Sequence: Synthetic coding sequence
  source 1..2259: mol_type = other DNA
atgggccccctgatggtgctgttctgcctgctgttcctgtaccccgggcttgcagacagtgccccatcttgtcctcagaatgtaaacatatccgggggcacctttacactgtcccacggctgggcgccgggaagcctccttacatattcatgtcctcagggtctgtatccatcccccgccagtaggctgtgcaaatcttcggggcagtggcagacacccggggccacccggagtctcagcaaggctgtctgcaaacctgtgcggtgcccagcaccagtcagctttgagaatggcatttatactccccggttggggagctatccggttggcggcaacgtttcctttgagtgcgaggatggattcatcctgagaggctccccagtgcgccagtgtcgccctaacggcatgtgggatggcgagacggccgtgtgtgacaatggagccggccactgtcccaatcccggtatatctttgggcgccgtccgaactgggtttagattcggacatggagataaagtgaggtatagatgcagcagtaatttggtcctgacaggatcgtcagagagggaatgccagggcaatggtgtgtggtccgggaccgaacctatttgccgccagccctacagctatgatttccccgaggatgtggcacccgccttgggaacctccttctctcatatgctgggtgctaccaaccccacgcagaaaaccaaggagagtctcggacgtaagatccaaatacagcgctctggccatcttaatttgtatctgctacttgactgtagccaatctgtctctgaaaacgatttcctgatcttcaaagaaagcgcatccctaatggtagaccgaatattttccttcgagattaacgtctctgtagcaatcattacctttgcctctgaacccaaagttctcatgtcagtcttgaacgataacagcagagatatgactgaggtgatatcttcactggagaatgcgaactacaaggatcacgagaatggtacagggaccaatacgtacgcagctctgaattctgtctaccttatgatgaataaccagatgcgcctgctcggcatggaaaccatggcctggcaggagatcaggcatgcaataatccttctgacagatggtaagagcaatatgggtggttcccccaagaccgctgtggaccatataagagagattctcaacatcaaccagaagaggaacgactacctggatatatatgccattggcgtaggcaaattggacgtggactggcgagaacttaatgagttgggaagcaagaaggacggcgagagacatgcatttatcctccaggacaccaaagcgttacaccaggtcttcgaacacatgctggatgtgtctaagctgaccgatacaatctgcggcgttggcaatatgagtgcaaatgccagcgatcaggagcggacaccgtggcatgtgacgatcaagcccaaaagccaggagacctgtcggggcgcactcattagtgaccagtgggtgttgacagctgctcactgctttagagatggaaacgaccatagcctgtggcgggtaaacgttggagaccctaagtctcagtggggtaaagagttccttattgagaaagcggtgatctcccccggatttgatgtgttcgccaagaagaaccagggtattctcgagttttatggggacgacattgcattactcaaattagcacagaaagttaagatgtcaacacacgcccgccccatttgtttgccttgtaccatggaggctaacttggctctgcgcagaccccaagggagcacatgccgcgatcatgagaacgagctgttaaataagcagtctgtgccagcacatttcgttgctttaaatggttcgaaactcaatattaatctgaagatgggcgttgaatggacgtcttgcgccgaggtcgtctcacaggagaaaaccatgtttcccaatctaaccgatgtgagggaagtcgtcacagatcaattcctttgtagcggtacccaggaagacgagtcaccttgtaagggagagtctggcggggcagtttttctggagcggaggtttcggtttttccaggttggcctggtgagttggggcttgtataacccttgccttgggagtgcagataaaaactcaagaaagagagctcctcgatccaaagtcccccctcctagagattttcacattaacctgtttagaatgcaaccctggttacgacaacaccttggtgacgttctgaattttttacccctctag

SEQ ID NO: 183582 - DNA, 420 bp, synthetic construct
  misc_feature 1..420: note = Description of Artificial Sequence: Synthetic coding sequence
  source 1..420: mol_type = other DNA
atgggccccctgatggtgctgttctgcctgctgttcctgtaccccggactggcagactcagcccccagttgtccccagaacgttaatatcagcggaggcactttcacactgagccacggatgggctccagggtccctgttgacctattcatgtccccagggactttacccgagccctgctagccggctctgcaaaagctcaggccagtggcaaactcccggcgctacacggtctctttctaaagccgtctgcaaacccgtacgttgtcccgcccccgtctccttcgaaaacgggatttacactccccggctggggtcctatcctgtgggcggcaacgtgtcctttgagtgcgaggacggcttcattttgaggggttcacccgtcagacagtgtcggcccaacggcatgtgggacggctag

SEQ ID NO: 183583 - DNA, 510 bp, synthetic construct
  misc_feature 1..510: note = Description of Artificial Sequence: Synthetic coding sequence
  source 1..510: mol_type = other DNA
atgcgggccctgtgcatccgggagacctgcagcagcgagctgggcttcagtcgtaattggtcccggagaaaggccggccactgtcccaatcccggcatttcactaggggccgtgaggaccggctttcgctttggccatggggacaaagtgcgatatcgctgctcaagcaaccttgtgctcacaggaagcagcgagcgtgagtgccaggggaacggcgtttggtctggaaccgaacctatctgccggcagccttactcctatgactttccagaggatgtcgctcccgccctagggacatcattcagccacatgctgggcgcaaccaaccctacccagaaaacaaaagatcacgagaatggcacgggtactaacacatatgcggcactgaatagtgtctatctgatgatgaataaccagatgcgcttgttaggcatggaaacaatggcttggcaggagattagacacgccataatcttacttacagacggcaagagcaatatgggtggctag

SEQ ID NO: 183584 - DNA, 420 bp, synthetic construct
  misc_feature 1..420: note = Description of Artificial Sequence: Synthetic coding sequence
  source 1..420: mol_type = other DNA
atgggccccctgatggtgctgttctgcctgctgttcctgtaccccggtttagccgactcagcaccatcctgcccccagaatgtcaatatttccggcgggaccttcacgcttagtcacggatgggcccctggtagcctcctcacatacagttgcccccaaggactgtacccttcacctgccagtcggctctgcaagtcttccggccagtggcagactccaggcgcgaccaggtctctgtccaaagctgtgtgcaaacccgtgcgatgtccagccccagtgtcttttgaaaatgggatctacacccctaggctgggcagttacccggtcggcggcaacgtctcctttgaatgcgaggatggctttatattacgcgggtctccagtaaggcagtgccgcccaaacggcatgtgggacgggtag

SEQ ID NO: 183585 - DNA, 2259 bp, synthetic construct
  misc_feature 1..2259: note = Description of Artificial Sequence: Synthetic coding sequence
  source 1..2259: mol_type = other DNA
atgggccccctgatggtgctgttctgcctgctgttcctgtaccccggcttagccgactccgctccttcttgtccgcagaatgttaacattagcgggggaacctttaccctcagccacggatgggcacccggctcattactgacctattcatgcccccagggtctttacccatctccggcaagtcggttgtgcaaatctagtggtcaatggcaaactcccggagcgaccaggagtctatcaaaggctgtgtgcaagcctgttaggtgtccagcacctgtgtctttcgagaatgggatatatacccccaggctcgggtcctacccggtggggggcaacgtgtcattcgaatgcgaggatggcttcatcctaaggggatccccagtgcggcaatgccgccccaacggcatgtgggatggagaaaccgccgtgtgcgacaatggcgccggccattgcccaaatccaggtatttccctcggtgccgtgaggacaggattccggttcgggcatggtgataaagtgcgctatcggtgttctagcaatctagtgcttaccgggtctagcgagcgggagtgccagggtaacggcgtttggtcaggaacagaacctatttgtaggcagccctacagttacgattttcccgaagacgtcgcaccagctctgggaacttccttcagccacatgctgggtgcaaccaacccgacacagaagaccaaagagagcctcgggcggaaaattcaaatccagaggtcaggccacctgaacttgtacttgcttttagattgcagccagtccgtgagtgaaaatgactttctgatctttaaggagtctgccagcctgatggtcgataggattttctcttttgagatcaatgtctctgtcgcaatcatcacgttcgcttcagagcccaaggtgctgatgagcgtgctcaacgacaactctagagacatgaccgaggtaatctccagtcttgaaaatgccaattataaggaccatgaaaatggcacaggtactaatacatacgctgcactcaactccgtctatctgatgatgaacaaccaaatgaggttgctcggcatggagactatggcctggcaggaaattcggcacgcaatcattctgcttactgatggaaagtctaatatgggcgggtctcctaagaccgctgtggatcacattagggaaatcctcaacattaaccaaaagcgcaacgactacctcgatatctatgctattggggtaggcaagctggatgtggactggagagagctgaacgaactgggttccaaaaaggatggtgaaaggcatgctttcatcttgcaggacacgaaggctctgcaccaggtctttgagcatatgctggatgtgtccaaattgaccgacacgatctgcggggtgggcaatatgtctgccaatgcttctgaccaagaaaggacaccttggcacgtgactataaaacctaaatctcaggagacgtgtcgcggcgctctgatcagcgaccagtgggtcctcaccgctgctcactgtttccgggatggcaatgaccatagtctgtggagagtgaatgttggcgatcccaaatcccagtgggggaaggagttcctgatcgaaaaagcagtgatttcccctggcttcgacgtgtttgccaagaagaaccagggcattctggagttctatggagatgacatcgcgctgcttaaacttgcacaaaaagttaaaatgtctacacatgctagacctatttgcctgccatgcacgatggaggctaatctggcactgcgacggccccagggatctacgtgtcgcgaccacgagaatgagcttctgaataaacagtctgtgcctgctcactttgtcgccctgaacgggtccaagctgaacataaatctgaaaatgggggtggaatggacctcctgtgctgaagtggtttcacaagaaaagaccatgttccctaatttgactgacgtcagagaagtagtgacggaccagttcctatgtagcggaacccaggaggacgagtccccctgtaagggagagtctggtggagccgtgtttctggagcgccggttcaggtttttccaagtgggtctcgtaagctggggactctacaacccctgtttaggatctgctgataaaaacagccgaaaaagggcacccagaagtaaagtgccaccgccaagggacttccatattaacctcttccgaatgcagccatggttgaggcagcatctgggcgacgtcctgaattttctgcctctatag

SEQ ID NO: 183586 - DNA, 378 bp, synthetic construct
  misc_feature 1..378: note = Description of Artificial Sequence: Synthetic coding sequence
  source 1..378: mol_type = other DNA
atgggccccctgatggtgctgttctgcctgctgttcctgtaccccggacttgccgattcagcaccctcatgtccccaaaatgtcaatatctctggaggaacctttacactaagccatggttgggcacccggctctctcctaacatattcgtgtccacaaggactgtatccatcccccgcttctcgcctctgtaagagttctggtcaatggcagacaccgggagctacacgaagtctcagtaaggcggtctgcaaaccaggccactgtcctaaccctggcatatcactgggcgctgtgaggactggctttagattcggccacggagacaaggtgcgctacagatgctccagcaacctcgtgctaactggcagtagttag

SEQ ID NO: 183587 - DNA, 510 bp, synthetic construct
  misc_feature 1..510: note = Description of Artificial Sequence: Synthetic coding sequence
  source 1..510: mol_type = other DNA
atgcgggccctgtgcatccgggagacctgcagcagcgagctgggcttctcacggaactggtccaggcgcaaggcgggtcattgtcctaacccgggaatctcgctgggcgcagtccgcaccgggtttcggtttgggcacggcgacaaggtgcgatatcgatgttcctctaatttggtactgactggatcttctgagcgggagtgtcagggaaacggggtatggtccggtaccgagcccatatgccggcaaccatatagctacgattttcctgaagatgttgccccagcccttggaaccagcttcagccatatgctcggcgccacaaacccaacccagaagacaaaggatcatgagaacgggaccggaaccaatacctatgccgcacttaactctgtttacttgatgatgaataaccagatgagattgcttgggatggagacgatggcctggcaggagatccgacacgctatcatcctgctcacagatggcaagtctaatatgggcggctag

SEQ ID NO: 183588 - DNA, 1062 bp, synthetic construct
  misc_feature 1..1062: note = Description of Artificial Sequence: Synthetic coding sequence
  source 1..1062: mol_type = other DNA
atgggccccctgatggtgctgttctgcctgctgttcctgtaccccgcaggacattgcccaaatccaggaatcagcctaggtgcagtgcggactgggtttagattcggccacggcgataaggtccggtatcgctgctctagcaacctggtactgactggttcctccgagagggagtgtcaaggaaatggcgtctggtctggcaccgaaccgatctgcaggcagccgtactcttacgattttcccgaggatgttgccccagcactgggaaccagcttcagccatatgctcggggcaactaatccaacccagaagacaaaggaaagtctgggtaggaagattcagattcagcggtccggccatcttaacttgtatctgcttttagattgctctcagtccgtcagtgagaatgactttctcatcttcaaggagtctgccagtctgatggtggatcgaatcttctcttttgagattaacgtgagtgtggctattatcactttcgcgtccgagccaaaggttctcatgagtgttttgaatgacaactcgcgggacatgacagaggtcatctcctccttagaaaatgctaattataaggaccatgagaacggcacagggaccaacacatacgcagccctaaactcagtctacctaatgatgaacaaccaaatgagactgcttggcatggagacaatggcatggcaggagatccgccatgccatcatcttgctaacagacggcaaaagcaatatggggggttctccaaagacagctgtggaccatattagggaaatactgaatattaatcaaaagcggaatgactatttggacatctatgcaattggcgttgggaagttggatgtcgactggcgagagctgaacgagttgggatctaaaaaagacggggagcggcacgcttttatcctccaggataccaaagcactccaccaagtctttgagcatatgttggacgtatccaaactcaccgacacaatctgcggcgtcggcaatatgagcgccaacgccagcgaccaggagagaactccatggcatgtgacaattaaatag

SEQ ID NO: 183589 - DNA, 2259 bp, synthetic construct
  misc_feature 1..2259: note = Description of Artificial Sequence: Synthetic coding sequence
  source 1..2259: mol_type = other DNA
atgggccccctgatggtgctgttctgcctgctgttcctgtaccccgggctggctgactcggccccctcgtgtccccagaatgtcaatattagcggtggaacctttactctgtcgcatggctgggcccctgggtctctgttaacttatagttgtccgcaaggtctatatccgtcccccgctagtcgactctgtaagtccagtggacagtggcagacccctggcgccacaaggtccctttcaaaagccgtgtgcaagcccgtgcggtgcccggcccccgtgagcttcgaaaacggcatttataccccacgtctgggatcttatcccgtggggggcaatgtatcatttgagtgcgaggacggctttatactccgtggttcacctgtccggcagtgtaggccgaatgggatgtgggacggcgagactgctgtgtgtgacaatggggcaggccattgtcccaatcctggaatttcactcggcgctgtccgcacaggatttcgatttggccacggggacaaagtccgatacaggtgctcttctaaccttgttttaacagggagttctgaaagagagtgtcagggtaacggagtgtggagcggaaccgagccaatttgcagacagccatattcttacgacttccctgaggacgtggcccctgcactgggcacctccttctcgcacatgctgggcgccaccaacccaactcagaagacaaaagaatcccttgggagaaaaatacagatccagcggtctgggcatctgaatctgtacctgctgctagattgctcacaatccgtatctgagaatgactttctaatttttaaagaatctgcctccctgatggtcgaccgcatcttcagctttgagatcaacgttagcgtggccattattacatttgcctccgaaccaaaagttctgatgtccgtgctcaatgacaactcccgagatatgacagaagtcatttccagtctcgagaatgcgaattacaaggatcacgagaatggcaccggaacaaatacatacgccgctctgaattctgtctacctgatgatgaacaatcagatgaggctactggggatggaaacaatggcctggcaggagatccggcacgctatcattttgctgactgacgggaagagcaacatgggaggatcccctaagactgccgttgatcacattagagaaattctaaatatcaaccagaaacggaatgactacctcgacatttacgctatcggggttggtaagttagacgtagattggcgtgagttgaacgagctggggagtaagaaggacggggagagacacgcctttattctgcaggatactaaagccctccaccaagtgtttgagcatatgctggacgtcagcaaactaacagacaccatttgcggcgtggggaacatgtccgccaatgcatctgaccaagaaaggacgccctggcacgtcacaattaaacccaaatctcaggagacgtgtcgcggcgccttaattagtgatcagtgggtcctcacagccgcccactgcttccgggatggtaacgatcatagcctctggagagtcaacgttggagatccaaaaagtcagtggggtaaggaattcctcatagagaaagctgtgatctctcccggatttgatgtgttcgccaaaaaaaaccaggggatcctggaattctatggggacgacatagctctactgaagctggcccagaaagtgaagatgagcacgcacgctagaccaatatgcttaccatgtactatggaagccaacttggcactgagacggccccaaggatctacatgccgagatcacgaaaatgagctactgaacaagcagtcagtccccgctcacttcgttgcactcaacgggtctaaactcaacatcaacttaaagatgggagttgaatggactagctgcgctgaggtagtctctcaagagaagactatgttcccaaatttgacagacgtgcgcgaagtggtgacagatcagttcttgtgttccggaactcaggaagacgagagtccctgtaaaggcgagtcaggcggcgctgtgtttctcgaacgccggtttcggttcttccaagtcggcctggtctcctggggtctgtacaacccatgtctgggctctgcagacaagaactctcggaaaagagcaccgagatccaaagttccgcctcctcgcgatttccacatcaatctcttccgcatgcagccatggctgaggcaacacctgggcgacgtactcaacttcctccccttgtag

SEQ ID NO: 183590 - DNA, 1062 bp, synthetic construct
  misc_feature 1..1062: note = Description of Artificial Sequence: Synthetic coding sequence
  source 1..1062: mol_type = other DNA
atgggccccctgatggtgctgttctgcctgctgttcctgtaccccgctggtcattgtcccaaccccgggatctcattaggggctgtgaggaccggatttcggttcgggcatggcgacaaggtccgctatcgctgctcctctaacttggtgctgactggctcttccgagcgggaatgtcagggcaacggagtgtggtccggaactgaaccaatttgtagacagccctattcgtatgactttcccgaggacgtggccccagccctcggcacatccttttcacacatgcttggcgcgaccaatccaacacaaaaaactaaagaaagtctgggcagaaagatacagatacagagatccggacacctgaatttgtacttgcttttagattgtagccaatccgtgtctgaaaacgacttcctcattttcaaggagagtgcctctcttatggtagatagaattttcagctttgaaattaacgtatcagtcgctattataactttcgcatcagaacctaaggtcctgatgagtgtgttgaacgataactcccgtgatatgaccgaggtgattagcagtttagagaatgcaaattataaggatcatgaaaacggcactggaaccaatacttacgccgcccttaattctgtatacctcatgatgaacaatcagatgaggctgctgggcatggagacaatggcatggcaggagatccgccacgccatcatactcctgacagacggaaagtctaacatgggcggctcgcccaaaaccgccgtggatcatatccgagaaattttgaacattaatcagaaaaggaatgactacctcgatatttacgcaatcggcgttggtaaactcgatgtggactggagggaactcaacgagttagggtcaaagaaggatggtgagcggcacgcctttattctgcaagacactaaagctctgcaccaggtatttgagcacatgctggatgtctctaaacttacagacaccatttgtggggttggtaacatgtccgccaatgctagcgaccaggagaggaccccatggcatgtgacaattaaatag

SEQ ID NO: 183591 - DNA, 1062 bp, synthetic construct
  misc_feature 1..1062: note = Description of Artificial Sequence: Synthetic coding sequence
  source 1..1062: mol_type = other DNA
atgggccccctgatggtgctgttctgcctgctgttcctgtaccccgccggccactgtccaaaccccggcatcagcctgggtgccgtgcgaacaggatttagattcggccacggagacaaagtccggtacagatgcagcagcaacctggtgcttacggggtctagcgagagagagtgccagggcaatggagtgtggtctggcacagagcccatctgtcggcaaccctacagctatgactttcccgaagatgtggcacccgctctaggtacaagctttagccatatgctgggagctactaaccctacgcaaaagacaaaggaatctctaggaagaaagatccagattcagaggtccggccacctgaacctgtacctcctgctcgattgctctcagtctgtgagcgagaatgacttcctgatttttaaagaatctgcatcgttaatggtggaccggatcttctcatttgagatcaacgtaagtgtcgctataattaccttcgcttccgagccaaaggtcctaatgagtgtgctgaatgacaactccagagacatgactgaggtcataagctctctggagaacgctaattacaaggaccatgagaacggcaccggtacaaacacttacgcagcactgaatagtgtgtatctcatgatgaataatcagatgcggcttcttggcatggaaaccatggcctggcaggagatcagacatgccataatcctgctcaccgatgggaagagtaatatgggcggaagcccgaaaaccgcagtcgaccacatccgggagatattaaatatcaaccagaagcgtaacgattacctggacatctacgctatcggagtgggcaagctggacgtggactggagagagcttaatgagcttggctccaaaaaagacggagaacggcacgcctttatcctgcaagacactaaagctctccaccaggtgtttgaacacatgctcgatgtgtctaaactgactgacacgatttgcggcgtgggtaatatgtccgcaaacgcatctgaccaggaaaggacaccgtggcatgtgacaatcaaatag

SEQ ID NO: 183592 - DNA, 510 bp, synthetic construct
  misc_feature 1..510: note = Description of Artificial Sequence: Synthetic coding sequence
  source 1..510: mol_type = other DNA
atgcgggccctgtgcatccgggagacctgcagcagcgagctgggctttagtcgaaattggtctagacgcaaggccggacattgtcctaacccgggcatttctcttggagctgtgagaactggcttcagatttgggcacggtgacaaagtgcggtatcggtgctcctctaacctggtgttgaccggctccagtgagcgagagtgtcagggaaacggcgtgtggagcggcaccgaaccaatctgccggcagccgtatagctatgacttccccgaggatgtggcccccgcactgggtacctccttttcacatatgttaggcgccacaaaccctacccaaaagaccaaagatcatgaaaacgggaccggcactaacacatacgccgccctgaatagcgtttacctaatgatgaacaatcagatgcggctcctgggaatggagaccatggcgtggcaggaaatacggcacgctattatattactgacggacggcaagtctaacatgggaggttag

SEQ ID NO: 183593 - DNA, 1578 bp, synthetic construct
  misc_feature 1..1578: note = Description of Artificial Sequence: Synthetic coding sequence
  source 1..1578: mol_type = other DNA
atggtgctgttctgcctgctgttcctgtaccccgccggccactgccccaaccccggtattagcctgggagctgtgaggactggatttaggtttggccatggagataaggtgcgataccggtgtagttcgaatctggtgctgaccgggagctcggaaagagagtgccaaggcaatggagtgtggtctgggaccgagcctatttgtcggcagccgtattcttacgacttccccgaggacgtggccccagcccttggcacctctttctcccacatgctgggcgccacaaacccaactcaaaagacgaaggaccacgagaatggaacaggcaccaacacctacgctgctttgaattctgtgtacttgatgatgaacaatcaaatgagactgctggggatggaaactatggcttggcaggagattcgccacgccatcatattgctcaccgacggtaaatcaaacatgggaggtagccctaagacagctgttgaccacatcagggaaatattgaatattaaccaaaagaggaacgattatcttgatatatatgcaattggggtcggtaagctcgatgttgattggcgtgagctcaacgagttagggagcaagaaggatggcgaaagacatgcttttatccttcaggatacgaaggcactgcatcaggtatttgaacacatgctggacgttagcaagctaaccgatacaatctgtggggtgggaaatatgagcgcaaatgctagcgatcaggaaagaacaccttggcatgttactatcaaacccaagagccaagagacttgtagaggggccttaatttcagaccaatgggttctgacagctgcacattgtttccgggatgggaacgatcacagtctgtggagagtgaacgtgggggatcctaagtcacagtggggaaaggagtttctcattgaaaaagcagtcatctcacctggtttcgatgtgtttgctaagaaaaaccaaggcattctggagttctatggggacgatattgccttgttaaagcttgctcagaaggttaagatgagcacacacgcacgaccaatttgtttgccttgtaccatggaggccaatctcgcgctgaggcgcccacaggggagcacttgtagggaccacgaaaatgaacttctgaataaacagagcgtgccagcccattttgtggctttgaatggttccaagctgaacatcaacctcaagatgggagtggaatggacctcttgtgccgaggttgtgagccaggaaaagactatgttccccaatctgacggacgttcgtgaagtggtcacggatcagtttttatgtagtggaactcaggaggatgagtctccatgcaagggcgagagcggcggagccgtttttttggaacgaagattcagattctttcaggtcggcctggtgagttggggcctgtataacccgtgtctgggctccgctgacaaaaattcaagaaagagagccccgcggtctaaggttccacccccacgggatttccatattaacctgttcaggatgcagccttggcttcgccagcatttgggagacgtcctgaactttttacccctgtag

SEQ ID NO: 183594 - DNA, 1062 bp, synthetic construct
  misc_feature 1..1062: note = Description of Artificial Sequence: Synthetic coding sequence
  source 1..1062: mol_type = other DNA
atgggccccctgatggtgctgttctgcctgctgttcctgtaccccgccggccattgccctaatcctggcatctcactgggcgccgtgagaaccgggtttaggttcggccatggagataaggttcgttaccgctgttcctccaatctcgtacttaccgggtccagtgaacgcgagtgccagggtaatggtgtatggagcggcactgagcctatttgccgccagccttactcgtacgatttccctgaggacgtggcgcccgcactagggacctcgttttcccacatgctgggtgcaactaatcccacacaaaagactaaggaatctctggggagaaaaattcagattcagcgctccggccaccttaatttatatctactgcttgattgctcccagagcgtgagcgagaacgactttttaatcttcaaggagtccgcctcgctgatggtggatcgcattttctcatttgagattaatgtgagcgtggccataatcacctttgcatcagagcccaaggtcttaatgtcagtcctgaacgacaactctcgcgatatgactgaagtgatctcgagtctagaaaacgctaactacaaggaccacgaaaatggaaccggcaccaacacatacgcagcccttaactcagtgtacttaatgatgaacaaccagatgcgacttctcggcatggaaacgatggcatggcaggagatacggcacgccattatacttctgactgatggaaagtcaaatatggggggttctcccaagaccgccgtcgatcacatccgcgagatcctgaatattaaccagaagcgcaacgactacttagacatttatgccattggggtggggaaacttgacgtcgactggcgcgagttgaatgagttgggatccaaaaaggatggcgagcggcacgctttcattctgcaggacacgaaggctctgcaccaagtgttcgaacacatgctggatgtatcaaaactgacggatacgatatgtggagtgggcaatatgtccgctaatgcctcagatcaggagcgcacgccttggcacgtgaccattaagtag

SEQ ID NO: 183595 - DNA, 405 bp, synthetic construct
  misc_feature 1..405: note = Description of Artificial Sequence: Synthetic coding sequence
  source 1..405: mol_type = other DNA
tgaggccactgccccaaccccggcatcagcctgggcgccgtgcggacaggttttcgtttcggtcacggtgataaagtgaggtacagatgcagcagtaatttagtgctaaccggaagctccgagagagaatgccaaggcaatggtgtctggagcggtaccgagccgatatgtcggcaaccttacagctatgacttccctgaagacgtcgcaccagctctcggcacttcattttcgcacatgctgggggcaaccaacccgacccaaaagactaaggagagcctcggacgcaagattcagatccagcgctccggacatctgaacttatacctcctgttggattgctcacaatcggtctccgaaaacgacttcttgatctttaaagagtccgcttctctgatggtttag

SEQ ID NO: 183596 - DNA, 1578 bp, synthetic construct
  misc_feature 1..1578: note = Description of Artificial Sequence: Synthetic coding sequence
  source 1..1578: mol_type = other DNA
atggtgctgttctgcctgctgttcctgtaccccgccggccactgccccaacccaggcatcagtctgggggcagtacgaaccggatttagatttggccatggtgataaagtccggtacagatgttcctctaatctagtgctcacgggatccagcgagagggagtgccagggcaatggagtatggtctggaacagaacccatttgcaggcagccctactcatacgatttcccagaagatgtagcccccgctttaggaacatcattttcgcacatgctgggagccactaaccccacacagaaaaccaaggatcacgaaaatggtacaggaactaatacatacgcagctctgaactccgtctatctaatgatgaataatcagatgcgactgctcggaatggaaacaatggcctggcaggaaatccggcatgcaatcatactgcttactgatgggaagtctaacatgggcggctctcccaaaacagccgtagaccatattcgtgagattttaaatattaaccagaaacggaacgattacctggacatatatgcaataggcgtgggcaagctggatgtggattggagagagttgaatgagctgggctctaagaaggacggcgagcgccacgcttttatcctacaagatacgaaggccctgcaccaagtcttcgaacatatgctagacgtgtcaaaacttactgacaccatctgtggcgtgggcaacatgagtgccaatgcttcagaccaagagagaaccccatggcatgtgacaatcaaacccaagtcccaggaaacgtgtaggggcgcgctgatttcagatcaatgggttttgaccgctgctcactgcttcagagacggaaacgatcacagcctatggcgcgtgaatgtcggcgatcctaagagtcaatgggggaaggaattcctgattgagaaggcagtaatctctcccggcttcgacgtcttcgccaagaaaaaccaggggatcctggagttctatggcgacgatattgcgctgttaaagctggctcagaaagtaaagatgagcacgcacgctcggcccatctgcctaccctgtacaatggaggccaatcttgcgctgcgccggccgcaggggagcacctgccgcgatcatgaaaacgaattgcttaacaaacagagcgttccagcccattttgtcgccctgaatggcagcaagctgaacattaacctgaaaatgggagttgagtggacgagctgtgctgaagtagtatcgcaggagaaaacgatgttccctaacctcaccgacgtcagggaggtggttaccgaccagtttctgtgttctggaactcaggaagacgagtccccctgtaagggcgaaagcggaggagctgtgtttctcgaaagaagatttaggtttttccaggtgggattggttagttggggactctataacccctgtctggggtctgcagacaagaatagccgtaaacgcgcaccccgttcgaaagtccctccaccaagagacttccacataaatttgttcagaatgcaaccatggctgcggcaacacttaggcgatgtcctgaattttctacctttgtag

SEQ ID NO: 183597 - DNA, 1578 bp, synthetic construct
  misc_feature 1..1578: note = Description of Artificial Sequence: Synthetic coding sequence
  source 1..1578: mol_type = other DNA
atggtgctgttctgcctgctgttcctgtaccccgccggccactgccccaatcccgggatctcactgggtgctgtgcggaccgggttcaggttcgggcacggcgataaagtacggtacagatgtagctcaaaccttgtattgaccggctcttccgaaagggagtgccaggggaacggagtgtggtctggcacagaacccatctgccgccagccctattcttatgatttcccggaagacgtggctcccgccctgggtacatccttttcccatatgctgggagctacgaacccgacgcagaaaactaaagaccacgaaaacggcaccggaaccaatacctacgcagccctgaactcagtgtacctgatgatgaataaccaaatgcgtttgctgggaatggagacgatggcctggcaggagattcggcacgcaatcattttacttaccgatgggaagagcaatatggggggtagtccaaaaacagcggtcgaccacatcagagagatcctgaatatcaatcagaagaggaacgattacctggatatttacgcaattggtgttggcaaattagatgtcgattggagggagctgaatgagctgggctcaaaaaaggacggtgagcggcacgctttcattctgcaagacacaaaggccctccatcaggtgttcgagcacatgctcgacgtgtccaagttgacagataccatttgcggggtgggaaacatgtctgccaatgcgagtgaccaggagcgcaccccttggcacgttaccataaaacctaaatcccaggaaacctgccgtggagccttaatctcagatcagtgggtgctgacagccgctcactgttttcgggatggaaacgaccactctctgtggcgagtcaatgttggggatcccaagagccagtggggaaaggagtttctgattgaaaaagcggtgattagtcctggattcgacgtgtttgccaaaaagaatcaaggcattttggagttctacggagatgacattgctctgctgaagttggcacagaaggtcaagatgtcgactcatgcccgccccatttgtcttccctgtactatggaggccaatctagcattgcgacggcctcagggctccacctgccgcgaccacgaaaatgagctactgaataagcagtcagtgcccgcccacttcgttgcccttaacgggtctaagcttaacatcaacctcaagatgggcgtggagtggaccagttgtgctgaagtggtgtcccaagagaagactatgtttcctaatttgactgatgtgagggaagttgtgacagaccagttcctttgttctggcacgcaagaggacgagtctccctgtaagggagaaagtgggggtgctgtgtttctagagcgacggtttcgatttttccaagtcggacttgtctcttggggactgtacaacccctgcctcggttctgccgataaaaatagccggaaaagggcccctcggagcaaggtgcccccacctcgtgatttccacataaatcttttcagaatgcagccatggttgcgccagcaccttggcgatgtgctgaacttcctcccactctag

SEQ ID NO: 183598 - DNA, 1062 bp, synthetic construct
  misc_feature 1..1062: note = Description of Artificial Sequence: Synthetic coding sequence
  source 1..1062: mol_type = other DNA
atgggccccctgatggtgctgttctgcctgctgttcctgtaccccgctggtcattgcccaaatcctggaatctctctgggagctgtgcgcactgggttccgatttgggcacggtgacaaagtgcgctaccgctgttcctccaatttagtgctcactggatcctcagagagagagtgccaggggaacggcgtgtggagtggcaccgagcctatttgcaggcaaccctacagttacgacttcccagaggatgttgccccagccttagggaccagttttagccatatgctgggagctactaaccccacgcagaagactaaagagtccctggggaggaaaattcagatccagagatctggacacctcaatttatacttgctgctggactgttctcagtccgtgagcgagaatgactttctgatcttcaaggaaagcgcctctttaatggtggacaggattttttcctttgagatcaacgtgagcgtagctatcatcactttcgcttcggaacccaaagtcctcatgtccgtgttgaacgataactctcgagacatgaccgaagttatcagcagtctcgagaacgctaattataaggatcacgaaaatggtacaggaaccaacacttacgctgccctgaacagcgtgtacttaatgatgaacaaccagatgaggttgctgggtatggagacaatggcttggcaagaaattaggcatgcaatcattctcttgacagatggaaagagcaatatggggggttctccaaaaacagcggtggaccatataagggaaatactcaacataaatcaaaaacgaaacgactatctggacatttatgcaattggggttggaaagctcgacgtcgactggcgcgaattaaatgaacttggctccaagaaagacggtgaaaggcacgcgtttatcctccaggacacaaaggcgttgcaccaggtgttcgaacatatgttagatgtgagcaagctaacagacactatctgcggcgttggcaacatgagcgccaatgcctctgaccaagagcgcacaccatggcatgtgaccattaagtag

SEQ ID NO: 183599 - DNA, 477 bp, synthetic construct
  misc_feature 1..477: note = Description of Artificial Sequence: Synthetic coding sequence
  source 1..477: mol_type = other DNA
atgcgggccctgtgcatccgggagacctgcagcagcgagctgggcttttcaagaaactggtccagacgcaaggccggacattgccccaaccctgggatctccctaggcgccgtgagaactggttttcgctttggacacggcgataaggtccgttatagatgttcctctaacctggtgctcactgggagcagcgagcgggaatgtcaaggtaatggagtctggagcggtacagaacctatatgcaggcagccctactcttatgatttcccagaggacgtagccccagctctcggcacatcctttagtcacatgctgggtgcaacaaaccctacccagaaaaccaaggagagcctcggaaggaaaatccagatccagcggagtgggcatctgaacctctacctattattagattgttctcagagcgtgagcgaaaacgactttttgattttcaaagaatcggcaagtctcatggtttag

SEQ ID NO: 183600 - DNA, 477 bp, synthetic construct
  misc_feature 1..477: note = Description of Artificial Sequence: Synthetic coding sequence
  source 1..477: mol_type = other DNA
atgcgggccctgtgcatccgggagacctgcagcagcgagctgggcttcagccggaattggtctaggcggaaagccggccattgcccgaatcccggtatctctctgggcgcagttcgcactggattccggtttggccacggagataaggttcggtatcggtgcagctccaaccttgttcttaccggctccagtgagagagaatgccaggggaacggtgtatggtccggaaccgagcccatctgcaggcaaccctattcatatgattttcccgaagacgtggcccctgctctcgggacaagcttttcacacatgttaggcgccaccaacccaactcagaagacgaaggaatctctaggacggaaaatccaaatccagagatcagggcatctaaacctgtatctcctgctagattgtagtcagtctgttagcgagaacgacttcttgatctttaaggaaagcgcctcgttaatggtgtag

SEQ ID NO: 183601 - DNA, 978 bp, synthetic construct
  misc_feature 1..978: note = Description of Artificial Sequence: Synthetic coding sequence
  source 1..978: mol_type = other DNA
atgggcacccggagcgccatcgccgccccccggatcctgtgcagccgtggcttgcgctctggaagcgccagagccaccggttccggtgtggagcggtcacctagcgctgctaatccaaccttgatgacctctctccgcacctggcccttgccctgggccttaccttcccctacctgtcttgggcccccaatccccccaaggagacagcgcattttcagttttgaaatcaacgtgtccgtggccatcataacattcgcttcagagcctaaggtgctgatgtccgtcctgaatgataacagcagagacatgacagaagtgattagcagcttggaaaatgcaaattacaaagaccatgaaaacggaacagggaccaatacttacgccgcattgaacagtgtttatttaatgatgaataaccagatgcggctgcttggcatggagacaatggcctggcaagaaatccgccacgccattatattgctgacagatggaaagagtaacatgggcgggtcaccaaaaacagccgtggatcatattagagagatcctgaacattaatcagaaacggaatgactacctggatatctacgcgatcggagtaggcaagctggatgtagattggcgggagttgaacgaattagggtcaaaaaaggatggtgaaaggcacgccttcatcctccaggacaccaaggccttacaccaggtgtttgagcatatgttagatgtatcaaaactgactgacaccatctgcggtgtgggcaacatgtcagcaaatgcatcagatcaggaaaggacaccttggcatgtgactatcaagccaaagagccaagaaacctgtagaggagcactgatctctgatcagtgggttttgaccgccgcacattgctttcgagacggcaacgatcactcactctggagagtgaatgtgggcgaccccaaatctcagtggggaaaagagttcctgatcgaaaaagcttag

SEQ ID NO: 183602 - DNA, 477 bp, synthetic construct
  misc_feature 1..477: note = Description of Artificial Sequence: Synthetic coding sequence
  source 1..477: mol_type = other DNA
atgcgggccctgtgcatccgggagacctgcagcagcgagctgggcttctcccgcaattggtctcgccgcaaggctggtcattgtcctaatcctgggatctctctcggagctgtgcgcaccggcttcagattcggccatggcgacaaagtgcggtatcggtgctcgagtaaccttgtgttgacaggcagctccgaaagggagtgccagggaaatggagtatggagtggtaccgagccaatttgtcggcagccttacagttacgactttccggaggacgttgctcccgccctgggtacgagcttcagccacatgctgggggcaaccaacccaactcagaaaacaaaggagagcctgggtcgaaagattcagattcagaggtctggccatctgaatctgtacttgctgctggattgctcgcaatctgtcagtgagaacgatttccttatcttcaaagagtccgcaagccttatggtgtag

SEQ ID NO: 183603 - DNA, 1062 bp, synthetic construct
  misc_feature 1..1062: note = Description of Artificial Sequence: Synthetic coding sequence
  source 1..1062: mol_type = other DNA
atgggccccctgatggtgctgttctgcctgctgttcctgtaccccgccggacactgccccaatcccggcatctccctcggcgccgttaggaccgggtttcgcttcggccacggagacaaagtgagatatagatgtagttctaacctagtgttgacaggatccagtgagcgtgaatgccaggggaatggcgtctggtctggcacagagcccatttgccgtcaaccatactcctacgatttccctgaggacgtggcaccagctctcggcacctcattttcccatatgctgggagccaccaatccgacccagaagacaaaggaaagcttggggcgtaaaatccagatccagaggagcggccaccttaatctgtatttgctgctcgattgttcccagagtgtgagtgaaaatgattttcttatttttaaagagagcgccagcctcatggtggatcgcatattctcattcgagattaatgtctctgttgctataattactttcgcatcagaacccaaggtgcttatgtccgtgttgaacgataactcaagagacatgactgaagtaatctcatctcttgagaacgcgaactataaagaccacgaaaatggaactggcactaacacctacgcagccctaaactcagtgtacctgatgatgaataaccaaatgaggctgctgggcatggagaccatggcctggcaagaaattaggcacgccatcattctgctaaccgacgggaaatccaatatgggaggcagtccaaaaaccgccgttgatcacattcgggagatattgaacattaatcaaaaacggaacgattatctggacatctatgcgattggcgtcggtaaactcgatgtggattggagggagctcaacgaactcgggtcaaaaaaggacggggagcgccacgctttcatcttgcaagacaccaaggctctgcaccaagtgttcgaacacatgctggatgtatcaaagctgaccgacacaatatgcggcgttgggaatatgagcgccaatgcttctgatcaagaaaggaccccgtggcacgtcacaattaaatag

SEQ ID NO: 183604 - DNA, 420 bp, synthetic construct
  misc_feature 1..420: note = Description of Artificial Sequence: Synthetic coding sequence
  source 1..420: mol_type = other DNA
atgggccccctgatggtgctgttctgcctgctgttcctgtaccccggcctagccgattccgcgccctcctgcccccagaatgtcaatatatcaggtggcacttttacgctgtcccacgggtgggcccccgggtctctgcttacctatagctgcccacaaggattgtaccctagccctgcatctcgcctctgtaagagtagcggccagtggcagactcctggcgctacccgctctctgagcaaagccgtttgtaaacctgtgagatgtccagccccagtgtccttcgagaacggtatttacactccaaggttagggtcctaccccgtgggaggcaatgtgtccttcgaatgtgaggacggctttattctccgagggtccccagtgaggcagtgcaggcccaacggaatgtgggatgggtag

SEQ ID NO: 183605 - DNA, 438 bp, synthetic construct
  misc_feature 1..438: note = Description of Artificial Sequence: Synthetic coding sequence
  source 1..438: mol_type = other DNA
tgaggccactgccccaaccccggcatcagcctgggcgccgtgcggacggggtttagatttggtcatggcgataaggtacgctatcgatgtagctcaaatcttgtgctgacaggatcctcagagagagagtgccagggcaacggcgtctggagcggcaccgagccaatctgtagacagccctatagttacgattttccagaggacgtcgcccctgcgttaggtacatcattctcccatatgctaggtgcaacgaaccctactcaaaaaacaaaagaccatgagaacggcacagggaccaatacttacgctgcactcaattctgtctatctgatgatgaataaccagatgcggttgctgggaatggagactatggcctggcaggagattcgccacgcaattatcttgctgacggatggcaagtctaacatgggtggctag

SEQ ID NO: 183606 - DNA, 378 bp, synthetic construct
  misc_feature 1..378: note = Description of Artificial Sequence: Synthetic coding sequence
  source 1..378: mol_type = other DNA
atgggccccctgatggtgctgttctgcctgctgttcctgtaccccgggctcgccgattctgctccatcttgtccccagaatgtcaatatctcaggaggtaccttcacactatcccacggatgggccccaggaagcttgctgacatactcttgtcctcagggcctttatccatctccggcgtcgagactgtgtaagtcctcagggcagtggcaaacaccaggcgctacacgtagcctgtccaaagcagtgtgtaaacctgggcattgtcctaatcccggcataagcttgggtgcagtgcgcaccggctttaggttcggccacggcgataaagtgcgatatagatgcagttctaatctggtgcttacaggatccagctag

SEQ ID NO: 183607 - DNA, 420 bp, synthetic construct
  misc_feature 1..420: note = Description of Artificial Sequence: Synthetic coding sequence
  source 1..420: mol_type = other DNA
atgggccccctgatggtgctgttctgcctgctgttcctgtaccccggattggccgacagcgcgccctcatgtccacagaacgtgaatataagcgggggcacttttacactgtcgcacggatgggcccccggcagtcttctcacgtattcttgccctcaggggttatatccatcgcctgcttcccgcctttgtaagagcagcggccagtggcagacaccaggggccacccgctctctatcgaaagcagtttgcaaaccagttaggtgtccggccccagtatcattcgagaatgggatttacacccctagattgggcagttatcccgtgggggggaatgtatcattcgaatgcgaggacggcttcatcctgcggggttcacccgtccggcagtgccggcctaatgggatgtgggacggctag

SEQ ID NO: 183608 - DNA, 477 bp, synthetic construct
  misc_feature 1..477: note = Description of Artificial Sequence: Synthetic coding sequence
  source 1..477: mol_type = other DNA
atgcgggccctgtgcatccgggagacctgcagcagcgagctgggcttcagccggaattggagccgacgtaaggcgggccactgtcctaatccagggatcagcttgggcgcggtgagaacgggattcaggttcggccacggtgacaaggtacgatatcgttgtagttccaacttggttctcaccggcagttcagagagggagtgtcagggaaatggcgtctggtccgggacagaaccgatctgcagacagccttacagttacgacttccccgaagacgtggcccctgccttaggcacatcattctcccacatgcttggggctaccaatccaacccagaaaactaaagagtccctcggacggaaaattcagattcagcgctcggggcacctgaatttatacttgttacttgattgttcgcaatctgtgtccgagaacgatttcctgatctttaaagaatcagcctccttaatggtgtag

SEQ ID NO: 183609 - DNA, 378 bp, synthetic construct
  misc_feature 1..378: note = Description of Artificial Sequence: Synthetic coding sequence
  source 1..378: mol_type = other DNA
atgggccccctgatggtgctgttctgcctgctgttcctgtaccccggtctggctgacagcgcgccaagctgtccccagaatgtcaatatctccggcggaacctttacactctctcatgggtgggcccctggaagcctactgacctatagctgtccccagggcctttacccttctcctgccagcaggctgtgcaaaagtagcggacaatggcagacccctggtgccacgcgaagtctcagcaaggctgtgtgcaagcctggccactgccccaaccctgggatatccctgggggcagtgaggactgggttccgcttcgggcacggggacaaggtgcggtatagatgctcgtctaacttggtgctgactgggtccagctag

SEQ ID NO: 183610 - DNA, 1863 bp, synthetic construct
  misc_feature 1..1863: note = Description of Artificial Sequence: Synthetic coding sequence
  source 1..1863: mol_type = other DNA
atgggccccctgatggtgctgttctgcctgctgttcctgtaccccgccggacactgccctaacccagggatttcgctgggcgccgtccgaactgggttccgctttgggcacggcgacaaagtgcgataccgttgcagttccaacctcgtactcacaggcagctcagagcgagaatgccaggggaatggcgtgtggtccggaacggagcctatttgcagacagccctatagctatgacttccctgaggacgtcgcgcctgccctcggcacatcattctcacacatgctaggggcaaccaaccctacccagaaaaccaaggagagcctgggacggaagattcagatccagaggtcagggcacctgaacctctacctgctgctggactgttctcagtccgtgtcagaaaatgacttcctgatctttaaggagtcagcgtctctgatggttgatcgcatcttttcttttgagataaatgtttcagtggctataattacctttgcctccgaacccaaagtcttgatgagcgttctgaacgacaattcgagagacatgaccgaggtcataagctctctcgaaaacgccaattataaggaccacgagaacgggaccggcactaatacctacgctgccctgaactcggtttacctgatgatgaacaatcagatgcggctgctggggatggagactatggcctggcaagaaatccgacacgccatcatcctcttgacggatggcaagtccaatatgggagggtctcccaagactgctgtcgaccacatccgcgaaatcctgaatatcaaccagaagcgtaacgattatttggacatctatgccatcggagtggggaagttagacgtggactggcgggagcttaacgagttgggatctaaaaaggacggcgagaggcacgcattcatcctgcaggacactaaagcactgcaccaagtctttgaacatatgctggacgtctccaagttaaccgatactatttgtggcgtcggaaacatgtctgctaacgcgagtgaccaggagcggacgccatggcatgtcaccatcaaaccaaaatcacaggaaacctgccggggagccctcatcagcgaccaatgggtcctcacggcagcccattgcttccgagacggcaatgaccattctctgtggcgtgttaacgtgggggaccccaagtctcagtgggggaaagagtttctgatcgaaaaggcagtcatctccccaggtttcgacgtttttgccaaaaaaaatcagggcatcctggaattttacggagacgatatcgctctccttaagcttgcacagaaggtaaagatgtctacacatgcccggcccatatgtctaccatgtaccatggaagctaacctggcactaaggaggccacaggggtcaacttgcagagatcacgagaacgaactcttgaacaaacagagtgttccggctcattttgtagccctgaacgggtcaaagctgaacattaatttaaagatgggtgtggaatggacatcttgtgcggaagtggtatcgcaggagaagactatgtttccaaacctgaccgacgtaagggaggtggtgactgatcagttcctgtgctccggcacacaggaggatgaaagtccctgcaaaggtgaaagcgggggagcagtgttcctagagcgccggttccggttctttcaggttggcctggtgtcttggggattgtacaacccttgtctcgggtccgcagataagaattcccggaagcgtgctccacgctccaaggttccccctcctcgtgacttccacattaacctgtttaggatgcagccgtggttaaggcagcacttgggcgacgtactcaactttctgcccctttag

SEQ ID NO: 183611 - DNA, 378 bp, synthetic construct
  misc_feature 1..378: note = Description of Artificial Sequence: Synthetic coding sequence
  source 1..378: mol_type = other DNA
atgggccccctgatggtgctgttctgcctgctgttcctgtaccccggcttggcggacagcgcaccatcttgcccacagaatgtgaatatctccggcggtaccttcaccttgagccacgggtgggcccccggcagtcttctcacctacagttgccctcaggggctgtacccctccccagcttctcgactctgcaaatcaagcggccagtggcagactccaggagcgacccggtcattgagcaaggccgtctgtaagcccggccattgtcccaatcctgggatatccttgggggctgtacggactggctttcgtttcggccacggcgataaagtccgttatcgatgtagctctaatctggtgctaacaggttcctcctag

SEQ ID NO: 183612 - DNA, 420 bp, synthetic construct
  misc_feature 1..420: note = Description of Artificial Sequence: Synthetic coding sequence
  source 1..420: mol_type = other DNA
atgggccccctgatggtgctgttctgcctgctgttcctgtaccccggccttgccgacagtgccccatcatgccctcagaacgtaaacatatcaggaggaactttcaccctctcccacggatgggcccccggctctctcttgacttattcctgtcctcagggattatatccctctccagctagccgcttgtgtaaatcatccggtcagtggcagactcccggcgccacaaggagcctgagtaaggccgtatgcaagcctgtccggtgtcctgcccctgtgtctttcgagaatggtatctacactcctcgactggggagctatccggtaggcggcaatgttagtttcgagtgcgaggacgggtttattctccgaggatcacctgtccgccagtgtagacctaacggcatgtgggatggttag

SEQ ID NO: 183613 - DNA, 378 bp, synthetic construct
  misc_feature 1..378: note = Description of Artificial Sequence: Synthetic coding sequence
  source 1..378: mol_type = other DNA
atgggccccctgatggtgctgttctgcctgctgttcctgtaccccggattggccgactctgcacctagctgcccgcagaatgtaaacattagcggaggcaccttcactctctcccacggatgggctcctggttcacttctgacttattcatgcccccaggggctgtacccctcgccagccagcaggctatgtaagtcatccggacaatggcagacccccggtgccacccggagtctgagcaaagcggtatgcaaaccgggacattgcccaaacccgggaataagcttaggtgcagtgaggaccgggtttcggtttggacacggcgacaaggtcagatatcggtgcagttctaatttggtgcttaccggcagcagttag

SEQ ID NO: 183614 - DNA, 2259 bp, synthetic construct
  misc_feature 1..2259: note = Description of Artificial Sequence: Synthetic coding sequence
  source 1..2259: mol_type = other DNA
atgggccccctgatggtgctgttctgcctgctgttcctgtaccccgggcttgcagactccgcaccatcatgtccacagaacgtgaatatttccgggggaacgtttacactgagccacggctgggcccccggtagtctgcttacctactcctgtcctcaagggttatacccctcacccgcatcgagactttgtaaatcctcaggacaatggcagacccctggggcgacccgcagtttatctaaagctgtatgtaaaccagtcaggtgccctgcaccagtctcattcgaaaatggtatttatacaccacgcctagggagttaccccgttggtggaaatgtgtccttcgagtgcgaggacggatttatcctgcggggcagccctgtgcggcagtgcagacctaacggcatgtgggacggagagacggcggtttgtgataatggagctggccattgcccaaatcctggcatctctctgggagccgtgagaacgggattcaggttcggtcatggggataaggtgagatacagatgttcttctaacctggtccttaccggatcatccgaacgtgagtgtcaaggcaatggcgtgtggagtggtaccgaaccaatatgccgtcagccttatagctatgacttcccggaagatgtggcaccagctctcgggacatcttttagccacatgttgggggccaccaacccgactcaaaaaaccaaagagagtctaggccgtaagatacagattcagcgttccggccatctgaatctgtacctcctgttggactgcagccagtcagtatccgagaacgacttcttgatttttaaagaaagcgcctccctaatggttgacagaatttttagctttgagatcaacgtgagtgtagcaatcattacctttgcatccgaaccaaaagttctcatgagtgtcctgaacgacaactcacgcgacatgacagaggtgatttctagccttgaaaacgcaaactacaaagatcacgagaacggcacgggaaccaacacgtacgccgccctgaactctgtttatctgatgatgaataatcaaatgagactcttgggaatggaaaccatggcatggcaggaaatcagacacgccataatcctgctgaccgatggaaaaagcaatatgggcggttcccctaaaaccgccgtcgatcacatacgtgagatcctcaatatcaatcagaaaagaaatgactacttagacatatacgccatcggggttggcaaattggatgttgactggagagaactcaatgaactgggttcaaaaaaggacggggagcgacacgcgttcatactgcaggataccaaggccctgcaccaggtgttcgaacacatgctggatgtgagcaaactgaccgatactatctgcggggtggggaatatgtccgcaaacgcatcggaccaggagaggacaccctggcacgtcacaatcaaacccaaaagccaggagacatgcagaggtgctctaattagcgatcagtgggtgctgaccgcagctcactgtttcagggacgggaatgatcatagcctctggcgcgttaatgtgggcgaccctaagagccagtggggaaaggaatttctcatagagaaagccgtgattagccccggctttgatgtttttgctaaaaagaatcaaggaatcctggaattttacggtgatgatatcgcactgcttaagttggctcagaaagtcaaaatgtccacacacgctcgaccgatttgtcttccatgcacgatggaggccaacctggcacttcggcggccccagggtagcacctgtagggatcacgagaatgagctgctgaataagcagtctgttccagcccactttgtggctctcaacgggtcgaaactgaatattaacctgaaaatgggggtggaatggacttcttgtgcagaggtggttagccaggaaaaaacaatgtttcccaatctgactgacgtaagagaagtggtgacagaccagtttctgtgttccggcacccaagaggatgaaagtccttgcaagggagaaagcggcggagctgtgtttctcgagaggcgcttccgattcttccaggtgggactggttagttggggtctttataatccttgcctcggctccgccgataaaaatagcaggaagagagcaccccgtagtaaagttccacccccgagggattttcatattaatctgttccgtatgcagccctggctacggcagcacctgggcgatgtattgaacttcttgcctctttag

SEQ ID NO: 183615 - DNA, 378 bp, synthetic construct
  misc_feature 1..378: note = Description of Artificial Sequence: Synthetic coding sequence
  source 1..378: mol_type = other DNA
atgggccccctgatggtgctgttctgcctgctgttcctgtaccccggattggccgacagcgctccctcctgccctcagaatgtgaatatttcgggaggtacattcacgttgtcccacggatgggcccccgggtcacttctaacatacagttgccctcagggcctgtatccctccccagcgtctaggctatgcaagtcctccggtcaatggcagaccccaggggccactcgaagcttgagcaaagctgtctgtaagcctgggcactgtccaaaccctgggattagcttgggcgctgtccggactggtttccgcttcggacatggcgataaggtcagataccgctgttctagcaacctcgtgctcaccggttcgtcttag

SEQ ID NO: 183616 - DNA, 510 bp, synthetic construct
  misc_feature 1..510: note = Description of Artificial Sequence: Synthetic coding sequence
  source 1..510: mol_type = other DNA
atgcgggccctgtgcatccgggagacctgcagcagcgagctgggctttagccggaattggtcccgtcggaaagcaggccattgtcctaatcccggcattagtctgggcgctgtccgtaccggttttcgatttggccatggtgacaaggtgagatatagatgttcatcaaatttggtcctcactgggagtagtgagcgtgagtgccagggaaatggtgtttggtccgggacagagcctatttgtcgccagccatactcctacgacttccccgaggatgtggcgcctgccctggggacctccttttcacatatgctcggcgctacgaaccccactcaaaagacaaaagatcacgagaatggaaccggaacaaatacctatgcagccctgaactccgtatacctcatgatgaacaaccaaatgcggttgcttggcatggaaacaatggcttggcaggagatcaggcacgctattattctgttaacagacgggaaaagcaacatggggggctag

SEQ ID NO: 183617 - DNA, 1578 bp, synthetic construct
  misc_feature 1..1578: note = Description of Artificial Sequence: Synthetic coding sequence
  source 1..1578: mol_type = other DNA
atggtgctgttctgcctgctgttcctgtaccccgccggccactgcccgaacccaggcatctccctcggtgctgtgcgcactggattcagattcggccacggagataaggtgcgatacagatgctcaagcaatcttgtgctgaccggcagtagcgagcgggaatgccagggaaacggcgtgtggagtggaactgaacccatatgccggcagccttactcctatgatttccccgaggacgtggcccccgctcttggcacctcattttcccatatgctgggtgccacaaaccctacccaaaagaccaaggatcacgagaacgggaccggcacaaatacatacgctgcactaaattctgtgtatctgatgatgaataatcagatgcggctactgggaatggagactatggcatggcaggagattaggcatgccatcatcctgcttacagacggaaaatcaaacatggggggtagcccaaagacagctgtcgaccatattagggagattctgaacatcaaccagaagcggaatgattacctggacatatatgccatcggggtggggaagttggatgtcgattggagggagctcaatgaattgggatctaagaaggacggggaaagacacgccttcattctccaggataccaaggcactgcaccaagtcttcgagcatatgctagacgtgtcaaagctgacagacacaatttgtggcgtgggcaacatgtccgcaaatgctagtgatcaggaaagaaccccatggcacgtgacaatcaagccaaagtcccaggaaacttgtcgcggagctctgatttctgatcaatgggtgctgactgcagctcactgctttcgggacggcaacgatcactccctgtggcgtgtgaatgtgggcgatccgaaaagtcagtggggaaaggagtttttaatcgaaaaagctgtcatcagtcctggcttcgacgtgttcgctaaaaagaatcaggggatcctggagttttacggcgatgatattgcattgcttaagctggcacaaaaagtgaagatgagtactcacgcgcgccctatctgtctgccatgtactatggaggccaaccttgcactgcgtaggccacaggggtctacgtgtcgcgatcacgagaatgaacttttgaataaacagagcgtccccgcgcactttgtggccctcaatgggtctaaactgaacattaatctgaaaatgggggtagagtggacttcctgtgccgaagtcgtaagtcaagagaagactatgttcccgaatcttacagatgtgcgagaggttgtcacagatcagtttctgtgctcgggcacccaggaggatgagtcgccctgcaagggagaatctgggggagcagtgtttctggagcgccggttcagattcttccaggtcggcctggtctcctggggattgtataatccttgcttgggatccgccgacaaaaactccagaaaaagggctcccaggagcaaagttccccccccaagagatttccatatcaatctcttcagaatgcagccttggctgcgtcagcacttgggggacgtgctcaactttctccccctgtag

SEQ ID NO: 183618 - DNA, 438 bp, synthetic construct
  misc_feature 1..438: note = Description of Artificial Sequence: Synthetic coding sequence
  source 1..438: mol_type = other DNA
tgaggccactgccccaaccccggcatcagcctgggcgccgtgcggaccggatttcgcttcggacatggcgataaggtgcgctaccggtgctctagcaacctggtcctgacagggagttctgagcgagaatgccagggaaacggagtgtggtcgggaactgaaccaatctgcagacaaccctattcatatgattttcccgaagacgtcgctccagccctggggacctctttctcacatatgctgggcgcaaccaatcctacgcaaaaaacgaaggaccacgagaacggcactggaactaatacgtacgccgccctgaattccgtgtacctcatgatgaacaatcagatgagactgttaggaatggagactatggcgtggcaggagataaggcatgctattattctcctgaccgacgggaagagcaatatggggggttag

SEQ ID NO: 183619 - DNA, 405 bp, synthetic construct
  misc_feature 1..405: note = Description of Artificial Sequence: Synthetic coding sequence
  source 1..405: mol_type = other DNA
tgaggccactgccccaaccccggcatcagcctgggcgccgtgcggaccggattcagattcggacacggagacaaggttcgctatcgatgtagcagcaatctcgtcctgaccggcagctcagaacgcgagtgccagggcaacggggtttggtccggaaccgaacctatttgccggcagccgtactcctatgactttcctgaggacgtggccccggccttgggtacatctttctcacacatgctcggcgccaccaaccctacacaaaaaactaaagagtcactgggtagaaagattcagatccagcgatccgggcatctgaacctgtacctgctgttggactgtagccagtccgtttccgaaaacgatttcttaattttcaaagaatccgcctcattaatggtctag

SEQ ID NO: 183620 - DNA, 420 bp, synthetic construct
  misc_feature 1..420: note = Description of Artificial Sequence: Synthetic coding sequence
  source 1..420: mol_type = other DNA
atgggccccctgatggtgctgttctgcctgctgttcctgtaccccggtttagccgactcagcccccagttgcccgcaaaatgtgaacataagtggcggcacctttaccctctctcatggctgggcacccggtagtttgctcacctactcctgcccacaggggttatatccttcaccagcttcgaggctgtgcaaatcgtctggacaatggcagactcccggagctactcgctctctcagcaaggcagtgtgtaagccagtgcgttgccccgcaccggtgagtttcgaaaacggaatttatacccctcgtctcggaagctaccccgtgggaggcaacgtcagcttcgagtgtgaagacggcttcatcctgagagggagtcccgtgagacagtgcaggccaaatggtatgtgggatggctag

SEQ ID NO: 183621 - DNA, 420 bp, synthetic construct
  misc_feature 1..420: note = Description of Artificial Sequence: Synthetic coding sequence
  source 1..420: mol_type = other DNA
atgggccccctgatggtgctgttctgcctgctgttcctgtaccccggcttggccgactccgctccttcttgccctcagaacgtgaacatcagtggcggcacgtttacactgtcccatggatgggcccctggcagcctccttacatactcttgtccccagggactctacccaagccccgcctcccgcctatgtaagtcctctggacagtggcagacccctggtgccaccagaagtttgtcaaaggctgtgtgcaagccagtgcggtgcccggccccagtctcattcgagaatggcatttacacccctcgactcggctcctaccctgtcggggggaatgtcagttttgagtgtgaggacggtttcatactacgtggaagccccgtgaggcaatgtcgtcctaatgggatgtgggacggatag

SEQ ID NO: 183622 - DNA, 1617 bp, synthetic construct
  misc_feature 1..1617: note = Description of Artificial Sequence: Synthetic coding sequence
  source 1..1617: mol_type = other DNA
atgcgggccctgtgcatccgggagacctgcagcagcgagctgggcttttctcgcaattggtcaagacgcaaggcaggccactgccccaatcccgggatttccctgggcgctgttcggaccggctttagattcggccatggagataaagtgcgttatcgatgcagctcaaacttggttctcactggaagcagcgagcgcgaatgtcagggaaatggcgtgtggagcggcacagagccaatctgtcggcaaccatactcctacgacttcccagaggatgttgctcccgccttgggcacctctttcagccacatgctcggagcgacaaaccctactcagaaaacaaaggaccatgagaacggcacaggcaccaatacatatgcggctctcaacagcgtctatctgatgatgaacaaccaaatgcggctcctcggcatggaaaccatggcatggcaggaaatcaggcatgctatcatcctcctcaccgacgggaaatccaatatgggaggcagcccaaaaacagcggttgatcatattcgggagatcctgaacattaaccagaaaaggaatgattacctggacatttatgcaatcggcgtggggaagctggacgtagactggagagagcttaacgagctgggcagcaagaaggacggagaacgtcacgcctttattttgcaggacaccaaagcccttcatcaggtattcgaacacatgctagatgttagtaagcttaccgatacaatatgtggagtagggaatatgtccgccaacgcaagtgaccaggagaggacaccttggcatgtgacgattaagcccaaaagccaggagacctgtcggggggcattgatctctgatcagtgggtcctgacagctgctcattgtttcagagacgggaatgaccacagcctgtggcgcgtaaatgtcggcgaccctaaaagtcagtgggggaaggaatttctaattgagaaggccgtgattagccccggttttgacgtatttgctaaaaagaatcaaggaatcttggagttttatggagatgacattgccttgctaaaacttgctcaaaaggtgaagatgagtacccatgcccggccaatttgcctgccttgcacaatggaagccaacctcgccctccggcgcccacagggttcaacttgcagggaccacgaaaacgaattactgaataaacagtccgttcctgcacattttgtggcactaaacggctcgaagctgaatattaacctcaagatgggtgtggagtggacttcatgtgcagaagtggtgtctcaggagaagacgatgttcccaaatcttaccgacgtgcgggaggtggtgacggaccagtttctctgtagcggtacacaggaagatgagtcaccgtgtaaaggtgagagcgggggagccgtcttcctggaaagacgcttcagattctttcaggtggggcttgtttcctggggcctctacaacccctgcctgggaagtgccgacaagaacagcaggaaaagagcccccaggagtaaagtgcctccaccaagggatttccatattaatctgttcagaatgcagccatggctgcggcaacacctcggcgatgttctgaattttctgcccctgtag

SEQ ID NO: 183623 - DNA, 1521 bp, synthetic construct
  misc_feature 1..1521: note = Description of Artificial Sequence: Synthetic coding sequence
  source 1..1521: mol_type = other DNA
atgggcacccggagcgccatcgccgccccccggatcctgtgcagccgaggcttgcgatctggatcagctcgcgccacagggagcggcgtcgaacggagcccatccgctgccatcttttcattcgaaatcaatgtgagcgtggctatcataacgtttgctagtgagcccaaggtgctcatgagcgtgctcaatgacaatagcagggacatgacagaggtgatatcatctctagagaacgctaactacaaagatcacgaaaacggaactggcaccaacacgtatgcggctctgaactccgtgtacctaatgatgaataatcagatgagactgttgggaatggagaccatggcatggcaggaaatcagacacgccattatcttattgacagacggcaaaagtaacatgggggggagcccaaagactgccgtggaccacatccgagaaatcttgaacattaaccagaaacgaaacgattatcttgacatctacgcaatcggagtgggcaaactggacgtggattggcgcgaacttaacgaactggggtctaaaaaggacggagaacggcatgcctttatcctacaagacacgaaagctctacaccaagtctttgagcatatgctggatgtatcaaagctcaccgatacaatatgtggcgtaggaaacatgtccgcaaacgcctccgatcaggagagaacgccttggcatgtgacaattaagcccaagtcccaagagacctgtcgaggagctctgattagcgatcaatgggttttgacagccgcccattgcttcagggacggaaatgatcactctctctggagggtgaacgttggggacccgaaatcacagtggggaaaagagttcctaattgagaaggctgttatctcgccaggctttgacgtgttcgcaaaaaaaaaccaaggtatcttggaattctatggggacgacatcgcccttttgaaactggcacagaaagttaagatgtccactcacgccagacctatttgtcttccttgcaccatggaagccaacctcgcacttcgtcgtccacagggctcaacctgtagagaccacgagaacgaacttctgaacaaacagtctgtaccagcccactttgtggccctcaatggttccaaactgaacataaatttgaagatgggggtcgaatggacctcctgtgccgaagtagtctcccaggagaaaaccatgttccctaacctgaccgacgtgcgggaggtcgtgactgaccagttcctctgcagcggcacgcaagaggacgagagtccctgtaagggtgagtcaggtggcgctgtctttctcgagagacgctttcgattcttccaggtgggacttgtgtcttggggcctatataatccatgtcttggcagtgctgacaagaactcacgtaagagagccccaagaagcaaggtgccccccccccgggattttcatatcaacctctttcgcatgcagccttggctgagacagcacctgggtgacgttcttaatttcctccctctctag

SEQ ID NO: 183624 - DNA, 1521 bp, synthetic construct
  misc_feature 1..1521: note = Description of Artificial Sequence: Synthetic coding sequence
  source 1..1521: mol_type = other DNA
atgggcacccggagcgccatcgccgccccccggatcctgtgcagccgaggtttgagaagcggctccgccagggctactggttcaggcgtggaacgatccccgtcagccgctatattcagctttgaaatcaacgtgagtgtggccataattacattcgccagtgagccaaaagttctgatgagcgtcttgaatgacaactccagggatatgactgaggttatctctagcttggaaaatgccaactacaaggatcacgagaatggtacaggaacaaacacgtatgcagccctgaactcagtctacctcatgatgaacaaccaaatgcggctgctggggatggagaccatggcatggcaagagatccggcacgccattatactcctgaccgacggcaagtctaacatgggcggatctcctaaaaccgccgtggaccatatcagagagatacttaacatcaaccagaaaaggaatgactatctcgacatttacgcaatcggcgtgggcaaattggacgtggactggcgggaactgaatgaactgggtagcaaaaaagatggcgagaggcacgctttcatattacaggataccaaggccctgcaccaggtcttcgagcacatgctcgatgtgagtaagttaactgatacaatatgcggcgtgggaaatatgtccgcgaatgcaagcgaccaggagagaacgccgtggcacgtgacaattaagccaaagagccaagagacgtgtagaggggcattgatcagtgaccagtgggtccttactgccgcccattgcttccgtgatgggaacgatcattccctttggcgagtgaatgtaggggatccaaagtctcagtggggtaaagaattcctcatcgagaaggcagtgatctcacctggctttgacgtctttgccaaaaagaatcagggtattctcgaattctacggagatgatatcgccctgctgaagcttgcccagaaggtgaaaatgtctacccatgccaggcctatctgtctaccttgcacgatggaggccaacctggccctgcggaggccacagggttctacgtgcagggatcatgaaaacgagctcctgaataaacaaagtgtacctgcccatttcgttgcacttaacgggagtaagctgaatataaatctgaagatgggtgtggagtggacttcctgtgcagaagtagtctctcaggagaaaaccatgttcccgaatttgacagacgtgcgagaggtagtcactgaccagttcctctgtagcggcacccaagaagatgagtcgccctgcaaaggggagtccgggggcgcagtctttttagagcgccggtttaggttcttccaagtgggactggtctcctggggactgtataatccttgtttgggaagtgccgacaagaacagcagaaagagagcacctcggagcaaagtaccgcccccccgagactttcacattaacctgttccgtatgcagccctggctacggcagcatctgggcgatgtactcaattttctgcccctgtag

SEQ ID NO: 183625 - DNA, 1521 bp, synthetic construct
  misc_feature 1..1521: note = Description of Artificial Sequence: Synthetic coding sequence
  source 1..1521: mol_type = other DNA
atgggcacccggagcgccatcgccgccccccggatcctgtgcagccggggtctgcggagtggctccgctcgagccaccggttcaggcgttgagcgaagtcccagcgccgccatttttagttttgagattaacgtgtctgtggcaatcatcaccttcgcgtccgagccaaaagtactaatgagcgtgcttaacgacaactctagagacatgaccgaagtgatcagttccctggagaatgccaattacaaggaccatgagaatggcaccggaacaaacacttatgcagccctgaactccgtatatctcatgatgaataaccaaatgcggttactgggcatggaaacaatggcgtggcaggaaatccgccatgctataatcctgctgactgatggtaagagcaacatgggcggttctccaaagacggctgtggaccacatccgagagatcctcaatatcaatcagaagcgcaacgactatctcgacatttatgctatcggcgtcggaaagcttgatgtggattggagagaacttaacgaacttgggagcaagaaggatggggagaggcacgccttcatcctccaggacactaaggcgctgcaccaggtgttcgagcatatgctggacgtctccaaactgactgatacaatctgcggggtcggcaatatgtcagccaatgcttctgatcaggagagaaccccctggcacgtgaccattaaacccaagtctcaggagacttgtaggggggcgctaattagcgaccagtgggtcctcaccgccgcacactgttttcgtgacgggaacgaccatagtttgtggcgggtgaacgtgggcgaccctaagagtcaatggggtaaggagtttctgatcgagaaagccgttatctcaccgggcttcgacgtcttcgcaaaaaaaaaccaaggaatcctagaattctacggtgacgacatcgcattactcaagttggcccaaaaggtgaaaatgtccactcatgcgcgccccatttgcctgccatgtacaatggaggctaatctcgcactgcgccggccacaggggagtacatgccgagaccatgagaacgaactcctgaataagcagagcgtcccggcccacttcgtggcattaaatggatctaagctcaacatcaatctgaagatgggagtggagtggacctcctgcgctgaagttgtgtcgcaggagaaaaccatgtttcccaatctcactgacgtgcgcgaggtagtgaccgatcagtttctatgcagcggcacccaggaagacgagagcccttgcaagggtgaatccgggggtgcagtctttctggagcgacggttccggttctttcaggtggggttggtctcctggggtctgtacaatccatgcttgggatcagccgacaagaattcccggaagagggctcctaggagcaaggtcccgccccctcgagattttcacatcaacctatttagaatgcaaccatggctaagacaacatctgggagatgtgctgaatttcctaccactctag

SEQ ID NO: 183626 - DNA, 1134 bp, synthetic construct
  misc_feature 1..1134: note = Description of Artificial Sequence: Synthetic coding sequence
  source 1..1134: mol_type = other DNA
atgaccgaggtgatcagcagcctggagaacgccaactacaaggaccacgagaatgggaccggaaccaatacctatgccgcattgaattcagtatatctgatgatgaacaaccagatgagattactcgggatggaaacaatggcctggcaggagatccgccatgctattatcttactgaccgatgggaaaagcaatatgggaggatcacccaaaaccgccgtcgaccacatacgtgaaatcctgaatatcaaccagaagcgcaatgattatctagatatttacgccattggggtgggaaaattagatgtggactggagggagctgaacgagctgggatcaaagaaagatggcgagagacacgccttcattctgcaggacaccaaggcattgcatcaagtattcgaacatatgttggacgtcagtaagctaacggacaccatctgcggagtgggaaacatgtccgcgaatgcctccgatcaagagagaaccccctggcacgtgacaatcaaacctaaatcccaagagacctgtaggggcgcccttatttcagatcagtgggtcctgaccgctgctcattgcttccgggacggcaatgatcattccctttggcgtgttaacgtcggagaccctaaatcccaatggggaaaggaattcctcatcgagaaggctgttatttcccctggcttcgacgtgttcgctaagaaaaaccaagggattctggagttctacggtgacgatatcgctctgctgaagctggcccaaaaggtaaagatgtccacccatgccagaccaatctgtctgccatgcacaatggaggctaatctggcactgaggcggccccagggctccacatgcagggaccacgaaaacgagttactcaacaagcagtcagtgccagcccacttcgttgcactcaatggttctaaattgaacattaacctcaaaatgggagtagagtggaccagttgtgctgaggtggtaagtcaggagaagacaatgtttcccaatcttacggacgtccgcgaggtggttacagatcagtttttgtgttctggcacacaggaagatgagtcaccttgtaagggaggcagtggtgagttggggagcttacaaccactgccctggctgtgttag

SEQ ID NO: 183627 - DNA, 978 bp, synthetic construct
  misc_feature 1..978: note = Description of Artificial Sequence: Synthetic coding sequence
  source 1..978: mol_type = other DNA
atgggcacccggagcgccatcgccgccccccggatcctgtgcagccgcggcctgcgcagcggatctgctagggcgactggctcaggagtggagcgcagtcccagcgcagccaatcccacactgatgacctctctacgcacgtggcccctaccctgggctctccccagtccaacgtgcctaggcccccctatcccaccaaggagacagcgtatcttttctttcgagattaatgtaagtgtcgccattattacattcgctagcgagccaaaagttctcatgagcgtattaaacgataattctcgagatatgaccgaggtgatcagctccctggagaacgccaattataaagatcacgaaaatggaactggtaccaacacatatgccgccctgaacagcgtgtacctgatgatgaataaccagatgcggttactcggcatggaaaccatggcctggcaggagataagacacgccattattctgctgactgacggaaaatctaacatgggaggatcacccaagacggccgtggatcatattagagagatcttgaatataaatcagaagagaaatgactatctggatatttacgcgatcggcgtgggcaaactggatgtggattggagggagctgaacgagctaggcagcaaaaaagacggggagcgtcacgctttcatactacaggacactaaggccctgcatcaggtctttgagcacatgctggacgtgagtaagctaaccgatacaatctgtggtgttgggaatatgagcgctaatgcgagtgaccaggaacggaccccatggcacgttaccattaagcccaagagtcaagagacctgccggggcgccctgatcagcgaccagtgggtgttgacagcggcccactgttttagggatgggaatgaccactccctatggagggtgaacgtcggtgacccaaaatctcagtggggtaaggagttcttgatagaaaaggcatag

SEQ ID NO: 183628 - DNA, 1521 bp, synthetic construct
  misc_feature 1..1521: note = Description of Artificial Sequence: Synthetic coding sequence
  source 1..1521: mol_type = other DNA
atgggcacccggagcgccatcgccgccccccggatcctgtgcagccgtggcctgaggagcggatctgcccgcgcaaccggtagtggagtggaaaggtccccaagcgcagccatcttctcctttgagatcaacgtctctgtggccattattacctttgctagcgaacccaaggtcctgatgtctgttttgaacgataactcccgcgacatgacggaagttatcagttctctagagaacgccaactacaaggatcatgagaatggtactggaaccaacacttatgcagcattaaattcagtgtacctgatgatgaataaccagatgagattgctggggatggagacaatggcctggcaggaaattcggcacgcaattatcttactgaccgacggcaaatccaatatggggggatctcctaaaacagccgtggatcacatacgcgagatccttaacatcaatcagaagcgaaatgactatctggacatttatgccataggcgtgggcaaactcgatgttgactggagagagctgaacgagctgggaagcaaaaaagatggagaaagacacgcttttatactccaggacacaaaggccctccaccaggttttcgaacacatgctggacgtatctaaacttacggataccatctgcggggtgggaaacatgtctgcgaatgcgtctgatcaggagcgaacaccctggcacgtgacaataaaacccaagtcccaggagacttgtcgtggggctcttatatccgatcaatgggtgctgactgccgcgcattgtttcagagatggcaacgaccatagcctttggcgggtcaatgtgggggacccaaaatcccagtggggcaaagagttcctgattgagaaagccgtgatttcaccagggtttgatgtgtttgcaaagaagaatcaggggatcttagagttttatggcgacgacatcgcgcttctgaaactggcacagaaagtgaaaatgtccacccacgcaaggcccatatgtttgccttgtacaatggaggctaatcttgccctgagaaggccccaggggtccacatgccgggaccacgagaatgaactcttgaataagcagtcagtgccggcccattttgtggcactgaatggatccaagttaaacatcaatttgaaaatgggagtagagtggaccagctgtgccgaggtggtgagccaggagaagaccatgtttcccaacctgacagatgtgcgagaagtggtcacagaccagtttttatgcagcgggacgcaggaggatgagtctccgtgcaaaggcgagtccggaggggcggtgtttcttgagcgaaggtttagattttttcaggttgggctggtgtcttggggcctatacaacccatgtcttgggagtgcagataaaaattcacgaaagcgagcccccaggagtaaagtgccaccaccaagagattttcacattaatctgttcagaatgcaaccgtggctaaggcagcacctcggagatgtgctgaacttcctgccactgtag

SEQ ID NO: 183629 - DNA, 1521 bp, synthetic construct
  misc_feature 1..1521: note = Description of Artificial Sequence: Synthetic coding sequence
  source 1..1521: mol_type = other DNA
atgggcacccggagcgccatcgccgccccccggatcctgtgcagccgcggcctccgaagtggatcagcccgggccacagggtccggagttgaacgcagtccaagcgccgcaattttcagcttcgaaataaatgtctcagtggccattattaccttcgctagcgagcctaaggtgctgatgagtgtcctgaacgacaattctagagacatgaccgaagtgatcagttctctagaaaatgccaactataaggaccatgagaacggcaccggaacgaatacctatgcagcattgaatagcgtgtatctgatgatgaacaatcaaatgagacttctcggcatggagactatggcctggcaggagattaggcatgcgatcattcttctgacagacggcaaatctaacatgggtggttcccctaagacagcagtggaccacatccgcgaaatcctgaacatcaaccagaaacgtaacgactatctggacatctatgccatcggtgtggggaagctggatgtcgattggagagagcttaacgaactaggttcaaaaaaagacggtgagaggcacgcatttattctgcaggacaccaaggcattgcatcaggttttcgagcacatgctggacgttagcaagttgaccgatactatctgtggcgtgggcaacatgtccgcaaacgcctctgaccaagagagaaccccttggcacgtcactattaagcccaagagccaagaaacatgcaggggcgctctgatctccgatcagtgggttttgaccgcagcccattgctttagagacggcaacgaccatagcctatggcgtgtcaacgttggcgaccctaagagccagtggggaaaggaatttcttatcgaaaaggctgtcatttcccctgggttcgacgtcttcgccaagaagaatcaggggattttggagttctacggcgacgacatcgccttactgaagctagcccagaaggttaagatgtccacacacgctcgccccatttgcctgccttgcacgatggaagcaaatctggcgttacgtaggccccaaggaagtacctgcagagatcacgagaacgaactactgaataagcagtctgtacctgctcacttcgttgcgttgaatggctcaaaattaaacatcaacctgaagatgggcgtggagtggactagctgtgccgaagttgtatcacaggagaagacgatgttccctaacctcaccgatgtgcgcgaggtggtcacagatcagttcctatgttctggtacccaggaagatgagagtccatgtaaaggggagagcggtggggctgtgtttctcgaacggagatttagatttttccaagtaggcctggtgagctggggcctctacaacccatgtcttggatctgccgataagaacagccgcaagagagcaccaaggtcaaaggtgccacccccccgcgatttccatattaatcttttccgcatgcagccctggttgcgtcagcaccttggggacgtgttaaattttcttcccctgtag

SEQ ID NO: 183630 - DNA, 1617 bp, synthetic construct
  misc_feature 1..1617: note = Description of Artificial Sequence: Synthetic coding sequence
  source 1..1617: mol_type = other DNA
atgcgggccctgtgcatccgggagacctgcagcagcgagctgggcttttctcggaactggagccgcaggaaggccgggcactgtcctaatcccggcatttctctgggtgccgtgcgcacgggtttccgattcggacacggtgacaaagtccgataccgctgtagctctaacctggttcttacgggctccagcgagagagagtgccaaggcaacggggtgtggagcggcactgagccaatttgtcggcagccttatagttatgatttcccagaagatgtcgcacccgcactgggcacgtctttcagccacatgctgggcgccaccaatcccacccagaaaactaaagaccacgagaatgggacagggactaatacgtacgcagcgcttaacagtgtttacctaatgatgaacaaccagatgcggctgttaggaatggaaaccatggcgtggcaggaaatacgtcatgctatcattttactgactgacgggaaaagcaacatgggtgggagtcctaagaccgctgtggaccatatccgggagatcctgaacatcaaccagaagcgaaacgactatctggatatttatgccatcggagtagggaaactggacgtagattggagagaactgaacgaactagggtctaaaaaggacggcgaaagacatgcttttatattgcaggacactaaagcattgcaccaggttttcgagcacatgctggatgtgagtaaactgacagacaccatctgtggtgtcgggaatatgtctgccaatgctagcgaccaggaacgcactccatggcacgtgaccatcaagcctaaatcacaggaaacttgcaggggagctcttatctccgatcagtgggtactcacagcggctcattgtttccgagacgggaatgatcacagcttgtggcgtgtcaacgtcggcgaccctaaatcccagtgggggaaggaatttctgatcgaaaaagcggtgatctcaccagggtttgatgtgtttgctaagaagaatcaaggaattctggaattctacggcgacgatattgccctcttgaaacttgcccagaaggtcaagatgagtacacacgcgagaccaatctgcctgccatgtacaatggaagccaacctcgccctgcgacggccacagggtagtacctgccgtgaccatgagaatgagttgctgaacaagcagtccgtccctgcccactttgtggccctgaatggctctaagctgaatataaatctgaaaatgggcgttgagtggacgagttgtgctgaagtggtctcacaggagaagacgatgtttcctaacctcacagacgtgcgagaggttgtgaccgatcaattcctttgcagcggcacccaggaagatgagtctccttgtaagggggagtccggaggggccgtctttctcgaacgcagatttaggtttttccaggtcgggctagtctcctggggcctgtataacccttgtctggggtccgcagacaagaactcacgaaagagggccccccgcagtaaagttccccccccacgcgactttcatataaacctgttccgcatgcagccctggctgagacagcatctgggggatgtcctgaattttctacctctctag

SEQ ID NO: 183631 - DNA, 1134 bp, synthetic construct
  misc_feature 1..1134: note = Description of Artificial Sequence: Synthetic coding sequence
  source 1..1134: mol_type = other DNA
atgaccgaggtgatcagcagcctggagaacgccaactacaaggaccacgagaatggcactggcaccaacacttacgctgccctgaatagtgtgtatctgatgatgaacaatcagatgcggctgctcggcatggaaacgatggcctggcaggaaatccggcatgccatcatccttctgactgacgggaagagcaacatgggcggctcccccaaaactgccgtcgatcatatcagggaaatactcaacatcaaccagaagagaaatgattacctggacatctatgcaataggcgtgggaaaacttgacgtagactggcgggagctgaatgagctcggatcgaagaaggacggagaaagacatgcattcatcctacaggacacaaaggccctgcaccaggtgtttgagcatatgcttgatgtctccaagctgaccgataccatctgcggcgttggcaatatgtcggctaatgctagcgaccaggaacggactccgtggcacgtgaccatcaagccgaagtcccaagagacatgtcggggggccctgatttccgatcagtgggttctcaccgccgcccactgctttcgcgatggaaacgaccacagcctttggagagtgaacgtgggagaccccaagtcccaatggggcaaggagtttctgatcgagaaggcagtgatctctccgggcttcgatgtgtttgctaaaaagaaccaagggatcctcgagttctatggcgatgatatcgccttgctgaagctggcccagaaagtcaaaatgtccacacatgcaaggcccatttgcttgccatgtacgatggaagcaaatctcgccttgcgccgccctcagggctcgacctgtcgggatcacgagaatgaactcctcaacaagcagtcggtgcctgctcatttcgtagcactgaacggctcgaagttgaacatcaacctgaagatgggagtggaatggacttcatgtgccgaagtcgtcagccaggaaaagactatgttccctaacctgactgatgtgagagaggtagtgacagatcagttcctttgctctggtacacaggaggatgagtctccctgcaagggcggatctggtgagctcggatctttgcagcctctgccttggctttgctag

SEQ ID NO: 183632 - DNA, 1863 bp, synthetic construct
  misc_feature 1..1863: note = Description of Artificial Sequence: Synthetic coding sequence
  source 1..1863: mol_type = other DNA
atgggccccctgatggtgctgttctgcctgctgttcctgtaccccgccggacactgcccaaaccccgggatatcgctaggggctgtgagaactgggtttcgctttggccacggcgataaagtccgctacagatgcagctctaaccttgttctcacaggatcatccgagcgcgaatgccagggaaacggggtgtggagcggaacagagccgatctgcagacagccatacagctacgactttcctgaagatgtggctccagcgctggggacctcattctcccacatgctgggtgcgacgaatcctacgcaaaagacaaaggagtctctcggcaggaaaattcaaatccagaggagcggtcacctgaatctctatctgcttttggactgttcacagtctgttagtgagaatgactttttgatattcaaggagtctgcctccttaatggttgaccgaatcttctcctttgagatcaatgtgtcagtggccatcattacgttcgccagtgagcccaaagtactcatgtccgtgctgaacgacaactcgagggacatgaccgaagtcatctccagtttggagaatgctaactacaaagaccatgagaacgggacaggaactaatacctatgcagctctgaacagcgtgtacctgatgatgaacaaccaaatgaggcttcttggcatggagacaatggcgtggcaggagattaggcatgccatcatcctactaacagacggcaagtctaatatggggggatcacctaagactgccgtagatcacatccgtgaaatcctcaacattaaccagaagcgtaacgactatctggatatctatgctatcggcgttggcaagttagacgtggattggcgggagcttaatgaactgggatctaagaaagatggcgagaggcacgccttcattcttcaagatactaaggccctgcatcaggtgttcgaacacatgctggacgtgtcaaagttgactgatacgatctgtggggtaggcaatatgtcggccaatgcctccgatcaggagaggaccccatggcatgtgacaattaagccgaaatcccaggaaacatgccgcggcgccctgattagtgaccagtgggtcttgacagccgcccactgctttagagatggaaacgaccattccctatggcgggtgaacgtgggggatcctaaatcacagtgggggaaggaattcctgatcgagaaggccgttatctctcctgggttcgatgtttttgccaagaaaaatcagggcattctggagttctacggagacgacattgcactcttgaaactggcccagaaggtgaagatgagtacccacgccaggcccatttgcctgccatgcactatggaggcaaacctggccctgagaagacctcagggatcgacttgccgagaccatgaaaacgaactgctcaacaaacagagcgtacccgcacactttgtcgccctcaacggttctaaactgaacatcaatcttaagatgggcgtagaatggacctcatgcgctgaagtagtgtcccaggaaaaaacgatgttcccaaatcttactgacgtgagggaggtcgtgaccgaccaatttctgtgctcaggaactcaggaagacgagtcaccatgcaagggagaatcgggtggtgctgtgtttctggaacgcagatttcgtttcttccaagtgggactggtgtcgtgggggctttacaatccctgtctgggtagcgccgacaaaaactctcggaaacgcgccccacgctctaaggtgccccctcctcgagactttcatattaacctgttccggatgcagccctggctccgccagcacctgggggatgttctcaactttctccccttgtag

SEQ ID NO: 183633 - DNA, 1863 bp, synthetic construct
  misc_feature 1..1863: note = Description of Artificial Sequence: Synthetic coding sequence
  source 1..1863: mol_type = other DNA
atgggccccctgatggtgctgttctgcctgctgttcctgtaccccgctggccactgccctaatccggggatttctttaggggccgtaagaactggatttcgtttcggacatggcgataaagtgcgctatagatgctcgagtaatttggtgttgaccggaagtagtgagagagagtgtcagggcaacggcgtctggtcagggacggagcctatctgccgccagccttattcctacgacttcccggaagatgttgcccccgccctgggcacgtcattttcccatatgctgggagcaaccaatccaacccagaaaaccaaggagagcctcggcaggaaaatccagatccagaggagtgggcacctcaacctctacctactcctcgactgctcccaaagcgtgtccgagaatgatttcttgatatttaaggagagcgctagtctgatggtggaccgaatcttctcattcgaaatcaatgtgtccgttgccattatcacatttgcgtccgaaccgaaggttctgatgtctgtgctgaatgacaactcccgagatatgactgaggtaattagctcactcgaaaacgccaactacaaggaccatgagaatggcactggaaccaacacgtacgctgctctgaatagcgtgtacctgatgatgaataatcagatgcgcttgttgggtatggagaccatggcctggcaggaaattcgccacgctatcattcttctgactgacggaaaatcaaacatggggggcagcccaaaaacggctgtggatcatattcgcgagatcttaaatattaaccagaagagaaatgactatctcgacatatatgccattggcgtcggcaagctggacgtggattggcgggaattgaatgagctgggtagcaaaaaggacggtgagcggcatgcctttattctgcaggatacaaaagcgctacaccaggtattcgagcacatgctggacgtgagcaagttaacagataccatctgtggcgtcggcaatatgagtgctaacgctagcgaccaggaaagaactccttggcacgttaccattaaacccaaatcccaggagacctgtcgcggggccctaatttctgatcagtgggtgttaacagcagcccactgttttcgtgacggcaacgaccattcactatggagagtcaacgtgggtgatccaaaatcacagtggggcaaagagtttctgattgagaaagctgtgatatcaccgggattcgacgtgtttgcaaaaaaaaatcaggggattctggagttctatggcgatgacatcgcgctcctcaagctcgctcagaaagttaagatgtcaacgcacgccaggcccatttgtcttccttgcacaatggaggccaaccttgccctgcgaagaccccagggttccacctgccgggatcacgaaaatgagctactaaacaaacaaagcgtaccagctcatttcgtcgccttaaacggctctaaattgaacattaacctgaaaatgggcgttgagtggaccagctgtgctgaagtagtgtcgcaagaaaagaccatgtttcccaatctgactgacgtgagagaagtggtgacagatcaatttttgtgctctggcacacaggaagacgagtcgccatgcaagggcgaaagtgggggcgccgttttcctcgagcgccgatttagattttttcaggtgggcctggtgtcttggggtctctataatccatgtctaggcagcgctgataagaacagcagaaaaagggctccgagaagtaaggtgcccccaccccgggactttcacatcaacctgtttcgcatgcagccatggctccgccagcatctgggcgacgtactcaacttcctgccattgtag

SEQ ID NO: 183634 - DNA, 978 bp, synthetic construct
  misc_feature 1..978: note = Description of Artificial Sequence: Synthetic coding sequence
  source 1..978: mol_type = other DNA
atgggcacccggagcgccatcgccgccccccggatcctgtgcagcaggggcttacggtccggctccgcaagagcgaccggtagcggggtggagcgcagccccagcgccgccaaccccacccttatgacaagcctgcgcacatggcctcttccctgggcactacccagccccacctgcctggggccccccatccccccgagaaggcaacgcattttttccttcgagatcaatgtgagcgtcgccatcatcacattcgcctctgaacctaaagtgctgatgagcgtgctgaatgacaattcgcgagacatgaccgaggttatttctagtctggagaatgcaaactacaaagaccacgagaacggtacaggtacaaacacctatgccgccctcaattcggtgtatctcatgatgaacaaccaaatgcgtctgttaggcatggaaactatggcttggcaggagatccggcatgccatcattctgctgactgatggcaagagtaacatggggggctcccctaaaaccgcagtcgatcatattcgggagatccttaacattaaccagaagaggaatgactatctcgatatctatgccatcggagtaggcaagctggacgttgactggcgcgagttgaacgaactgggatctaaaaaagatggagagagacatgcgtttatcctccaggacacaaaggctctgcatcaggtgtttgagcacatgctggacgtgtctaagcttacggacactatatgcggcgttggcaatatgagtgcgaatgcttccgatcaagaacgcaccccttggcatgtgacaatcaagccaaaatcacaggaaacgtgtcgtggggcactgatcagtgaccagtgggtcctgacagcagcccactgcttcagggatggtaatgatcatagcctctggcgggtgaacgtgggcgatccaaaaagtcagtgggggaaagaattcctaattgaaaaagcctag

SEQ ID NO: 183635 - DNA, 978 bp, synthetic construct
  misc_feature 1..978: note = Description of Artificial Sequence: Synthetic coding sequence
  source 1..978: mol_type = other DNA
atgggcacccggagcgccatcgccgccccccggatcctgtgcagcagagggcttagatcaggaagcgctcgcgcgactgggtccggagtggagagaagcccctcagcagctaaccccaccctgatgacctctctgcgcacttggcccctgccttgggctctgccaagcccgacatgtttaggaccccccattcctccgagaaggcagaggatcttttccttcgagattaatgtgtccgttgcaattattacttttgcaagcgagccgaaagtgttgatgagtgtactgaatgacaattcacgtgatatgactgaggtcatcagtagtctggaaaacgctaactataaggaccatgaaaacggcacgggtaccaacacgtacgcagcattgaactccgtgtatctcatgatgaataaccagatgcggctcctcggcatggaaaccatggcatggcaagaaatcagacacgccataatcctcctaacagatggaaagtccaacatgggtggatctcctaaaacagccgttgatcacattagggaaatcctcaacatcaaccagaagaggaatgattatcttgatatttatgctatcggtgtgggcaagctggatgtggactggcgagagctgaacgagctggggtccaaaaaagatggggagcgtcacgcattcatcctgcaggacaccaaggcgcttcaccaagtttttgaacacatgctggacgtgagcaagcttactgacacaatttgcggcgttggtaatatgagtgctaacgcctccgatcaggaaagaacaccatggcacgtcacaatcaagccaaaaagccaggagacttgtaggggcgctctaatttctgatcaatgggtcctgacggcagcacattgcttccgagacggaaacgatcactccctgtggcgggtcaatgttggggacccaaagtcacagtggggtaaagagtttctgatcgaaaaggcatag

SEQ ID NO: 183636 - DNA, 1521 bp, synthetic construct
  misc_feature 1..1521: note = Description of Artificial Sequence: Synthetic coding sequence
  source 1..1521: mol_type = other DNA
atgggcacccggagcgccatcgccgccccccggatcctgtgcagcagaggcctgcgtagtgggagtgccagggcaaccggctccggcgtggaacggtccccatctgccgccattttctcgttcgaaattaacgtgtccgtggctatcatcacgttcgcaagcgagcccaaagtcctgatgagcgtgttgaacgataactctcgcgacatgaccgaggtaattagcagtttggaaaacgccaactataaggaccacgagaacggcaccggcaccaacacatacgccgctcttaactcagtatatttaatgatgaacaatcagatgagattactaggcatggagacaatggcttggcaagaaattcgtcatgcaattattctcctgacggacggaaaaagcaacatgggtgggtcaccaaagaccgctgtggatcacatcagagaaattctcaatattaatcagaagagaaacgattatctggacatttacgccattggtgtggggaaactggacgtcgattggcgggaactgaatgaattgggatcaaagaaagatggggagcgccacgctttcattctccaggacactaaggcactccaccaagtgttcgagcatatgctggatgtctccaagctgacagacacaatttgcggggttggaaacatgtctgccaacgcctccgatcaggaacgtactccatggcacgtgacaatcaaaccaaaaagccaggagacttgccggggagccctcatttctgaccagtgggttctgactgccgcccactgcttccgcgatggcaatgatcactctctctggagggtaaacgtaggagaccctaagagtcagtggggcaaggaatttctcatcgagaaagcagtgatttcccccgggttcgatgtgtttgctaagaagaaccaggggattcttgagttctacggagacgacattgctctccttaaattggctcaaaaggtgaagatgtcgactcatgccaggcctatttgtcttccatgcaccatggaagctaatctggctcttcgtcggccccagggttccacatgtcgggaccacgaaaatgaactgctgaacaagcagtctgtccccgcacactttgtagcacttaatggctcaaagctaaacataaatcttaaaatgggtgtggagtggacatcttgcgcagaggttgttagccaggagaagaccatgtttccaaatttaaccgatgtgagagaagttgtgacggatcaattcttgtgttcgggcactcaggaggacgagagcccgtgtaagggagagagtggcggcgccgtcttcctagagagacgcttcagattcttccaggtggggttagtgtcatggggcttgtacaatccgtgcctggggtccgccgacaaaaatagcaggaagcgtgccccgagatctaaagtgcctcctccgcgagacttccatatcaacctgttcaggatgcagccatggctgagacaacatctgggggatgtgctcaattttctcccattgtag

SEQ ID NO: 183637 - DNA, 978 bp, synthetic construct
  misc_feature 1..978: note = Description of Artificial Sequence: Synthetic coding sequence
  source 1..978: mol_type = other DNA
atgggcacccggagcgccatcgccgccccccggatcctgtgcagcagaggtctccgctctggctcagcccgcgcaaccgggtccggagtggagaggtcccctagcgctgcaaatccaacacttatgaccagccttcgaacctggcctcttccttgggcgctcccttcaccaacgtgcctgggcccacctattccgccaaggcggcaacggatctttagcttcgagatcaacgtgtctgtagccattattacctttgcatccgaacctaaagtgttgatgagtgtcttgaacgacaatagccgcgatatgacagaggttatctctagcttggagaacgcaaactacaaggaccatgaaaacggtacgggcaccaatacctacgcagcactaaactctgtctacctcatgatgaataaccagatgaggctactcgggatggaaaccatggcctggcaggagatacgccatgccatcatcctcctgacggacggaaaatccaatatgggtggaagtccaaagaccgcggtcgaccatatacgtgaaatcttgaacatcaaccaaaagcggaacgactatctggacatctacgccatcggggtgggaaagctggacgttgactggcgcgaattgaacgaattggggtcgaagaaagatggcgaacgtcatgccttcatccttcaggacactaaggccctgcatcaagtgttcgaacacatgctcgacgtcagtaagctgaccgacactatctgtggggtcggcaatatgtctgccaatgccagcgaccaggagaggacaccctggcacgtcacaattaagccgaagagtcaagaaacttgccgcggggcacttatcagcgatcaatgggtgcttaccgccgcacactgcttccgcgatggaaatgaccatagtctgtggagggttaacgtcggagatccaaagtcccagtggggtaaggagttcctcatagagaaggcttag

SEQ ID NO: 183638 - DNA, 1863 bp, synthetic construct
  misc_feature 1..1863: note = Description of Artificial Sequence: Synthetic coding sequence
  source 1..1863: mol_type = other DNA
atgggccccctgatggtgctgttctgcctgctgttcctgtaccccgctggtcactgtccgaatccagggatctctctcggggctgtcagaaccggcttccggttcggacatggtgacaaagttagataccgctgctcctctaacctggttcttactggaagttccgagcgagagtgtcagggcaacggggtgtggtcaggtaccgagcccatctgtaggcagccctactcatacgatttccctgaggatgtggcgccggccttgggaacctccttttcccacatgctgggcgccaccaatccaacacagaagaccaaggaaagtctaggaagaaagatacagattcagaggtctgggcacctgaacctctatctgctgctggactgttcccaatctgtaagtgaaaacgatttcctgatattcaaagagagcgcatctcttatggtagataggatcttttcgtttgagattaatgtaagcgtcgccatcatcacattcgcttctgagccgaaagtgcttatgtccgtgctcaacgataacagtagagatatgacggaggtgatctcaagccttgagaacgccaactataaggaccacgaaaatggaacaggaaccaatacctacgcagctctgaacagcgtgtacttgatgatgaacaaccagatgcgtctgctcgggatggaaaccatggcttggcaagaaatcagacacgccatcattctgctgacggatgggaaatctaacatgggaggatcccctaagactgccgtcgatcatatacgggaaatactcaatatcaatcagaagcgaaatgactacttggacatatatgcgatcggagttggtaagctggatgtggattggcgcgagttgaacgaacttgggtccaagaaggacggtgaacgccacgccttcatcctgcaggatactaaggccctacaccaagtctttgaacacatgctcgacgtatccaagctaacggacactatttgcggggtggggaatatgtcggccaatgcatctgatcaagaaaggaccccgtggcacgtcaccattaagcccaagtctcaagagacttgcagaggtgcacttattagcgaccaatgggtgctcaccgccgctcactgctttcgcgacggcaacgaccatagcttgtggcgcgttaacgtgggcgatcctaaaagccagtggggcaaagagtttctcatcgagaaagctgttatctcccccggctttgatgtgtttgccaagaagaatcagggcatactggaattttacggcgacgacatagccctcctcaaacttgcacagaaggtgaagatgtccacgcacgccaggcccatatgtttgccatgcacgatggaggccaatttggctctacggaggccacaaggttctacctgtagagatcacgagaacgagcttctcaacaagcagtccgtgccagcgcatttcgtggctctcaatgggagcaagctcaacattaatctcaagatgggtgtggagtggaccagctgcgctgaggttgtaagccaggagaaaacaatgttccccaacctaaccgatgtgagagaagtcgtcacggatcaatttttgtgctcaggaacccaggaggacgagtctccctgtaaaggcgaatcagggggtgcagtattcctggaacgcagatttagatttttccaagtgggcctcgtgtcttggggactgtataacccctgcctcggttccgcagacaagaacagtaggaagcgcgctcccagatcaaaggtgcctccccctcgcgactttcacattaacctttttcgaatgcagccttggcttaggcagcacttaggcgacgtgcttaactttcttccactctag

SEQ ID NO: 183639 - DNA, 1134 bp, synthetic construct
  misc_feature 1..1134: note = Description of Artificial Sequence: Synthetic coding sequence
  source 1..1134: mol_type = other DNA
atgaccgaggtgatcagcagcctggagaacgccaactacaaggaccatgagaacgggacaggcactaacacatacgccgcactgaactccgtttatcttatgatgaacaaccagatgaggctgctgggcatggaaactatggcatggcaggagattaggcacgctatcatcctactcacagatggaaaatccaacatgggaggaagccccaagacagccgtagaccacatccgcgagatcctgaacatcaaccagaaacggaacgattatcttgacatctatgccatcggggtcggtaaactggatgtggactggagagagctgaatgagctcggaagcaagaaggatggcgaacggcacgcattcattttacaggatacgaaggcccttcaccaagtcttcgagcacatgttggacgtaagtaaattgaccgatacgatctgcggtgttgggaacatgagcgcgaatgcaagcgatcaagagcgaacaccgtggcatgtaaccatcaagcccaagtctcaggaaacttgtcggggcgctctgatctctgatcaatgggtactgactgcagcacattgcttcagggacggtaatgatcacagcctgtggagagtgaacgtgggcgaccccaaatcccagtggggtaaggaatttctgatcgagaaagccgtgatttcaccagggtttgatgttttcgctaaaaagaaccagggaatcctcgagttctacggagacgacatagctttgctcaaactggcacagaaggtcaaaatgtccacgcacgccaggcctatctgcctgccgtgcaccatggaagccaatttagccctccgtcggccgcagggctcaacctgccgcgaccacgaaaatgagttgttgaacaaacagtctgtgccagcacattttgtggctcttaatgggtcgaagctgaacatcaatctgaagatgggggttgaatggacctcctgtgcggaggtcgtgagtcaagagaagaccatgttccccaatctcacagatgtcagagaagttgttaccgatcagttcttgtgttccgggacacaggaggacgaatcaccctgcaaggggggctcaggtgaactcggaagcctgcaacccctaccttggctgtgttag

SEQ ID NO: 183640 - DNA, 1134 bp, synthetic construct
  misc_feature 1..1134: note = Description of Artificial Sequence: Synthetic coding sequence
  source 1..1134: mol_type = other DNA
atgaccgaggtgatcagcagcctggagaacgccaactacaaggaccacgagaacggcacagggacaaacacttacgctgccttgaactcagtctacctaatgatgaacaatcagatgcgtctgctgggcatggaaacaatggcatggcaggagatcagacacgccattatcctcctaaccgatggcaaaagtaacatgggcgggtctcccaagaccgctgtggatcacatccgggagatattaaatatcaatcagaaaagaaacgattatctcgatatttacgctatcggagtaggcaagctggatgtcgattggagagaactcaacgaacttggatctaagaaggatggagagaggcatgccttcatcctccaggacacaaaggcattacatcaggtttttgaacacatgttagatgtctccaagttgacagacactatctgcggcgtcggaaatatgagcgccaatgctagtgaccaggagcgcacgccctggcacgtgacgatcaaaccaaaatcacaagaaacctgcagaggcgctctgataagcgatcagtgggttctgaccgcagcccactgctttagagacggcaacgaccattcgctgtggagagtgaatgtgggagaccccaaaagccagtggggtaaggagttcctaattgagaaagccgtcatctcccccgggttcgatgtcttcgccaaaaagaaccaggggatcttagagttctacggagatgacatcgcgcttctgaaactagcccagaaagtaaagatgagtacccacgccagacctatatgcctgccctgtaccatggaagcaaatctcgctttaagacggccacaggggagcacctgccgggatcacgaaaatgagctcctgaacaagcagtccgttccagcccactttgtggctctcaacggttctaaactgaacatcaacctgaaaatgggagtagagtggacttcctgcgccgaagtggttagtcaagaaaagacgatgttcccaaatctgacggacgttcgggaggttgtcaccgaccagtttctgtgcagcgggacccaggaagatgagtctccatgtaaaggaggaagtggtgaactcgggagcctgcagccactgccatggctgtgctag

SEQ ID NO: 183641 - DNA, 978 bp, synthetic construct
  misc_feature 1..978: note = Description of Artificial Sequence: Synthetic coding sequence
  source 1..978: mol_type = other DNA
atgggcacccggagcgccatcgccgccccccggatcctgtgcagccgcgggctaaggtctggttccgcgcgggccaccggaagcggcgtcgaacgctcaccctcagccgctaatccaactctgatgactagcctccggacttggccacttccatgggcgctcccaagtccaacctgtcttgggccaccgataccaccgagaaggcaacgcattttttccttcgagattaatgtttctgttgccatcatcacattcgcttctgaaccaaaggttttgatgagcgttctgaatgacaacagtcgcgacatgacagaagtgatcagctccctggaaaacgctaactacaaggaccatgaaaacgggacaggaactaatacctacgccgcattaaactcagtgtacttaatgatgaacaaccaaatgagactgctgggtatggagaccatggcctggcaggagatccgtcacgccattattctcttaaccgacggaaaaagcaatatggggggatcccctaagaccgcagtggaccacattagagaaattctgaatatcaaccagaaacgcaacgactacctggacatttatgccatcggcgtcgggaaattggacgtcgactggcgtgagctcaatgaactgggctctaagaaggacggagaaagacacgcgtttattctgcaagatacaaaggcactccatcaggtgtttgaacacatgctagacgtgtctaaactgactgacaccatctgtggcgtgggtaatatgtccgcaaatgccagtgatcaggagagaactccttggcacgttaccattaaacccaagagccaggagacctgccgtggggccctcatatctgaccaatgggtgcttacggccgctcactgcttcagggatggaaatgatcactcgctatggagggtaaatgtcggcgatccgaaaagccagtgggggaaggaatttctgatagagaaggcgtag

SEQ ID NO: 183642 - DNA, 1134 bp, synthetic construct
  misc_feature 1..1134: note = Description of Artificial Sequence: Synthetic coding sequence
  source 1..1134: mol_type = other DNA
atgaccgaggtgatcagcagcctggagaacgccaactacaaggaccatgagaacggaactggcactaatacatacgccgccctcaactcagtgtatttgatgatgaataatcaaatgcgtctgctgggaatggaaaccatggcctggcaggaaatccgccacgcgatcatattgcttacagacggaaaatccaatatgggagggtcccccaagaccgcggtggatcatatccgagagatccttaacatcaaccagaaacgcaacgactatttggacatctatgccataggggtgggcaaactggacgttgattggagggagctgaatgagcttgggtctaaaaaggatggcgaaagacacgccttcattttgcaggatacaaaggcattgcatcaagtcttcgagcatatgcttgacgtctccaagcttacagatacgatttgcggcgtgggtaacatgtccgcaaacgccagtgaccaagaaaggacaccttggcacgtcaccattaagccaaagagtcaggaaacttgccggggggctcttatcagcgaccagtgggtgttaacagcagcccactgctttcgggacggcaacgatcattctctatggagagtgaacgtgggggaccccaagtcccaatgggggaaggaattcctcatagagaaggccgtgatctccccaggatttgacgtgtttgctaagaaaaatcagggtatcctcgagttctacggtgacgacatcgcgctgctgaagcttgctcagaaggtcaagatgtccactcacgctcgccctatttgcctgccttgcaccatggaggccaatttagctctgcgcaggccacagggcagtacttgcagagatcatgagaacgagctgctgaataagcagtcagttcccgcacactttgtcgccctgaacggctcaaaactaaacatcaacttgaagatgggggtcgagtggacatcctgcgccgaggttgtgagccaagagaagaccatgttccctaacttgactgatgtgagagaggttgtaaccgatcagtttctgtgttctggaacacaagaggacgagagcccgtgcaaaggagggagcggagagctgggatcactgcaacccttgccttggctctgctag

SEQ ID NO: 183643 - DNA, 1617 bp, synthetic construct
  misc_feature 1..1617: note = Description of Artificial Sequence: Synthetic coding sequence
  source 1..1617: mol_type = other DNA
atgcgggccctgtgcatccgggagacctgcagcagcgagctgggcttttcacgcaattggagccgccgcaaagccggccactgcccaaaccctgggatttctcttggcgctgtcaggacagggttccgctttggccatggggataaggtaagatatcgatgcagttcaaatctcgtactgacagggtcaagcgaacgcgaatgccagggaaatggtgtgtggagcgggacagaaccgatctgcaggcagccgtattcctacgatttccccgaggatgtggccccagctctgggtacttcctttagccatatgcttggcgcaacgaacccaacgcagaagaccaaggaccacgagaatggaacggggacgaatacgtacgccgctttaaattctgtctacctcatgatgaacaaccagatgcgattactcggaatggagaccatggcctggcaagaaattcgccacgctattatactcctgaccgacggcaaatccaatatgggtggatctccaaagacggcggttgatcatattagggagattctgaatatcaaccagaaacgcaatgactatttagatatttacgcaatcggggtcggcaagctagatgtcgactggagagagctgaatgagctcggttccaaaaaggatggtgagcgccacgccttcatactgcaggacaccaaggctttacaccaggtcttcgaacatatgttagatgtgtctaagcttaccgacaccatctgtggagtgggaaacatgtccgccaacgccagtgatcaggaaagaacaccatggcacgtaactatcaagccgaaatcacaagaaacttgtcggggtgcactgatttcagatcagtgggtacttacggccgcgcactgttttcgggatggcaacgaccattcactttggcgagtcaacgtgggtgacccaaagagtcagtgggggaaggagtttttgattgagaaggccgttatctcgccaggttttgatgtgttcgctaagaagaaccagggaattctcgaattttatggcgacgacatagcactgctcaaacttgcccagaaagtcaagatgtccacccacgccaggccgatatgcctgccctgcacgatggaagccaacctcgccttgaggcgcccacagggatctacatgcagagatcacgaaaacgaattgcttaataaacaaagtgtgcccgcgcactttgtcgctctgaacggctcaaaacttaacatcaaccttaaaatgggcgtggaatggacatcatgcgccgaagtggtatcacaagagaaaaccatgtttccaaatctgacagatgttagagaagtcgttacagaccagtttctctgcagcggcacgcaggaggatgaaagtccatgtaagggagagtctgggggggcagttttcctggagcggaggtttaggttttttcaggtgggcctggtgagctggggactgtataatccctgtttaggctccgccgataagaatagcaggaagagggcgccacgtagcaaagttccccccccccgggactttcatattaatctgtttcgcatgcagccctggctgagacagcatctcggggacgtgcttaattttttacccttgtag

SEQ ID NO: 183644 - DNA, 1863 bp, synthetic construct
  misc_feature 1..1863: note = Description of Artificial Sequence: Synthetic coding sequence
  source 1..1863: mol_type = other DNA
atgggccccctgatggtgctgttctgcctgctgttcctgtaccccgccggccattgccctaaccctgggatatcccttggagccgtgagaaccggtttccggttcgggcacggggataaggtgcggtatagatgcagttcgaatctagtgcttacaggatcctcagagcgagagtgccaggggaatggcgtgtggagtgggacagaacccatttgtaggcagccctatagttacgatttccccgaggacgtggctccagccttaggaactagcttctctcacatgttgggcgccaccaacccaactcaaaagactaaagagagcttagggcgcaagattcaaatacaaaggtctgggcacctgaacttgtaccttctactggactgctcccagagtgtatccgagaatgatttccttatcttcaaggaatccgcttctctgatggtcgatcggattttttcctttgaaattaacgtgtctgtagcaatcattacattcgcatctgagcctaaggtcctgatgtctgttttgaacgacaattctcgtgatatgacggaagtgattagcagcctagagaatgccaattacaaagaccacgaaaatggcaccgggaccaacacttacgccgcactgaacagtgtctatctcatgatgaataatcaaatgcggttgctcggcatggaaaccatggcctggcaggaaattcgacacgctattattctactcacagacggtaaatccaatatgggcgggtcccccaagactgcagtcgaccatataagggaaatactaaatataaatcagaagcgcaacgactacctggatatctacgcaatcggagttggtaagctcgacgtggactggcgtgaactgaacgaactcggaagtaagaaggatggcgagagacatgcatttatcttgcaggacacgaaggcacttcatcaggtgtttgaacatatgctggacgttagcaaactgactgacacaatttgtggggtaggtaatatgagcgccaacgcctccgaccaagagcgtacaccttggcatgtgacaatcaagcctaagagccaggaaacctgtcgtggggctctaatcagcgatcagtgggttttgaccgccgctcactgtttcagggacggtaatgaccattctctctggagggtgaatgtgggggacccaaagagtcagtgggggaaagaattcttgatagagaaagctgtaatctcacccggcttcgacgtgtttgccaagaagaatcagggtattcttgagttttacggagacgatatagcccttctgaagctggctcaaaaggttaagatgtcaacccatgctagacccatctgcttgccctgcaccatggaggccaacctcgccctgagaaggccccaaggaagcacctgcagggaccacgaaaacgagctactgaataagcagtcagtgcctgcacacttcgtggccctcaacgggtccaagctgaatatcaatctgaaaatgggcgtggaatggaccagctgcgctgaggttgtgtctcaggagaagacaatgtttcctaacctgacagatgtcagggaagtggtgaccgatcaattcctgtgtagtggaacacaagaagatgaatcaccttgcaagggagaatccggcggcgcagtgtttttggagaggcgattccgcttctttcaagtggggctggtgagctggggactgtataatccttgcttaggctcagccgataaaaactcacgtaaacgggcgcctcgatcaaaagtaccccctccccgcgacttccacataaatctgttccggatgcaaccttggctcagacagcatctcggcgatgtgctgaattttctgcccctgtag

SEQ ID NO: 183645 - DNA, 1863 bp, synthetic construct
  misc_feature 1..1863: note = Description of Artificial Sequence: Synthetic coding sequence
  source 1..1863: mol_type = other DNA
atgggccccctgatggtgctgttctgcctgctgttcctgtaccccgcaggccactgcccaaatcctggcatctccctaggcgccgttagaacagggtttcgcttcggacatggggataaggtcagatataggtgctccagcaatctggtgctgacaggatcatcagaaagggaatgccagggcaatggcgtctggtctggcacagaaccaatttgcagacagccttattcttatgattttcccgaagatgtagcccctgctctcggcaccagcttctcccacatgctgggagctaccaacccgacccagaagactaaagagtccctggggcgtaaaattcagatccaacgaagcgggcaccttaacctgtaccttttgctggactgttcgcagagtgtgtccgagaatgatttcctaatcttcaaggaatcagcctccttgatggtagaccgtatctttagctttgagatcaacgtgtcagtggcaatcattacctttgcgtccgagcctaaagtgctgatgagcgtgctgaatgacaactcgcgcgatatgacagaagttatttctagtctggagaatgccaactataaagatcatgaaaacggaactggaacaaacacctacgctgcgcttaatagcgtttatctcatgatgaataaccagatgcggctgctcggtatggaaaccatggcgtggcaggagatcaggcacgcaatcatactgcttaccgacggcaaatcaaacatgggagggagtccaaagaccgccgttgatcacatacgagaaatcctcaatatcaatcagaagcgaaatgactacctcgatatctacgctataggcgttggtaaactcgacgtggactggagggagctgaacgagctggggtctaagaaagatggggagcggcacgcttttatacttcaggacaccaaagcgctgcaccaggtgtttgaacatatgttggatgttagtaagctgaccgacactatttgcggcgttggcaacatgagtgccaatgctagtgatcaggaaagaaccccttggcacgttacaatcaagcctaaaagccaggagacctgtcggggggcactcatttcggaccagtgggtgttaaccgctgctcactgcttccgcgacggaaatgatcactccctgtggagggtgaacgttggggatcctaagagtcagtggggaaaagagtttctgattgagaaggcagtgattagccctggttttgacgtgtttgccaagaaaaatcaagggatcctagaattttatggagatgatatagccctgcttaagctggctcaaaaagtgaagatgtcgacccacgctagacctatttgcttgccttgtacaatggaggcgaatcttgcactgcggaggcctcaggggagcacctgtagagaccacgagaacgaactgttgaacaagcaaagcgtgcccgctcactttgtggcattgaacgggtcgaagctgaacattaatctgaagatgggagtagagtggacatcttgtgccgaggtggtgagccaggagaagaccatgttcccaaacttgactgatgtacgcgaggtagttacagatcaattcctctgttccggtacacaggaggatgaatcaccatgcaaaggggagtcagggggtgccgtgtttttggaacgcaggttccgattttttcaggttggtttagtgtcttgggggttgtataacccatgccttgggtccgccgataagaactctcgtaagcgggccccgcgttcgaaggtacctcctcctagagactttcacattaacctttttaggatgcagccgtggttgcggcagcatctaggcgacgtcttgaatttcctgcccttgtag

SEQ ID NO: 183646 - DNA, 1863 bp, synthetic construct
  misc_feature 1..1863: note = Description of Artificial Sequence: Synthetic coding sequence
  source 1..1863: mol_type = other DNA
atgggccccctgatggtgctgttctgcctgctgttcctgtaccccgctggtcattgtccgaacccaggtattagtctcggcgctgtcaggactggttttagattcgggcacggagataaggtcaggtacaggtgcagctccaacctcgtcctcaccggatccagcgaacgcgaatgccagggcaatggagtgtggagcggaaccgaaccaatatgtagacaaccatattcttacgattttccagaggacgtcgctcctgcactaggaaccagcttctctcatatgctcggggcgaccaaccctacccagaagaccaaggagagcctgggccgcaagatccagattcagcgaagcgggcatctgaacctgtacctcctgttggactgctcccagtctgtgagtgaaaacgatttccttatctttaaggaatcagcctctcttatggtggatcgcatcttttcttttgagattaatgtgagtgtggcaattatcacctttgcctcggaacccaaagtccttatgtctgtgctgaacgacaacagtagagatatgaccgaggtgataagttccttagagaatgcgaattataaggaccatgagaacgggaccggaaccaatacttatgctgccctgaacagcgtctatctgatgatgaacaaccagatgcgactcttgggtatggagaccatggcttggcaggagattcgtcatgcgatcatactgttgaccgacggcaagagtaacatgggcggcagccccaagaccgctgtggaccacattagggagatcctcaatatcaatcagaagagaaacgactatctggatatctatgccattggtgttggcaagctggatgtagactggcgagagctgaacgaactaggtagtaagaaggacggcgaacggcacgcgttcatccttcaagatacaaaagctctgcatcaagtcttcgaacacatgttggatgtctcaaaacttactgacaccatatgtggtgttggaaacatgtccgccaatgcatccgaccaagagaggacgccctggcacgtaactataaaaccaaaaagccaggaaacctgtaggggcgccctgatctcagaccagtgggtgctcactgccgcacattgttttagggacggtaacgaccactctctgtggagagttaacgtgggagatcccaaaagccaatggggtaaggaattcctcattgagaaggcagtgatctcgcccggattcgatgtcttcgctaagaaaaatcaggggatcctggaattttacggagacgacatagcactcctaaaactagcccagaaggtcaaaatgagcacccatgcccgaccaatctgcttaccatgtactatggaagccaatctggcactgagacggcctcaggggagtacctgtagagaccatgaaaacgagctgctgaacaaacagagtgtgccagcgcacttcgtcgctctcaacggcagtaaattaaacatcaatctgaaaatgggcgtggaatggacctcatgcgccgaagtggtgtcccaggaaaaaacaatgtttccgaacctaactgatgtcagagaggtggtcacagatcagtttctctgtagtgggacacaggaggacgagtctccttgtaaaggtgagtccggcggcgctgtgttcctggagaggcggtttcgcttcttccaggttgggctggtgtcttggggcctgtacaatccctgtttgggctcagccgataaaaattcacgcaagcgcgcaccccgtagtaaggtgccccccccgcgggacttccatattaatctgttccgtatgcagccatggctcagacaacacttgggcgacgttctgaacttcttaccactctag

SEQ ID NO: 183647 - DNA, 978 bp, synthetic construct
  misc_feature 1..978: note = Description of Artificial Sequence: Synthetic coding sequence
  source 1..978: mol_type = other DNA
atgggcacccggagcgccatcgccgccccccggatcctgtgcagcaggggcctcagatctggatccgcgagggccacaggttctggcgtcgaaagaagcccctccgcggccaaccctactttgatgactagcttgcggacttggccccttccatgggctctccccagcccaacctgcctgggtccgcctattccacctcggaggcagagaatattcagctttgagattaacgtgagcgtggcgatcataacctttgcctctgaaccaaaagtgctcatgtcagtcctgaatgataattcccgtgatatgactgaggttatcagcagccttgaaaatgctaattataaggatcatgagaatgggactggcaccaatacgtacgctgccctcaactctgtgtaccttatgatgaataaccagatgaggctcctcggcatggaaaccatggcctggcaggagatccgacatgctattatcctgctgacagatggtaagagcaatatgggggggagcccgaagacagcggtcgaccacattcgggagattttaaacattaatcagaaacgaaatgactaccttgacatctacgccattggagtaggcaagctagacgtggactggcgcgagctgaatgagctaggttccaaaaaggatggagagcgccacgctttcatcctacaagataccaaagccctgcaccaagtattcgaacacatgctcgacgtgagtaagctcacagacaccatctgtggtgtcgggaacatgtctgctaacgcatcagatcaagaaagaaccccgtggcacgtgacaattaaacctaaaagccaggaaacatgccgcggggctctaatcagtgatcagtgggtactcacagcggctcattgttttagagacggcaacgatcattcattgtggagagttaacgtgggcgatcccaagtctcagtgggggaaagagtttcttatagagaaggcatag

SEQ ID NO: 183648 - DNA, 1134 bp, synthetic construct
  misc_feature 1..1134: note = Description of Artificial Sequence: Synthetic coding sequence
  source 1..1134: mol_type = other DNA
atgaccgaggtgatcagcagcctggagaacgccaactacaaggaccacgaaaatggaacagggactaatacgtacgccgctttaaacagcgtctacctcatgatgaataatcagatgcggctgttgggcatggaaactatggcctggcaggagattcgacacgctatcatcctgttgaccgatgggaaatccaatatggggggtagtcctaaaaccgcagtggaccatatcagggaaattcttaacattaatcaaaagcggaacgactaccttgatatctacgccatcggcgtgggaaagctggacgtagactggcgtgaactaaacgagttaggttccaagaaggacggagaaaggcatgcctttatcctgcaggataccaaagccctccaccaggtgttcgaacacatgttagacgtaagtaagttaacagacacaatctgtggggtcgggaacatgtccgctaacgccagcgatcaagaaagaacgccctggcacgtgacaatcaagcccaagtcgcaggaaacctgtcggggagctctgataagtgatcagtgggtgctgaccgccgctcactgcttccgggacggcaacgaccacagtctgtggcgggttaatgtgggagaccctaaatcccaatggggcaaggagtttctcatcgagaaggccgtgatatccccgggctttgacgtgttcgccaagaagaaccaagggattctggagttctacggagatgacattgccctcctgaagttggcgcagaaagttaagatgtctacacacgccaggcccatttgcctgccatgcacaatggaagccaacttagcgctcagacgtcctcagggctccacttgcagagaccacgaaaacgagctgctgaataagcagtctgtacctgcacattttgtggcactgaatggttcaaagctaaatatcaaccttaagatgggggtcgagtggacatcttgtgccgaggtcgtttcacaagagaagactatgttccccaatcttactgatgttcgcgaggttgtcactgaccagtttctgtgctcaggcacacaggaggatgagtccccctgcaaaggcggtagcggcgagttgggctctctgcagccgttgccatggctgtgctag

SEQ ID NO: 183649 - DNA, 1617 bp, synthetic construct
  misc_feature 1..1617: note = Description of Artificial Sequence: Synthetic coding sequence
  source 1..1617: mol_type = other DNA
atgcgggccctgtgcatccgggagacctgcagcagcgagctgggctttagcagaaattggtcacgacgaaaagcaggtcactgccctaatcccggcatcagtctcggcgctgtgagaactggcttcaggttcgggcacggtgataaagtcagataccggtgcagtagcaatttggtactaaccgggagctcagaacgcgagtgccagggcaatggcgtatggtccggcacagagcccatttgtaggcagccctacagctatgatttcccagaagacgttgccccggccctcggcacttcatttagccacatgctcggagccaccaacccaacccaaaagactaaggatcatgagaatggtacaggcactaatacatacgcagccctcaattcagtgtatctgatgatgaacaatcagatgagactactaggcatggaaaccatggcctggcaggagattagacatgcgatcatcctactgactgatggcaagagcaacatggggggaagtccaaagactgcagtagatcacatcagagagatcctgaacattaaccagaagcgtaacgattatctggacatctacgccatcggcgtgggaaagcttgatgtggactggcgagaattgaatgagctaggctctaaaaaagatggtgaacgccatgcatttattcttcaggatacgaaagccctccaccaggtgttcgagcacatgcttgatgtgtcaaagctgacggataccatttgtggagtcggcaatatgagtgccaatgctagcgaccaggaacggacgccctggcatgtgacaataaagcctaagtctcaggagacttgtcgaggagccctcatctcagaccagtgggttctaaccgccgcacattgttttcgggatggcaacgatcacagtctttggcgggtaaatgtgggcgaccctaaaagtcaatgggggaaagaatttttgatagaaaaggcagtgatttctcccgggttcgatgtatttgccaagaaaaaccagggcatactagagttttacggagacgacattgccctgctgaaactagcccaaaaggtcaagatgtccacccacgcacgccctatctgtcttccatgcacgatggaggccaatctcgcattacgccggccccaaggcagtacttgcagggatcacgagaatgaacttctgaataagcagtctgtgcctgcacactttgtggcccttaatggctccaagttaaacatcaatcttaagatgggtgtggaatggaccagttgcgcagaagtggtcagccaggaaaagactatgtttccaaatttaacagacgtgcgcgaagtggtgactgatcagtttctgtgctccgggacgcaggaagatgagagcccatgcaaaggagagtcaggtggcgctgtgttcctggagcggcgcttccgtttctttcaggtcggactcgtgtcctgggggctgtataacccctgtctgggcagtgccgacaaaaatagcaggaagagggccccgcgatccaaagtgcccccccccagagactttcacattaatctgttcaggatgcaaccgtggttacggcaacacctcggggacgttctgaattttctgcccctgtag

SEQ ID NO: 183650 - DNA, 1617 bp, synthetic construct
  misc_feature 1..1617: note = Description of Artificial Sequence: Synthetic coding sequence
  source 1..1617: mol_type = other DNA
atgcgggccctgtgcatccgggagacctgcagcagcgagctgggcttctctcgcaattggtcccgtcgaaaagctggacattgcccaaacccaggcatcagtctcggggctgtgcgtaccggcttcaggttcggtcacggagacaaagtgaggtaccggtgttcatctaacctggtcttaacaggctcctctgaacgcgaatgccaaggaaatggggtttggagcggaaccgaacccatctgcaggcagccatactcctatgacttccctgaggatgtggcacctgccttggggacttcgtttagccacatgcttggggctacaaacccaactcaaaagacaaaggatcacgagaacggtactggaacaaatacgtatgccgccctaaatagcgtctacctaatgatgaataaccagatgcggctcctagggatggagacgatggcctggcaggagattcgccacgccatcattctgcttaccgatggaaaatccaatatgggaggtagccctaagacggcagtggatcacattcgggaaatcctgaacatcaaccagaagagaaacgactacctggatatttacgctataggggttggcaaactggacgttgattggcgcgaactaaacgaactgggctcgaagaaggatggagagcgccatgcattcatactccaggacacaaaggccctgcaccaggtcttcgagcacatgttggacgtgtctaaactgaccgataccatttgtggggtaggtaacatgtctgccaacgcatcggaccaggagcgcaccccttggcatgtgactattaagccgaaatcccaggaaacatgccgaggggccctgatttccgaccaatgggttctcaccgccgctcattgcttccgagacggcaacgaccattccttatggagagtgaacgtcggtgatccaaagtctcagtggggcaaggagttcttaattgaaaaagctgtaatctcgccaggattcgacgtttttgccaagaagaaccagggcattctggagttttatggagatgatattgccctgcttaagctcgcccagaaagttaaaatgtcgacccacgcaaggccgatctgcttaccatgtaccatggaggcaaacttggctttgcggcgccctcaggggtcaacttgtagagatcacgaaaacgagttattaaacaaacaatcggtgcccgcccacttcgtggctctcaatggatccaagctgaacatcaacctgaaaatgggagtggagtggactagctgcgctgaagttgtgtctcaggaaaaaactatgttcccgaaccttacagacgtcagagaggtcgtgactgaccagttcctgtgcagtggcacacaggaggatgagtctccttgtaagggcgagagcgggggcgccgtgtttctggaaagacgcttccggttttttcaagtcggccttgtgagctggggtctttataatccctgtctgggttcagccgacaagaattctcgtaagcgcgcgccccgctctaaagtgcctcctcctcgtgacttccacattaacttgtttagaatgcagccgtggcttaggcaacacctgggcgacgtgctgaactttttgcctttgtag

SEQ ID NO: 183651 - DNA, 4992 bp, synthetic construct
  misc_feature 1..4992: note = Description of Artificial Sequence: Synthetic coding sequence
  source 1..4992: mol_type = other DNA
atgggccccaccagcggccccagcctgctgctgctgctgctgacccacctccccttagcccttggttctcccatgtactctattattactcctaacatcctcagactggagtcggaggaaacaatggtcctggaagctcatgacgctcaaggagatgtgccagttacggtgacagtccatgattttcccggcaagaaattggtgcttagctcagaaaagactgttctgacacctgctacaaatcatatgggtaacgtgacgttcactataccggcaaatcgggagtttaagtcggaaaagggccggaacaagtttgtgaccgtccaagctactttcggcacacaagtggtggaaaaagtggtgctggtttcactgcagagcggctacctgttcatacagacggataagactatttacaccccaggctctacagtactatatcggatattcacagtcaaccacaagctgttaccagtgggacgcaccgtgatggtcaatattgagaacccagagggcatacctgttaagcaggattccttgtcttcccagaatcagctgggggttctccctttgagctgggatatcccggagctggtgaacatgggccagtggaagatcagagcatactatgaaaactccccacagcaggtgtttagcaccgagtttgaggtgaaggaatacgtgctcccctcattcgaagtcattgtggaacctactgagaaattctattatatttacaacgaaaaaggcctagaggttaccatcactgcgaggttcctgtatggtaaaaaggtggagggtactgcgtttgtgatttttggcattcaagatggggaacagcgtatatccctgccagagagcctgaaacggatacccatcgaggacggaagtggagaggttgtgctgtccaggaaagtacttttggacggtgtccagaatccaagggcagaagacctggtagggaagtcattgtatgtgagtgccaccgttatcctgcattctgggtctgacatggtccaagccgagaggtccggaatacctattgtgacgagtccatatcaaattcacttcaccaagaccccgaagtattttaaacccgggatgcccttcgatttaatggtatttgttacaaatcccgacggaagtcccgcctacagggtgccagtcgccgtgcaaggagaggacaccgtgcaatccctgacacagggcgacggcgtggccaaactgagcataaacacccacccttcccagaagcctctgtcgataacggtacggaccaagaagcaggagctaagcgaagccgagcaggcaacaaggacgatgcaagccctaccctactccactgtggggaactctaataactacctacacttatccgtcctgcggacagaactcaggcctggcgagactttgaacgtcaattttttgctccgtatggatcgggctcatgaagccaagattagatactacacatacctgataatgaataaggggagacttctaaaggctggcaggcaagtgagggaaccaggacaggacctcgtagtcctccctctgtcaataaccaccgactttatcccttcttttcgtctggtggcatactacaccctgataggggcctccggacagagggaagtggtggccgattctgtatgggttgatgtcaaggactcctgcgtggggtctcttgttgtgaaatccggccagtcagaggaccgtcagcctgtgcccggtcagcagatgactctcaaaatcgaaggcgaccacggggctcgggtggtgctggtggctgtggataagggagtttttgtgttaaacaaaaaaaacaaattgactcagtcaaagatttgggatgttgttgaaaaggccgacataggttgcacaccaggaagcggaaaagattacgccggcgttttcagtgatgcgggacttaccttcacctctagtagtgggcagcaaacggctcagagggccgagctgcagtgccctcagccagctgctcggaggaggagatccgtgcagctgacagaaaaacggatggataaggttggaaagtacccaaaggagttgcgaaagtgttgtgaggacggcatgcgggagaaccctatgcggttttcttgtcagcgcaggacccgctttatatcccttggcgaggcttgcaagaaagtgttcctggattgctgcaattatatcacagaactcaggcggcaacacgctcgtgccagtcatcttgggctagcccgatctaacttagacgaagacatcatcgctgaggaaaacatcgtctcccggagcgaattccctgagtcttggctgtggaacgtcgaggacctcaaggagccgccgaagaacggaattagcaccaagctgatgaatattttcctgaaggactctataactacttgggagatcctggccgtgtccatgtccgacaagaaaggcatctgtgtggccgacccctttgaagtgaccgttatgcaggatttttttatcgatctccggctgccatacagtgttgtcaggaacgagcaagttgagattcgcgcagtgctgtacaactatcgtcagaaccaggaactgaaagtccgcgtcgaactattgcataaccccgccttctgtagcctggctacgactaagagacgacaccagcagaccgttaccatacccccaaagtcctctctgtccgttccttatgtgatcgtgcctttaaaaactgggcttcaggaggtcgaagtgaaggccgccgtgtaccatcattttatatccgatggggtgaggaaatccttgaaggtcgttccggagggcatccggatgaacaagaccgtggccgtgcggaccctagaccctgaacggctgggccgcgagggtgtacaaaaggaggatatcccgccagcagatctgtcggatcaagttcctgacaccgagagtgagactcggatcctcctccaaggtacaccagtcgcccagatgactgaagacgctgtagacgccgagcgcctcaagcacctaatcgtcacaccaagcggttgcggggaacagaacatgattggtatgaccccaaccgtcattgctgtccattatctcgatgaaacagaacaatgggagaaattcggactggagaaaagacaaggagcactcgaactgataaaaaaaggctatacccagcaactggccttccggcagccttcctcagcctttgcagccttcgttaagcgagctccctccacttggctgacggcatacgtggtgaaggtcttctctttagctgtcaacctcatcgccatcgattctcaggtcttatgtggcgccgttaaatggctcatcctggaaaagcagaaaccagacggcgtctttcaggaggatgcccccgttattcaccaagagatgataggcggtctgcggaacaacaatgagaaggatatggctttgaccgccttcgttcttatctcattacaggaagccaaggatatctgtgaggagcaggtgaattcgctcccaggcagcataacgaaggccggcgatttcctcgaagcaaattacatgaaccttcaacgctcctacacagtcgccatcgccggctacgcactagcccagatgggcaggctgaaaggccccctgctcaacaagttcctgaccaccgctaaggataaaaatcggtgggaagaccccggaaaacagttatataatgtcgaagcgactagctatgcactcctcgctcttttgcagctgaaggacttcgacttcgtcccaccagttgtaaggtggttaaatgagcaacgatactatggcggaggctacggctccacacaagcaacatttatggtattccaagccttggcacagtaccagaaggatgctcctgaccaccaggagctgaacctggacgtcagtctgcagctcccatctagaagtagcaagattacacatagaatacactgggagagcgcatcactgcttcggagcgaagagacaaaggagaatgagggatttactgtcaccgccgagggaaaagggcaggggaccctgagtgtggtcacaatgtaccacgctaaggctaaggatcaattaacctgcaataagtttgaccttaaggtaacaatcaagcccgccccggaaaccgaaaagcgcccccaagatgccaagaacaccatgattctcgagatctgtacaagataccggggcgatcaggatgccactatgtccattcttgacatttccatgatgaccggttttgcacccgacacagacgatctgaagcagcttgcaaatggcgtggacaggtacatttctaagtacgagctggataaggcgttttctgacagaaacacgttgatcatctatcttgataaagtgagccactcggaagatgactgcctggcatttaaggtgcaccagtacttcaatgtggagcttatccaacccggagccgtcaaggtttacgcttactataatctggaagaaagctgcaccaggttttatcacccggaaaaggaagatggaaaactgaataagctgtgcagggacgaactgtgcagatgtgccgaagagaattgcttcatccaaaaaagtgatgataaggtgactctggaagagagattggacaaggcttgcgaaccgggggtggattacgtttataaaacccgactggtaaaagtgcaactgtcaaatgactttgacgagtatatcatggccatcgagcagactataaaatctgggtctgacgaggtacaggtggggcagcagcgcacatttattagccccatcaagtgtagggaagctcttaagctcgaagaaaagaagcactacctcatgtgggggctcagctcagacttttggggtgagaaaccaaatctgagttacatcatcggcaaagatacgtgggtggagcattggccagaagaggacgagtgtcaggatgaggagaatcagaaacaatgtcaggacctgggcgcatttactgagtctatggtggtgtttgggtgtccaaactag

SEQ ID NO: 183652 - DNA, 1794 bp, synthetic construct
  misc_feature 1..1794: note = Description of Artificial Sequence: Synthetic coding sequence
  source 1..1794: mol_type = other DNA
atgcacccccccaagacccccagcggcgccctgcaccggaagcggaagatggctgcctggcccttcagtcggctctggaaggtgtccgatcccatcctgttccagatgacattaatcgctgccttgctccccgctgttctcggcaattgtggccccccacctacccttagctttgctgcccccatggatataacactgactgagacccgctttaagacaggaaccaccttaaagtacacttgtctgcccggctacgtgcgcagtcattcaacccagactctcacctgtaactctgatggagaatgggtttacaacacgttctgtatctataagcgctgcagacatcccggagagcttagaaacggccaggtcgagatcaaaacagacctgtccttcggatctcagatagaattttcatgttcggagggcttcttcctgataggcagtacaacgtctcgttgcgaggtgcaggacagaggagtcggctggtcccaccctctcccacagtgtgagattgttaagtgcaaaccccccccagatatccgaaacggccgtcactcaggcgaggaaaatttctatgcatatgggttttctgtgacatactcttgcgaccctaggttctcattgctgggacacgcctctatatcctgcactgtcgaaaacgagacaattggtgtctggcggcctagcccaccaacgtgtgagaaaataacgtgtcggaagccagacgtgagccacggggagatggtgtccggctttggaccaatttacaattataaagatacaatcgtgttcaagtgtcagaaggggtttgtgcttagagggtcatctgtgatccactgcgatgcagactcaaaatggaacccttcacctcctgcatgtgagcctaattcctgcatcaatttaccggatatacctcatgcctcttgggaaacgtaccccagacctacgaaagaggatgtttacgtggtaggcacggtgctgcgctaccggtgtcacccaggttacaaaccaacaaccgacgagcctaccactgttatttgtcaaaagaacctcaggtggaccccataccagggctgtgaggccctttgctgcccagagcccaaactcaacaatggagaaataacgcagcatagaaaatcccgacctgcaaaccactgtgtgtacttttacggtgacgagatttctttctcatgtcacgagacctcgcgattctccgctatctgccagggcgatggaacttggtcccctcggacccctagctgcggggacatttgcaactttcccccaaaaattgctcacggtcactacaaacagtcgtcatcctatagcttcttcaaagaagaaattatttacgagtgcgataaagggtatattcttgtaggtcaggctaagctcagttgcagctattcccactggtctgcccccgcgccccaatgtaaggcactgtgtcgaaagccggagctcgtaaatggccgtctgtccgtggacaaggaccagtatgtggagccagagaatgttaccattcagtgcgactcagggtacggtgtcgtgggtccccaatctattacctgttccggcaataggacctggtaccccgaagtgcccaagtgcgagtgggaaacccctgaagggtgcgaacaggtccttaccggtaaaaggctgatgcaatgcctaccaaaccctgaggacgtaaagatggcccttgaggtgtataaactaagcttggaaatcgaacagctggagctgcagagagacagcgctcgacaaagcacccttgataaagaactatag

SEQ ID NO: 183653 - DNA, 459 bp, synthetic construct
  misc_feature 1..459: note = Description of Artificial Sequence: Synthetic coding sequence
  source 1..459: mol_type = other DNA
atgcacccccccaagacccccagcggcgccctgcaccggaagcggaagatggctgcctggcccttttctcggctgtggaaagtgagcgaccctattctgttccagatgaccctgatcgccgctctgctcccagcagtattgggcaattgcgggcccccccctactctatcctttgccgctccgatggatatcactctaactgagacacgattcaagaccggaacgacactgaagtacacctgtctgcctgggtacgtgaggtcccatagcactcaaaccctcacctgcaattcagacggtgagtgggtatataatacattctgtatatacaagagatgcagacatcccggtgaattgcgcaacggtcaggtggaaattaagactgatttgagtttcggttcgcagatagagttttcgtgttccgaaggtttctttctcatcggcagcactacctcatag

SEQ ID NO: 183654 - DNA, 759 bp, synthetic construct
  misc_feature 1..759: note = Description of Artificial Sequence: Synthetic coding sequence
  source 1..759: mol_type = other DNA
atgttcttctggtgcgcctgctgcctgatggtggcctggcgggtgagcgcctcagacgctgaacactgtcctgagttgcctcccgtagacaattcgatcttcgtggccaaggaagtggaaggtcaaatcttgggcacatatgtgtgtatcaaaggataccacctagtcgggaagaagacactgttttgtaacgcctccaaggagtgggacaacaccacaaccgaatgcagattgggccactgtccagatcctgtcctcgtgaatggtgagttctcgtctagtggacccgtgaatgtctcggataagatcacattcatgtgcaacgatcattacatcctgaagggctcaaaccgtagccagtgcctggaggaccacacgtgggctcctccattcccgatctgcaaatcccgagattgtgatccgcctggaaatccagtgcatggctattttgagggaaacaatttcactctgggctccaccatctcctattattgcgaagatagatactatctggttggtgtgcaggagcaacagtgtgtggatggcgaatggagcagtgcactgcccgtctgtaaactgatccaggaggcgcctaaacctgaatgcgaaaaggcactcctggcattccaggaaagcaaaaacctgtgcgaggcaatggaaaattttatgcagcaactaaaggagagtggaatgactatggaggagctcaaatacagcttggaactgaaaaaagctgaactgaaagcgaagctgctctag

SEQ ID NO: 183655 - DNA, 756 bp, synthetic construct
  misc_feature 1..756: note = Description of Artificial Sequence: Synthetic coding sequence
  source 1..756: mol_type = other DNA
atgttcttctggtgcgcctgctgcctgatggtggcctggcgggtgtccgccagtgacgagcactgccctgagcttcctcctgtggataatagtatcttcgtagctaaggaagtcgagggacagatccttggaacctacgtttgcattaagggctatcatctggtcggtaagaaaacccttttttgtaatgccagcaaggaatgggataacacaaccactgagtgtcgactggggcattgccctgatcccgtcctcgtgaatggcgaattttcaagcagcggccctgtgaacgtgagcgataaaattacgttcatgtgcaacgaccactatatcttgaaaggttcgaacaggtctcagtgtttggaagatcacacgtgggcgcctcctttccctatttgcaaaagccgggactgtgatccccccggaaacccagtgcacggctacttcgaaggaaacaacttcacgcttgggagcacaatcagttattattgtgaagatagatactacttagtcggtgtgcaggagcaacagtgtgtggatggggaatggtcttcagcccttcccgtgtgcaagctgattcaagaagcaccaaagccggagtgtgaaaaagccctactggccttccaggagtcaaagaatctgtgcgaggcgatggaaaactttatgcagcagctgaaagagtctgggatgaccatggaggaactgaaatactccctggaactgaagaaggcagagctgaaagccaaactgctgtag

SEQ ID NO: 183656 - DNA, 759 bp, synthetic construct
  misc_feature 1..759: note = Description of Artificial Sequence: Synthetic coding sequence
  source 1..759: mol_type = other DNA
atgttcttctggtgcgcctgctgcctgatggtggcctggcgggtgtcagcctcagacgcggagcactgccctgaactcccccctgttgataatagcatcttcgtggctaaggaggtcgagggccagattctgggtacatacgtctgcatcaaggggtatcacctcgtgggcaagaagacattgttttgcaatgcaagtaaggaatgggataatacaacaacggaatgccgactgggccactgtcctgatccagttctggttaacggtgaattttcgtcaagcgggcctgttaacgtctctgataaaataacatttatgtgtaatgaccactacattctcaagggttccaatcggagccaatgcttagaggaccatacatgggctccaccattccctatctgcaagtctcgtgattgcgatccccctggaaatcccgtgcacggctatttcgaagggaacaactttactctggggtctaccattagctactactgtgaagataggtactatctcgtcggggtgcaggaacagcagtgtgtggatggagaatggtctagcgcgctgcctgtgtgtaagcttattcaggaagctccaaagcctgaatgtgaaaaggcacttctggcatttcaggagagcaagaatctatgcgaggccatggaaaacttcatgcagcaattgaaggaatctggaatgacaatggaggagcttaaatactcactcgaactgaagaaggccgagctgaaagccaagctcctctag

SEQ ID NO: 183657 - DNA, 759 bp, synthetic construct
  misc_feature 1..759: note = Description of Artificial Sequence: Synthetic coding sequence
  source 1..759: mol_type = other DNA
atgttcttctggtgcgcctgctgcctgatggtggcctggcgggtgagcgcttctgatgctgagcactgccccgaactcccacctgtcgacaatagtattttcgtggcaaaggaagtggaaggacagatcctcgggacctacgtgtgtatcaaaggctaccatctcgtgggcaagaagactctgttctgtaatgcatccaaagagtgggataataccaccacagaatgccgtctggggcactgtcctgaccccgtgctagtcaacggtgagttctccagttctggccccgttaacgtatctgacaagatcacgttcatgtgcaacgaccactacatcttgaaaggctcgaataggtcccagtgtttggaagaccatacctgggccccaccattcccaatatgtaagtccagagattgtgacccccccggcaatccagtgcacggatactttgagggtaacaatttcacgcttggctcaaccatatcttattattgcgaagatagatattatcttgtaggggtccaagaacaacaatgtgtcgatggggaatggagctcagccctgcctgtgtgcaaacttatccaggaagcaccaaaacccgagtgcgaaaaggctctgctcgccttccaggaatctaagaatctttgtgaggccatggagaacttcatgcagcaactcaaggaaagcggcatgactatggaggaattaaaatatagtcttgaactgaaaaaggccgaactgaaggcaaagctgctctag

SEQ ID NO: 183658 - DNA, 657 bp, synthetic construct
  misc_feature 1..657: note = Description of Artificial Sequence: Synthetic coding sequence
  source 1..657: mol_type = other DNA
atggtggcctggcgggtgagcgccagcgacgagcactgccccgagctgccgcccgtcgataactcaattttcgtagcaaaagaggtcgaggggcagatcctggggacctacgtgtgtatcaaaggatatcatctggtgggaaagaagaccctcttctgcaatgcgtcgaaagaatgggataacacaacgacagagtgccggctcggccactgccccgatcccgtgttggttaatggagaattcagtagcagcggacccgtcaacgtttcagataagatcacattcatgtgtaacgatcactacatcctgaaaggatcaaatcgctcccagtgccttgaggatcacacttgggctccccctttccccatctgtaagagcattccccagacacgacccctcccttttcaaccttgctcccctctcttcctgttcctgctgcgccagagcctcgccctgttccctagacttgaatgttcgggccggatcctcgcccattgtaacctccacctccctggatccagttctagccatgcgtctgctagccaagtggcaggaattacgggagcacatcccaggtgggcgaacttttgtatcttctctcgcgactgggtgtccccttgctggccggggtggtcacaaatccctgatttgagatag

SEQ ID NO: 183659 - DNA, 546 bp, synthetic construct
  misc_feature 1..546: note = Description of Artificial Sequence: Synthetic coding sequence
  source 1..546: mol_type = other DNA
atgttcttctggtgcgcctgctgcctgatggtggcctggcgggtgtctgccagtgatgccgagcattgtcccgaactcccacctgttgataattccatcttcgtggcaaaggaggtggaaggacaaattcttggaacttatgtgtgcataaagggctaccacctagtgggcaagaagactctgttctgcaacgccagtaaggaatgggacaacacaacaactgagtgtaggctgggacactgcccggatcctgtactggttaatggagagtttagctcctctggccccgtcaatgtgtcggacaaaattacgttcatgtgtaatgaccactatattctgaaggggtctaaccgaagccagtgcctcgaagaccatacttgggcacccccgttcccaatttgcaaatcccgcgactgtgaccctccaggcaatcctgtccacggctatttcgaggggaataacttcaccctcggcagcaccatctcttattactgtgaggatcgctattacttagtgggagtgcaggagcagcagtgtgtggactag

SEQ ID NO: 183660 - DNA, 5235 bp, synthetic construct
  misc_feature 1..5235: note = Description of Artificial Sequence: Synthetic coding sequence
  source 1..5235: mol_type = other DNA
atgcggctgctgtggggcctgatctgggccagcagcttcttcaccctctcactgcagaaaccacgactcctgcttttctctccctcagtggtgcatctcggagtgccgctgtctgtgggagtccagctgcaggatgtgccccgtggccaggtcgtgaaggggagcgtcttcctgcggaaccctagtagaaataatgtgccatgtagccccaaggtggacttcaccctttcaagcgaacgcgacttcgccttgctgagcttacaagtcccgctgaaagacgccaagtcctgcggtcttcatcagctactgcgcgggccggaggttcaattggttgcacactctccttggctgaaagacagcctgtcccgaactaccaacattcaggggatcaaccttttgtttagttcacgacgagggcatctgttcctgcagacagatcaaccgatctacaaccctggtcagcgcgttcggtatcgagtgttcgcactggaccagaagatgcggccttccactgacacaattacagtgatggtggagaactctcacgggctgcgggtgcgtaaaaaagaggtgtatatgccaagctcaatattccaggacgacttcgtgatccccgatatcagtgaaccggggacttggaaaatctcagctagattcagcgacggactcgagagcaattcctcaacacaattcgaggttaagaaatatgtgttgcctaactttgaagtcaagatcacacccggcaagccgtatattctgaccgtccccggtcacctggatgagatgcagttggatatccaggcgcgatacatatacgggaaacccgtgcagggtgtcgcatatgtgaggtttggcctgttagacgaggacggcaagaaaactttttttagggggctggaatcccagaccaagctcgtaaatggacagtcccatattagtctatcaaaggccgagttccaagatgccctggagaaactcaatatgggtattacagacttacaggggttaaggctgtatgtcgcagccgctataatcgaataccccggaggtgaaatggaagaagctgagctcaccagctggtactttgtctcttcgcccttctcattggacctgtcaaagaccaaacggcaccttgtgcctggcgcgccttttttgctccaggccctggtacgagagatgtctggcagtcccgcctctggaataccagtgaaagtttcagcaaccgtctcttccccaggctccgtccctgaagtccaagacatccaacagaacaccgatggatccggtcaggtgtctatccccataattatcccccagacaattagcgagctgcagctgagcgtgtcggccggctccccacacccggcgatagctcgtcttactgtcgcggcccccccttctggaggacctggattcctgagcattgagtggcctgacagccggcctcccagagtgggcgacactctgaacctgaacctgagagccgtgggctccggggcaaccttctctcactactattacatgattctgtcacggggccagatcgtctttatgaacagggagccaaaaaggactctaacaagtgtctcagtcttcgttgaccaccacctggcaccttccttctacttcgtcgccttctactatcacggcgatcatccagtggccaacagcttgagggtagacgtccaggccggcgcctgtgaaggcaagttggagctgtccgtggatggggctaagcagtaccggaacggcgaatccgtcaaactgcacctggagacagactccctcgctcttgtggctctcggagccctggatacggctctatatgctgcaggcagcaagagccataagcctttgaacatggggaaagtgttcgaagccatgaactcctatgaccttgggtgcggaccggggggcggcgatagtgctttgcaggtgtttcaggccgcgggcctggccttctccgatggggatcagtggacactgtccaggaaaaggctcagctgtcccaaggagaaaaccacccgcaaaaagcgaaacgttaatttccagaaggctattaatgaaaagttagggcagtatgctagtccaaccgccaaaaggtgttgtcaggacggggtcacacggctaccgatgatgcgctcctgcgagcagagagcagccagggtccagcagccggactgccgggagcctttcttgagttgctgccaatttgctgaatcactgaggaagaaatcacgggataaaggccaagccggactccagagggctctggaaattctgcaggaggaagacttgatagacgaagatgatattccggtgcgcagtttttttcccgagaactggctgtggagggtggaaactgtggaccgcttccagatccttaccctgtggttgccggatagcttgacaacttgggagatacatggcctgtccctgagtaagaccaagggcctctgtgtagcaacccctgtgcagctgcgagtgtttagggagttccacctgcatctgcgactccctatgtctgttcgtcgcttcgaacagcttgagctgagacccgttctatataactacctggataaaaacttgactgtttctgtgcacgtttcccctgttgaaggtttgtgtctggcggggggcggaggactggctcagcaggtgctggtaccagcagggagcgctaggcctgtggcgtttagtgtcgtccccactgcggccgccgccgtttcattgaaggtcgtggctaggggttccttcgaattcccagtgggagatgccgttagtaaagtgttgcagattgaaaaggagggagcgatccacagggaagagttggtctacgagttgaatcccttggaccaccgaggtcgcaccctagaaatcccgggtaactccgacccaaatatgatcccagatggtgacttcaacagttatgtgcgggtaacagccagtgatccgttagatacactggggagtgaaggcgccttatcaccaggcggcgtagcatctctactgaggctcccccgaggatgcggggagcaaacaatgatctacttagcccccaccctggctgcctcccgttatctggataagacagaacagtggtccacactgcccccggaaaccaaagaccatgctgtcgatcttatccagaaaggctatatgaggatccagcagttcagaaaggcagacggctcgtacgccgcctggctcagcagggatagcagtacctggttgacagcttttgtactgaaggtgctgagtctggcccaggagcaagtcggtgggtctcctgagaaattacaggaaacaagcaactggctgctttcccagcagcaggcggatggatctttccaagacccctgcccagtgcttgacaggtctatgcaaggcgggttggtgggcaacgatgagacagtcgcactcacagcctttgtgacaatcgcgctccatcacggcctcgcagtgtttcaggacgaaggcgctgaaccccttaaacaaagggtagaagctagcatatcaaaggccaattccttcctaggagaaaaagcatccgcgggcctcttgggggcacacgcggccgctatcaccgcctatgcactgacgctcaccaaagcccctgtggacctcctcggagtagctcacaataatctgatggccatggcccaggaaacgggggataacttatactgggggtctgtcaccggctcccagagcaatgcagtgtccccaacacccgctcccagaaaccccagtgatcccatgccacaggcccccgcactttggatcgaaacgacagcttatgcgttgctgcacttactcctccatgagggcaaagcagagatggccgaccaggccgctgcatggcttacacggcagggctcatttcaggggggttttagatctacgcaggatacagtgatcgccctggatgcccttagcgcctactggattgcctctcacactacagaagaaagaggactgaacgtgacgttgagcagcaccggcaggaatggttttaagagccatgcattgcagctgaataaccggcaaattagaggattggaggaagagctgcaattcagtctggggtcaaagatcaacgtgaaggtgggagggaactctaaagggacccttaaggtgcttcgaacatacaatgtccttgatatgaagaataccacctgccaggacctacaaatcgaagtgaccgtgaaggggcatgtggaatacactatggaggctaacgaggactacgaggactacgaatacgacgagctgccggcaaaggacgatcccgacgctcccctgcaaccggtaacccccctccagttgttcgaagggcggaggaaccgaagaagaagagaggctcccaaagtcgtggaggaacaagagagcagagtgcactacacagtgtgcatctggagaaatgggaaagtagggctgtccgggatggccatcgccgacgtaacactactgagtggcttccatgcacttcgggccgacctcgagaaattgacttccctctcagacaggtatgtgagccatttcgagactgagggccctcatgtgctgttatatttcgattctgtgcctacaagccgcgaatgcgtcggatttgaagcagtgcaggaggtgcccgtaggactggtgcagccagcgtccgctacactgtacgattattataatcctgagcgccgttgctcagtcttctacggggccccttccaaatctaggctcctggccacgctctgctccgctgaagtttgccagtgtgccgagggtaagtgccctcgccaacgcagggcactggagcgagggctgcaagacgaagacgggtatcgtatgaagtttgcttgctactacccacgtgtggagtatgggttccaagttaaggtgctaagggaagactcacgggccgcattccgcctctttgagactaagatcacacaggtcctgcactttaccaaggatgtaaaggctgccgccaaccaaatgagaaattttctcgtgagggcctcttgtagactgaggctcgagccaggcaaggaatacctaatcatgggtctggacggggccacttacgacctcgaggggcatccacagtatctgcttgatagcaactcctggattgaagagatgcctagcgagcgcctgtgtaggtccactaggcagcgggcagcctgcgcgcagctgaatgacttcctgcaggaatacggcacccagggctgccaggtatag

SEQ ID NO: 183661 - DNA, 5235 bp, synthetic construct
  misc_feature 1..5235: note = Description of Artificial Sequence: Synthetic coding sequence
  source 1..5235: mol_type = other DNA
atgcggctgctgtggggcctgatctgggccagcagcttcttcaccttgagtttgcagaaacccagactgctccttttctcaccatctgtggtccacctcggggtacccttatccgtgggagttcaactgcaggatgtgcccaggggacaagtagtgaagggatctgtattcctgcgaaacccatcaagaaacaatgtgccatgcagtccaaaagtcgactttactttgtccagtgagcgggacttcgccttactgtccttgcaggtaccgttgaaagatgctaagagctgcggactgcatcagttgctgcggggacccgaagtacagctggtcgcacattccccatggctgaaggacagcctgtctcgcacgaccaatattcagggcatcaacttgctgttctccagcagacgaggccacctctttctgcaaaccgaccagcccatctacaatccagggcagcgggtgagatacagggtgttcgctttggatcaaaagatgcgccccagcacagacaccataaccgtgatggtggaaaactcacatggcctcagagtcagaaagaaggaagtctatatgcccagttctatctttcaggatgactttgtgattcccgacattagcgagcctgggacatggaaaatctcggcaaggtttagcgacggactggaaagcaactcatcaacccagtttgaggtcaagaaatacgttctgcctaactttgaggtaaagattacacctggaaaaccctatatactgacggttccagggcatttggatgaaatgcagttggacatccaggcacgatacatctacggaaaacctgtgcaaggggtggcctacgtgcggtttggtcttttagatgaagatggcaaaaaaacgtttttcagaggccttgaaagccagactaagctggtaaatggccagtcccacatatcgctgagcaaagccgagttccaggacgctttggagaagttaaatatgggcattactgacctgcagggactcagactgtatgtcgcggcagccatcattgaaagtcccgggggagaaatggaagaagctgagttgacttcatggtacttcgtcagcagtccattttccctggacctcagtaagaccaagaggcatctcgtcccaggtgccccatttctactccaggctctagtcagagaaatgagcggcagccctgcctctggcattcccgtcaaagtgtccgcaactgtctcttcccctggctcagtccctgaagtacaagatatccagcagaacactgatgggtccggccaagtttcgattccaattattataccccagaccattagcgagttacagctctcagtgtccgccggaagtccccaccctgccattgcacgcttgaccgtcgccgccccgccaagcgggggccccggttttctttccattgagcgtcctgatagcaggccacccagggtaggcgacacattgaacttgaatttacgcgccgtgggaagcggagccaccttttcacactattattacatgatcctctcacgtggacaaatcgtgtttatgaatagagagcctaagcggacgttgacctcagtgtcagtgttcgtcgaccatcacctggccccttccttctacttcgttgccttttactaccatggggatcacccggtcgccaactcactccgagtggacgtccaggccggtgcatgtgaagggaaattggagctgtctgtggacggcgctaagcagtatcgcaacggggagtctgtgaagctgcatttagagactgatagcctagcactggttgcgttaggcgctctggatactgcgctgtatgccgccgggtctaaatcacacaagcctctgaacatgggtaaggtgtttgaggcaatgaactcctacgacctcggatgcggaccggggggtggagattccgctttgcaagtctttcaggctgcaggcctggcttttagcgacggggatcaatggaccctttcacggaaacggctgtcgtgccccaaagaaaagaccacgaggaaaaaaaggaatgtcaatttccagaaagcgatcaacgagaaactaggccagtatgcttcacctacagcgaagagatgttgtcaagacggcgtgactagactgccaatgatgaggagttgcgagcaacgggccgctcgcgtgcagcagccagactgcagggaaccctttctctcctgttgccagtttgcagagtctctgcggaaaaagagcagagacaaagggcaggctggtctgcaaagggccttagaaattctgcaagaggaggatttgatcgatgaggacgacatcccagtcagaagcttttttcctgagaactggctctggcgcgtagagaccgtggaccggtttcaaatactcactctttggctacccgatagcctcactacttgggaaatccatggcctgagtctgagcaagacgaagggactatgcgtggcaacacctgtacaactaagggtgttcagggagtttcatcttcacctacggcttcctatgagtgtgaggcggttcgaacaactggaactacgccccgtcctgtacaactatctggacaagaaccttactgtatccgtacacgtcagtccggtggaaggcctgtgcttggcaggaggaggaggcttagctcagcaggtcctcgtgccggcggggtcagcaaggcccgtggcattcagtgtcgtgcctactgctgctgcggcagtcagcctgaaagttgtggcaagaggtagctttgaattccctgttggcgatgccgtgagcaaagtgctgcaaattgaaaaggaaggggcaattcacagggaagagctggtttacgagctaaatccactggaccacagggggcgaactcttgagattccaggcaattcagatcctaacatgattccagatggagattttaatagctatgtgagggtgacggcctcagaccctctagatacactcgggagcgagggcgccctgtcccccggcggtgtggctagtttgcttagactgcctcgagggtgcggggaacagaccatgatctatctggctcctaccctggctgcatcccggtacctggataaaaccgaacagtggtccacactgcctcccgagaccaaggaccatgccgtggacctcattcagaagggatatatgcgcatccaacaattcagaaaggctgatgggagctatgcagcatggctgtcaagggacagttccacgtggcttaccgccttcgtcctgaaagtgttgtcgctggctcaagaacaggtggggggatcgcctgagaaactgcaggaaacctcgaattggctgctctcacagcaacaggcggatggaagttttcaggacccttgtcccgtgctagaccgctccatgcagggagggctcgtgggcaacgacgaaacagtagcacttacggcctttgttaccatcgccctccatcatgggcttgccgtgtttcaagatgaaggggctgagccgctgaaacaacgcgttgaagcgtctatcagtaaggcaagttctttcttaggggagaaagctagtgcgggcctgcttggtgcccacgccgccgccattaccgcatacgccttgaccctgaccaaggctcccgttgatcttcttggcgtggcacacaacaacctgatggccatggcgcaggaaacaggcgacaacctttactggggatccgtgactggcagccaatcaaacgccgtgtctcccacacccgcaccgaggaacccgagcgatcccatgccccaagctccagcattgtggatagagaccacagcctacgcgctcttgcatttgctgctgcatgagggtaaagcagagatggccgatcaggccgcagcatggcttacccggcaaggctcatttcagggaggtttccggtcaacccaggacactgtaattgcccttgatgccctgtctgcttattggatcgccagccataccacagaagaaagaggcctgaatgttacactgtcgtctaccggcaggaatggttttaaatctcatgcactacagctaaacaataggcagataagaggactcgaagaggagctgcagttctcgctgggctcaaagattaatgtgaaggttggcggaaactccaaaggcacactcaaagtgttgaggacgtacaacgtcctggacatgaagaataccacctgccaggaccttcagatagaagtcactgtcaaaggccacgtcgaatataccatggaggccaatgaagattacgaagattatgaatatgacgagttacccgctaaagacgaccccgatgcacccctccagccggtgacaccactccaactgttcgagggacggagaaatcgcaggcgtcgcgaggccccaaaggtagtcgaagagcaggagagccgcgtccactacacagtgtgcatctggcgtaacggaaaagtgggcttgtcaggaatggctattgcggacgttactttgctgtccgggttccatgcactgcgcgctgacttggagaagctgacctccctgtccgatagatacgtgagccattttgagaccgagggccctcacgtgcttctctactttgatagtgtgccaacatcacgcgaatgtgtcggctttgaggcagttcaagaggtccccgtggggctggtgcaaccagcttcagctactctgtacgactactacaaccccgaacgcaggtgtagtgtgttttatggggccccctcaaagagccgactcttggctactctctgctccgcagaggtttgccagtgtgctgaggggaaatgtccacgtcaaaggagagccctcgagagaggcctccaggatgaagacggctacagaatgaaatttgcgtgctactacccaagggtcgagtatggttttcaggtgaaggtcctgcgggaagattcacgtgctgcattccggctcttcgaaacaaagatcacccaggtgctgcatttcactaaagacgtcaaagccgccgcgaatcagatgcggaacttcctggttcgcgcttcctgtagactgcgacttgagccgggtaaagaatacttaattatgggactagatggagccacctatgacctagagggccacccacagtatctcctggattctaacagctggatagaggaaatgccctcagagcggttatgccgatcaactcggcagcgcgccgcgtgcgcccaacttaatgatttcttgcaagagtacggtacacagggatgtcaggtatag

SEQ ID NO: 183662 - DNA, 5235 bp, synthetic construct
  misc_feature 1..5235: note = Description of Artificial Sequence: Synthetic coding sequence
  source 1..5235: mol_type = other DNA
atgcggctgctgtggggcctgatctgggccagcagcttcttcaccctgagcctgcaaaaacccaggcttctgctttttagcccctccgtagtacatctgggcgtgccattgagtgtgggcgtccaactgcaagatgtgcctcgggggcaggtggtgaagggatctgtgtttctacgaaacccctcccggaacaacgttccatgctccccaaaggtggatttcacactctcatcagaacgcgatttcgctctgctgtctcttcaggtaccactgaaagacgccaagtcctgtggtctgcatcagcttctgaggggtcctgaagtccagctcgtggcccattcaccgtggctaaaagacagcttgtctagaacaaccaatatccagggcatcaacctcctgttctcatcaagacgtggtcatctgttccttcagaccgatcagccaatctataacccaggacaacgcgtccgctatcgtgttttcgcccttgatcaaaaaatgcgtccaagcacagacacaattaccgtcatggtggaaaactcacacgggctacgggtgaggaaaaaggaagtctacatgccaagctcaatttttcaggatgacttcgtcatcccagacataagtgagcccgggacatggaagatatccgcacgattcagtgatggcttggaatccaacagttccactcagttcgaggtgaagaagtacgtgttgcctaatttcgaggttaagatcacgccagggaaaccttacatcctgacagtacccggccatctcgacgagatgcaacttgacatacaggcgagatacatttacggcaaacccgtccaaggtgtcgcttacgtgcggtttggactgctagacgaggatggaaaaaagacattcttccgaggacttgagtcgcagaccaaattagtaaatggacagtcgcatatttctctatcaaaagcagaatttcaggatgccctggaaaaactgaatatggggattaccgacctgcaaggactgcgcctgtacgtggccgcagccattattgagtaccccggaggagagatggaagaagccgagctgacctcctggtacttcgtctcctctccattctctctggatctaagcaagacgaaacggcatcttgtgccaggtgcaccttttctgctgcaggccctggttcgggagatgtccggatcacctgcatccggaatccccgttaaagtttcggccactgtttctagtcccggttctgttcccgaggtgcaggatatccagcagaacaccgacggctcaggccaggtatcgatcccaattatcatcccccagactatcagtgagctccaactgtcggtgagtgcaggctcccctcacccagccatagctcgtctgactgtggcagcccctcctagcggggggcctggctttttgtccatagagagaccggattccagaccccctcgggtgggtgacaccctgaatctgaatttgcgagctgtagggagcggcgctacgttctcccactattattacatgattctgtcaagagggcagattgtgtttatgaatagggaacccaagcggacactgaccagtgtgagcgtgttcgttgaccatcacctggcaccttccttttatttcgtcgcattctattatcacggggaccaccccgtagccaacagccttcgcgtggatgtgcaggctggggcttgtgagggtaagctagaactttctgtggatggtgcgaagcaatacagaaatggtgagtccgtgaagctgcatctggaaaccgatagcctcgcccttgttgcactgggcgcccttgacactgctctctacgcagctgggtccaaatcccataaaccgctcaacatgggtaaagtgtttgaggcgatgaacagctacgatttgggatgcgggcctggagggggggattcagcccttcaggtgtttcaagccgccggactcgcattttcagatggcgatcagtggacactgagtaggaaaagactaagctgccccaaggaaaaaaccactcgcaaaaagcgcaatgttaatttccagaaagctatcaacgagaagttagggcagtacgcgtcacctacagccaagcgttgttgtcaggatggcgttaccagactgcccatgatgcggagctgcgagcagcgggccgcccgggtacaacagccggattgtcgggagcccttcctgtcatgttgccaatttgcggaatctcttagaaagaagtccagagacaagggtcaggcgggtctccaacgcgcgctggagatccttcaggaagaagatttgattgatgaagatgacatcccagtgagaagttttttccctgagaactggctctggcgagtggagacggtcgatcggtttcagatcctcactttgtggctgccagactcactgacaacttgggaaatccacggactgtcactctctaagaccaaaggcctttgtgtggccacccccgttcagttgagggtttttcgcgagttccacctccaccttcgtctgcctatgagcgtgaggcggtttgagcagctcgaactgagaccagtactgtacaattaccttgacaagaatttaactgtgtccgtacacgtgagccccgttgaaggtctgtgtctcgctggcggcggcggattggcccagcaggtgctggttccagccggatctgcccggcctgtggcgttcagcgttgtgccaaccgcagcggcagccgtctctctcaaagtggtcgccagagggtcatttgagttccccgtcggcgacgccgtgtccaaggtccttcaaattgaaaaggagggcgccattcaccgagaagaacttgtgtacgaactcaaccccctggaccaccgcgggcggactttagagatccccggaaactctgaccctaatatgatcccggacggcgattttaacagctacgtacgtgtcaccgcgagtgacccattggataccctaggttccgagggggcgctcagtcctggtggcgtggcatccctactaagactgccacgtggctgtggcgagcagaccatgatctatctggctcccaccttggccgcctcccgctacttggacaagacagagcaatggagcacccttccacctgagacaaaggatcatgccgtcgatctcatccagaagggatatatgcgcatccagcagtttaggaaggcagatgggagctacgctgcctggctctcccgagactcatctacatggctcacagccttcgtcttaaaagtactgtccttagctcaagagcaagtaggtggctctcctgagaagctgcaggagacctcaaactggctgcttagccagcaacaggcagacggctctttccaagatccctgccccgtattggaccgtagcatgcaaggaggactggtagggaacgatgaaaccgtcgcattgactgccttcgtcacaatcgctctccaccatggcttggcagttttccaggatgaaggcgccgaacccctcaaacagcgcgtggaggctagcatttcgaaagctaactccttcctaggagagaaagcgagtgccggcctcctgggtgcacatgctgccgctataaccgcttacgcactgacgctcactaaggcccccgtagaccttctgggggttgcacataataatcttatggctatggcacaagaaactggagacaatctgtactggggctctgtaacaggatcccaatccaacgctgtgagcccaacccccgctcccaggaaccccagcgatcccatgccacaggcgccagctctctggatcgagacgacggcgtatgcccttctccacctcttgcttcacgagggcaaggctgagatggctgaccaggctgcagcctggctgactaggcagggtagcttccagggaggttttcggtcaacccaggacacagttattgccttagatgccctgtccgcatactggatagcctctcacaccactgaagaaagaggactgaacgttaccctgagcagtactggaagaaacggattcaagtcccacgcacttcaattgaataaccgacagatacgaggattagaagaagagcttcagttcagcctgggctccaagataaatgttaaggtggggggtaacagcaaaggcactttaaaagtactgcgaacttataacgttctcgatatgaagaacacaacttgccaggatctgcagattgaggttacagtcaaaggtcatgtggagtatacaatggaggccaacgaagattatgaggactatgagtatgacgagttacctgcgaaggacgatcctgacgctcctttgcagcccgtcacaccattgcagttgttcgaaggacgccggaaccgcagacgtcgagaggccccaaaggtggtagaagaacaagagagcagggtgcattacaccgtgtgtatttggaggaacggaaaagtgggcctatcaggaatggcaatagcagacgtgacactgctgagcgggtttcacgcacttagggcagacctcgaaaagttaacatcactgtccgaccgctacgtttcacactttgaaactgaagggccccacgtgctcctgtattttgatagtgtaccgactagtagggagtgcgtgggttttgaagccgttcaagaggtccctgttggcctggtccagcccgcaagcgccacgctgtatgactactataaccccgagagaagatgcagcgttttttatggagcaccatccaaatcacggctgctggctaccctctgctctgcggaagtttgtcagtgcgcggaaggcaagtgcccaaggcagcgccgcgcactggagcgggggctacaggacgaggatggttaccgcatgaagtttgcatgctactacccccgcgttgagtatgggtttcaggtgaaggttcttagagaagatagtagggcggcttttaggctattcgaaaccaagataacccaggtgctgcattttactaaagacgtcaaagccgctgcgaaccagatgcgcaactttctggttcgcgcctcctgccgacttaggctggaaccgggtaaggaatatttgatcatgggcctggacggggccacatacgatttggaaggacacccccagtatctcttggattccaattcatggatcgaagagatgccgtccgagagactgtgtaggtccacccgtcagcgcgccgcctgtgcgcaactaaacgacttcctccaagaatatggtacccagggatgccaggtgtag

SEQ ID NO: 183663 - DNA, 5235 bp, synthetic construct
  misc_feature 1..5235: note = Description of Artificial Sequence: Synthetic coding sequence
  source 1..5235: mol_type = other DNA
atgcggctgctgtggggcctgatctgggccagcagcttcttcaccctgagtctccagaaaccccgactgctcttgttttcacctagtgtcgtgcatctcggtgttccccttagcgtcggtgtgcagctccaggacgtgccgcgcggtcaggttgtgaaggggtccgtcttcttacggaacccctctcgcaacaatgtgccatgttctcccaaagtcgacttcaccctcagttccgagagggactttgcgctgttatcgctccaagtccctttgaaagacgctaagagctgcggtctgcaccaattgctgcgtggaccagaggtgcagctggttgcccactctccgtggttaaaggattcgctttccaggactacaaacatacaggggatcaatctccttttctcctcaagaagaggtcacctttttctgcagactgatcagcctatttacaaccccgggcagcgcgtgcgctatagggtcttcgcgttagaccaaaaaatgcggccaagtacggacaccatcaccgtgatggtagagaattcacatgggctgcgggttcgcaagaaggaggtatatatgccaagttccatatttcaggatgactttgtcattcccgacatctccgagccaggaacatggaagatctcagcaaggttctcggacggactggaaagtaacagctccactcagtttgaagtgaagaagtacgttctacccaacttcgaggtaaagatcaccccgggtaagccttacatcctgaccgtgcccgggcatctggatgaaatgcaattggacattcaggcgcggtatatctacggcaagcccgtgcagggcgttgcgtacgtaaggtttgggctgttggatgaggacggcaagaaaacattctttcgcggcctcgagtctcagactaaactggtgaacgggcagagtcatatttccctttccaaggctgagtttcaggacgctctcgagaaactgaacatgggcatcaccgatctccagggcctgagattgtatgtcgccgccgcaattatcgaatcgcctgggggcgaaatggaggaggctgagctcacatcctggtactttgtgagctcccctttctcccttgatctgtctaagaccaagaggcacttggtgccaggcgcccctttcttgctacaggcattggttagggagatgtcaggttctcctgcatcaggcatccctgtcaaggtgtctgccacggtgtcatcaccaggaagcgtgccggaagtgcaggacatccaacagaacactgatgggtccgggcaagtgtccatccctattatcatccctcagaccatctccgaactgcagctgagcgtgagtgcaggtagcccccatcccgcaatcgcacggcttaccgtagccgcacccccaagtgggggcccaggattccttagcatcgagcgcccagatagcagacctccccgtgttggtgacaccctcaacctcaatctgagggctgtcggctcaggtgccaccttctctcactactactatatgatactgtctagaggccagattgttttcatgaaccgggaaccaaaaaggactctaacatctgtcagcgttttcgtggatcaccacctcgctccgtcgttttatttcgtggctttttattaccacggcgaccacccggttgctaacagtttgagggtggatgttcaggctggtgcttgcgagggcaagttggaactcagcgtcgacggtgctaaacaatatagaaatggcgagtctgtcaagcttcacctggagactgactcgttggccctggtggctttgggcgcattggataccgccctgtacgcggctggatccaagtctcataaacccttgaatatgggtaaggtgtttgaggctatgaacagctacgatctggggtgtggccccggcggtggagacagtgccctccaggtgttccaagccgctggcctggccttcagtgatggagatcagtggactctctcgcgcaagcgcctttcctgtcctaaggagaagaccacacgcaaaaaacgaaacgtcaactttcaaaaggccatcaatgagaagttaggtcaatatgcctcgccaactgcaaagaggtgctgtcaggatggggtgactcgcctgcctatgatgagaagttgcgagcagagagcagctcgggtccagcaaccagactgcagagagcccttcctgtcatgttgtcagtttgctgagtccctgcggaagaaatccagagacaaggggcaggctggactgcagcgcgctctggagatcctccaggaggaggaccttatagatgaggacgacatccctgtgcggagtttcttcccagagaactggctctggcgggtggagaccgttgaccgttttcagatcctgacgttgtggctcccggattccctgaccacctgggagatccacgggctctcattgtccaagactaaagggctgtgcgtggcaacgccagtacagctaagagtttttcgggaatttcacctgcatctgcggttgcctatgtctgtccgccgctttgagcagttggaacttcgtcctgtcctttataactatcttgataagaaccttacagtgtctgtccacgtctctccagtagagggtctgtgtttggctggaggcggtggactggctcagcaggtactggtgcctgcgggctcagcgcgaccagtggccttctctgtggtcccaacagccgccgctgctgttagcttgaaagtggttgcaagaggatcatttgagttcccggtaggtgatgctgtgtccaaagtgctgcaaattgagaaggagggagctattcatcgggaggagctggtgtacgagctaaatcccttggatcaccgcggaagaacgctggagatccctggtaattctgatcccaatatgattcccgatggggacttcaatagctatgtgagggtaacagcatccgatcccctggacacactggggtccgagggcgctctctccccgggaggggttgcgtcgctcctgcggcttccccgggggtgtggcgagcagaccatgatttatttggcccccactctcgccgcatcaaggtatttggataagaccgaacagtggagcactctacctcctgagacaaaagaccatgccgtcgatctcattcagaaagggtacatgaggatccagcagtttagaaaggctgatggatcctacgctgcatggctgtccagagattcttccacttggttaactgcgttcgttttgaaagtgcttagtctcgctcaggaacaagttggcggatctccggagaagttacaggaaacatcaaattggctgctgagccagcagcaggcagacggaagttttcaggatccatgtcccgtgctcgataggagcatgcagggagggctggtagggaatgacgagacagtggctcttacagcatttgtcactattgcccttcatcacggactcgctgtgtttcaagatgagggagcagaacctttgaaacagcgagtggaagccagcatttccaaggccaacagcttcctgggcgagaaggcaagcgctggattgttgggtgcccacgcagccgccataaccgcttatgccctcacactcacaaaagcccccgtcgacctgttgggcgtggctcacaataatttgatggccatggcccaggagaccggtgacaacctctactggggctccgtgacaggaagtcagagcaatgcagtgagcccaacaccagctccgaggaatcccagcgaccctatgcctcaggcaccagccctatggattgagacaacagcttatgctctgctccacctcttgcttcacgagggaaaagctgaaatggctgaccaggctagcgcatggctcacacgccagggctcattccagggaggcttccgcagcactcaggacactgttatagccctggacgctctgtcagcctattggattgcctctcatacaaccgaagaacgggggcttaacgtcactctgtcgtccaccggcagaaacggctttaagagtcatgctctccagctaaacaatcgccagattcgcgggctggaggaggagcttcagttctccctaggatccaagatcaatgttaaagtgggcggtaacagcaagggcactctgaaggtgttgcgcacgtataatgtgctggatatgaaaaacactacttgtcaggacctgcagatcgaagtgaccgttaaaggacatgtggagtataccatggaggctaatgaggactacgaggactatgagtatgatgaactccccgccaaggatgacccagatgcacctctgcagcccgtgactcccctccagctgttcgaaggtagaaggaatagacgaaggcgcgaggcccctaaggttgtagaggaacaggagagcagagttcactacaccgtttgtatctggcgtaacggaaaggtgggcctgtcgggtatggcaatcgccgacgtcactctgctcagcggttttcacgcgttaagagccgatttagagaaactcacttccctctcggacagatatgtgagtcacttcgagacagaaggtccgcatgtgctgttgtatttcgactctgtgccaacttcacgagagtgcgtgggattcgaagcagtccaagaggtgccagttggcctggtgcagcctgccagcgcaaccctctatgattactataaccctgagaggcgatgttctgttttttacggggctccttctaagagtagattgttagcgaccttgtgttctgccgaggtttgtcagtgcgcagaaggcaagtgtccccggcaacggcgcgcccttgaacgtgggctgcaagacgaggatggataccgcatgaaattcgcgtgctactatcccagggtcgagtacggctttcaggtcaaggtgctccgggaagattctagagctgctttccggctttttgaaaccaagattacccaggtgcttcactttactaaggatgtgaaagccgcagccaatcagatgcgcaactttctagtgagggcctcctgccggctgaggctcgagccagggaaggagtatctgatcatgggtttggatggcgccacctatgatctggaagggcacccccagtacctgctcgactccaactcctggattgaggagatgccaagcgagaggttgtgtcggagcacaaggcagcgagctgcttgtgcgcagttgaatgatttcttgcaggaatacggcactcagggatgccaggtttag

SEQ ID NO: 183664 - DNA, 5097 bp, synthetic construct
  misc_feature 1..5097: note = Description of Artificial Sequence: Synthetic coding sequence
  source 1..5097: mol_type = other DNA
atgcggctgctgtggggcctgatctgggccagcagcttcttcaccttgtctttgcagaagccccggttgttgctctttagccctagcgtcgtccatctaggtgtgcccctgagcgtgggagtacaattgcaggatgtgcccaggggccaggtagtgaagggcagcgtcttcctgaggaatccatctcgaaataatgtgccctgcagccccaaagtggacttcactctgagcagtgagagagatttcgcactcctcagcctgcaagtgcccttgaaggacgctaagtcctgtgggttgcaccaactgctgcggggtccagaagtccagctggttgctcacagcccatggttgaaggacagcctgtctagaaccacaaatattcagggaattaacctgctctttagctctagacgggggcacctgtttctacagactgatcagccaatctacaacccaggccagagggttcgctaccgcgtgttcgcacttgaccagaagatgcgtccaagtacagacaccataaccgtcatggtggaaaatagtcacggcctcagagtccgtaagaaggaggtgtacatgccttctagcatctttcaggacgatttcgtgattcccgacatcagcgagcccggcacatggaagatcagtgcccgtttctccgacgggctggagtcaaactcttctactcagttcgaggtgaagaagtatgtgctgcctaattttgaagtcaaaatcacgcccggaaagccctacattctcactgtaccaggacatttagacgaaatgcagctcgacattcaggcacgatacatttatggaaagcctgtgcagggagtcgcttacgtcagattcggactactcgacgaggacggcaagaaaacttttttcaggggcctcgagtcacagactaagcttgtcaatggccagagccatatcagcctgagcaaagcggaattccaggatgcactcgagaagctcaacatggggattacggatctgcagggcctgagattgtatgtggcggccgctattatagagtcacccggcggagagatggaagaagccgagctcacgtcatggtattttgtgtcttcccccttttcactggacctctcaaaaaccaaacggcacctggtgccaggggcgccctttcttctccaagcacttgtgagagagatgagcggttcccctgcttccggcataccagtgaaagtatcagcgacagtgtcatcccctggctctgtcccagaagtgcaggacatacagcaaaacactgatggtagtgggcaggtctccataccgattataattccccagacgatttcagaacttcagttatctgtttccgctggtagtccacatcctgccattgcacgattgacagtggccgcccctcctagcggggggcctgggttcttgagcattgagagacccgattctagaccacctcgcgtgggagacaccctgaacctgaacctccgagccgtgggctccggtgcgacgttttctcattactactacatgatcctgtcccgcgggcagattgtgtttatgaatcgggaacccaaaagaacattaacaagcgtgagcgtgttcgtggaccaccacttggcaccctctttttatttcgtcgcattctactatcacggcgatcacccggttgccaactccctcagagtggacgtgcaagccggggcatgtgaaggaaagctggaactttcagtggatggagcgaagcagtacagaaacggagaaagcgtgaaactccacttggaaacagatagcctagccttggtcgccttgggggcccttgacacagccctatatgctgctggatccaagtcacacaaaccactcaatatgggaaaggtcttcgaggcgatgaactcttacgaccttggttgtggtcctggcgggggcgacagcgccctgcaagtcttccaggctgccggcctcgcctttagcgacggagaccagtggacactgagccgtaaacgtttgagctgccctaaggagaaaactacaagaaagaagcgcaatgtgaacttccagaaagccataaatgaaaagctgggccagtatgcctcccccactgccaaacgttgttgtcaggacggcgtcactcggcttcccatgatgagatcgtgtgagcaacgcgcggccagggtgcagcagccagattgcagggagccatttctctcatgctgtcagttcgccgaaagcctgcgcaagaaaagcagggacaagggtcaggccggcctgcaaagagcactcgaaatacttcaggaagaagacctgattgatgaggacgacattccagttagatcattcttccccgaaaattggttatggcgggtggaaactgtagacaggttccagatcttaacactttggctgccggattcactgacaacctgggagatccacggattatctctgagcaagactaagggtctatgtgtggccacacccgtgcagttgcgtgtattcagggaattccacttacatctcagactccccatgtccgtccgaagattcgagcagctcgaactccgacctgtgctgtataattatctcgataaaaacctgactgtgtcagtccatgtgagtcccgtggaaggcctctgtcttgcaggcggcggtggcctggcacagcaagtgttagttcctgccggaagcgctagaccagtagctttcagcgtagtccctacagccgctgctgctgtgtctctgaaagtggttgctcgcgggtcctttgagttccccgtgggcgacgccgtctccaaggtccttcagatcgagaaggaaggcgctatccatcgtgaggagcttgtctatgaattaaatcccctagatcatcgaggccgcaccttggagatccccggtaatagtgatcctaacatgattccagacggagacttcaactcctatgttcgggtgactgcgtctgaccctctggacacactgggttccgaaggcgctctgtctcctgggggggtggcgtcgctgctccggctccctcgcgggtgcggcgaacagaccatgatttacttggcgcccacacttgcggcaagtcgttacctggacaaaactgagcaatggtctactcttcctccggaaacaaaggaccacgctgtggacctcattcagaaaggatatatgagaatccaacagttcaggaaggctgacggcagctacgccgcctggctgagccgcgacagctctacctggctgacagcctttgttctgaaggtcctatccttagcccaggaacaagtcggagggagcccagagaagctgcaggagacttctaattggctgctctcgcagcagcaagccgatggatctttccaggatccatgtcctgtgctggacaggtctatgcaggggggccttgtgggcaacgatgagaccgtcgcactaaccgcattcgtgaccatagccctgcaccacgggctggccgttttccaagatgaaggcgccgagcctctgaagcagcgggtggaagccagcatcagtaaggccaattctttcctgggagaaaaggcctcagccggactcctcggagcacacgctgccgccatcaccgcttacgctctgaccctaactaaggcgcctgtagatctgctgggagtggcccataacaacttgatggcgatggcacaggagaccggggacaacctttactgggggtcagtgacgggatcccagagtaatgccgtatctcccacccctgcccctaggaaccccagcgaccctatgccgcaagcacctgccttgtggatcgagactacggcttatgccttactccatctcctgctccacgagggtaaggcggagatggccgaccaagcctcagcttggctgacccgacagggatctttccagggcggcttccgctcaactcaggataccgtgattgctttggacgcactgtcagcctactggattgcgtctcacaccacagaagagaggggcctgaatgtgacactgagttctaccgggcggaatgggtttaagtcccacgcactccagttaaacaaccgccagatcaggggactggaggaggaactccagttcagcctcggcagcaagatcaatgttaaagttggagggaattcaaaaggtactttaaaggttctgagaacctacaatgtcctggacatgaagaataccacctgccaggatctgcaaatagaggtaacagtgaagggccacgtggagtacacgatggaagctaacgaagattacgaagactacgaatacgacgagctccccgccaaggacgatccggacgcgcccctccaacctgtcacaccccttcagctgttcgagggtcgcagaaacagacgccgtcgcgaggcaccgaagttaaccagtctcagcgatagatacgtctctcacttcgaaacggaaggtccccacgttttactgtatttcgattccgtgcctactagccgtgaatgtgttggtttcgaagcagtgcaggaggtaccagttggattagtccagcctgcttcagcgaccctgtacgactattataaccctgaacgccggtgtagtgtgttctacggagcaccaagcaagtctcggctgctggcgaccctgtgcagcgcagaagtgtgtcagtgcgccgagggtaagtgtccgagacagagacgtgcccttgaacgaggtttacaggatgaggacggctatagaatgaaattcgcatgttactacccacgggtagaatatggatttcaggtaaaggtgcttagggaggattcccgggccgcctttaggctctttgaaactaagatcacccaggtactgcacttcactaaggacgtgaaggcagcggctaaccagatgcgcaattttctagtacgcgcctcctgcaggctgagacttgagcctggtaaggaatacttgatcatgggcctcgacggcgcgacttatgatttggagggccatccccagtacctgctcgattccaacagctggatcgaggaaatgccaagtgaacgcctctgcagatccacccggcagcgggccgcatgtgcccaattgaacgatttcctgcaagagtatggcacacaaggctgccaggtgtag

SEQ ID NO: 183665 - DNA, 813 bp, synthetic construct
  misc_feature 1..813: note = Description of Artificial Sequence: Synthetic coding sequence
  source 1..813: mol_type = other DNA
atgtgccccgaggacagcctgcaggtgcccctgaaggacgccaagagttgtggactgcaccagttgctcagagggcccgaggtccagctcgtggcccattcaccttggcttaaggactctcttagtcgcaccacaaacatccaaggcatcaaccttctattcagctcacgccgaggccacttattcctgcagaccgatcagccgatctacaacccagggcagcgcgtgagataccgagtgttcgctctggaccagaagatgagaccttccacagacactatcaccgttatggtggaaaactcccacggcctccgcgttagaaagaaggaagtctacatgccctcatctatcttccaggatgacttcgtgatacccgacattagtgagcccggaacctggaagatttcagcacgattcagcgatggccttgagtcgaattcttccactcagttcgaggtgaagaaatacgtgttgcccaattttgaggttaagataacccccggcaaaccatacatcctgacggttcctggccatctggacgagatgcagctagatatccaagctcgatatatctacggaaagccagtccagggcgtagcatacgtccgatttgggcttctggatgaggatggaaaaaagacattcttccggggcctggagtctcagactaaactggttaacggacagtcccacatctctctgagcaaggctgagtttcaggatgctcttgaaaaactcaatatggggatcactgatttacaagggctacgcctctatgtggccgctgccatcattgagagtcctggcggctag

SEQ ID NO: 183666 - DNA, 5097 bp, synthetic construct
  misc_feature 1..5097: note = Description of Artificial Sequence: Synthetic coding sequence
  source 1..5097: mol_type = other DNA
atgcggctgctgtggggcctgatctgggccagcagcttcttcaccctatccctgcagaagcctaggctcttgttgttcagtcccagcgtggtccatcttggagtgcctctttccgtgggggttcagttacaagacgtgccaaggggacaagtcgtgaaaggatctgtgtttctcaggaatccctcgcgtaacaatgtgccctgttcacccaaagtcgatttcacactgagctcagaacgcgactttgccctgctctctctccaggttcctctcaaggacgcgaaaagttgtggcttgcaccagctccttcgcgggccagaggttcagctggtcgctcattccccttggctcaaggactcactctccaggactactaatatccagggaattaatttgcttttttccagcagaaggggccatctgtttctgcagaccgaccagcccatttacaatccagggcagcgggtgcggtacagggtctttgccttagatcagaagatgcgcccttcaaccgataccattactgtgatggtcgaaaattctcatggactgcgtgtgcggaagaaggaagtgtatatgcctagttctatcttccaagacgacttcgtcattccagatatttctgaacccggcacatggaaaatatccgctagattcagcgacggcctggagtccaattcctccacacagttcgaagtgaagaagtatgtgctgcccaactttgaggtgaagatcactccaggcaaaccttatattcttactgtgccaggccatttggacgaaatgcagttagacatccaggctcgctatatttacgggaagcccgtccagggtgtggcctatgtgaggttcggcttgctcgatgaggacggcaaaaaaaccttctttcgaggacttgagagtcagacaaagctcgtcaacggccaaagtcacatatctctgagcaaagctgagtttcaggatgccttggaaaaactgaatatgggcattaccgacctgcagggactacgtttgtatgtggccgccgccatcattgaatacccagggggggagatggaagaggctgaactcacctcttggtactttgtttcctcacccttcagcttagacctgtcaaaaacaaagaggcacctggttccaggcgccccttttctgctccaggctctggtgagggagatgagcggatcacctgcctctggcatcccagttaaggtgtctgcaaccgtgtcgtcccctggctccgtgcctgaggtgcaggacatacagcagaacaccgatggctcgggacaggtgagtatccccattatcataccccagaccatatcagagctacaacttagcgtcagcgccggctccccccacccggcaatagcccgacttacagtggccgcccccccaagtggggggcctgggtttctgtccatagagtggcctgactccaggcctcctcgagtgggggataccttgaatctcaatcttagagctgtgggctctggcgccacctttagtcattattattatatgattctgagtagaggtcagatcgtgttcatgaacagagagcctaaacggaccctgacatcggtgtcagtctttgtagaccatcacctggcaccatcattctacttcgtcgccttttactatcacggcgatcatcccgttgcaaactctctgcgagtggacgtgcaggccggggcttgcgagggaaaactggaattgagtgtggatggcgccaagcagtatagaaacggggagtccgtgaaactgcacctagaaaccgactcgctagcattggtagccctaggggcattagacactgccctgtacgcagcgggatccaaaagccacaaaccactgaatatgggcaaagttttcgaagctatgaatagctatgacctgggatgcggacccgggggcggcgactccgctcttcaagtttttcaggccgcagggttggcattctcagacggcgatcaatggacactgagccggaagagactcagttgccctaaggagaaaactactagaaagaaacggaatgttaattttcagaaggctatcaatgagaagctgggacagtacgcatcgcctacggccaagagatgctgtcaagatggcgtcacgaggctgccaatgatgaggagctgcgagcagagggcagcacgggtgcagcagccagactgtcgcgagccttttttgagttgttgccagttcgccgagagcttgcgcaaaaaatctcgggataagggtcaggcaggtctgcaaagggcgctggaaattctgcaggaggaagatctgatcgacgaggatgatatcccagtgaggtcttttttcccagaaaattggttgtggcgggtagagacagtggacaggttccagatcctgactctgtggctccccgactcattaacaacctgggagatacacgggctctctctgagtaaaacgaaaggtctttgcgtcgcaacaccagtccaactgcgcgtgtttagggagtttcacctgcacctgcgtctccccatgagcgtgcggcgctttgagcagctcgaactgcggcctgtgctttacaactacctggataaaaacctcacggttagtgttcacgtgagccctgtggaaggtttgtgcctggcgggcggcggaggacttgcacaacaggttctcgttcccgccggctctgctaggcctgtggcctttagcgttgtgccaaccgcagccgccgcagtaagcctgaaggtggtggcacgtgggtcattcgaatttcccgtgggagatgccgtgtctaaggtgctgcagatagagaaggaaggggccatccatcgagaagaattggtgtatgaacttaatcctttggaccataggggccggaccctagagatccctggcaactccgatcctaacatgatccctgatggcgactttaatagctacgtgagggtgacagcctcggacccactcgacacactgggaagcgaaggcgccctctcacccggcggagtagcctctctgctccgcttgcctcgtggttgtggcgaacaaactatgatctacctggcccccaccttggccgctagcaggtacctcgataagacagagcagtggtcaaccttaccgcccgagacaaaagaccatgctgttgacttgatccagaagggttacatgagaattcagcagttcaggaaagccgatggttcttacgcggcctggctgtcgagagactcctcaacttggttaaccgcttttgtgcttaaagtgttgagccttgcacaggagcaggtggggggctcaccagagaagctccaggagaccagtaactggctgctgtcccagcaacaggctgacggcagcttccaggatccctgtccggtcctagatcggagcatgcagggcggactggtcggcaacgacgaaaccgtggccctcacagcatttgttacgatcgcgctgcaccacggactggctgtatttcaggacgaaggggctgagcctctgaaacagcgcgtcgaagctagcatctcaaaggctaatagcttcctgggcgagaaggcttccgccgggctccttggtgcccacgccgcagccatcaccgcctatgcgctcactttgacaaaagcacctgtggacctgttgggtgtcgcccataataacctgatggctatggcccaagagactggcgataatctatactggggatctgttactggatctcagagcaacgcggtgtcacccacgccagctcccagaaatccttccgatcctatgccccaggctccagccctgtggatagaaacgaccgcatatgcactcctccacctcctcctccatgaagggaaggctgagatggccgatcaagccgctgcatggctgaccagacagggttcattccagggaggcttccgatcaacacaggatacagttatcgccctagatgccctcagcgcctattggattgcctcgcacacaacagaggaacgtggcttgaacgtcacactctccagcaccggccgcaatgggttcaagagtcacgccctgcagctgaacaaccggcagatacgaggcctggaagaggagctgcaattctccttgggctctaagataaacgtcaaagtggggggcaacagtaagggcactctcaaggtccttcgcacctacaacgtactcgatatgaaaaatacaacatgtcaggatctgcagatcgaggtgacagtgaaggggcatgtagagtacactatggaagctaatgaggactacgaggattacgagtacgacgaactgcccgcaaaggacgatccagacgcaccgttacagcctgtaacacctctccagctgttcgagggccgtagaaatcggcgcagacgtgaggcacctaaactgacttctctgagtgacaggtacgtaagccatttcgagacggaaggccctcacgtccttctgtacttcgattctgtcccaacctcccgggagtgtgtgggtttcgaggctgtccaggaggtgccagtggggctcgttcagcctgcctccgctacactttacgactactacaaccccgagcggaggtgcagtgttttctacggcgccccttccaaatcccgcttgttggctacattgtgctccgcggaagtatgtcagtgtgcagagggtaagtgcccaagacagcgaagagctcttgagagaggtcttcaagatgaagatgggtaccgaatgaaatttgcatgctactatccacgagtggagtacggcttccaggtcaaggtgctccgggaagattctcgggccgctttccgcttgtttgaaaccaagatcacccaagtcctccacttcaccaaggacgtgaaagccgcagctaatcagatgcggaatttcctcgtaagagcctcatgccgcctgcggttagagccaggaaaagagtaccttataatgggtttggatggtgctacatacgacctagagggccatccccaatatctgcttgacagtaatagttggatcgaagagatgccgtccgagcgcctgtgtcggtcaaccaggcagagggccgcatgtgcccagctgaacgactttctccaggaatacggcacccagggctgtcaggtttag

SEQ ID NO: 183667 - DNA, 1536 bp, synthetic construct
  misc_feature 1..1536: note = Description of Artificial Sequence: Synthetic coding sequence
  source 1..1536: mol_type = other DNA
atggccaagggcctgagcgtgcagaacgacaagcaccccggctaccagcccgcactgctgctctctcctggagcccccctgtttgccgatgggcctgcttacgccttgcttcatctgctgcttcacgaaggcaaggcagaaatggccgatcaagctgccgcctggctcactaggcagggtagtttccaaggggggtttagatccacccaggatactgttattgctctcgacgccctgagcgcatattggattgcatcacacacaaccgaggagagaggactaaacgtgaccttaagcagtaccgggcgcaatggattcaaaagccatgcgctgcagctgaataaccggcagataagggggttggaggaagaactccagttctcgctgggatctaagatcaacgtgaaggtgggcgggaactccaaaggcacactcaaggtcctgcgtacttataatgtcctggatatgaagaacacgacctgtcaggacctgcagattgaggtgacagtgaaggggcatgtggagtataccatggaggccaatgaggactatgaagactacgagtacgatgagctgccagccaaagacgacccagacgccccactccagcctgtcacacccttacagctgtttgagggccgtcgtaacagaagaagaagggaagcacccaaagtggtagaggaacaggagtctcgcgtgcattacacggtctgtatttggagaaatgggaaagtgggactatctgggatggccatcgcggatgtgacgttgttaagcgggtttcacgccctccgcgccgacttagaaaagcttacttcattgagtgacagatacgtgagccacttcgaaaccgagggcccccatgtactcttatacttcgactctgtgccgacgagcagggaatgcgttggcttcgaagcggttcaagaggtgcctgtgggtctggtccaaccagcttccgccactctttatgactactacaaccccgagcggcgttgttccgtcttctatggcgccccatccaaaagccgtctgcttgctaccctttgtagcgccgaggtttgtcagtgcgctgaagggaagtgccctcggcagagacgggcattagagaggggactccaggacgaggacggatacaggatgaaatttgcctgttactatccacgtgtagagtatggtttccaggtgaaagttctgagagaggatagcagagccgcatttcgcttattcgagaccaagatcacacaagtactccattttactaaagacgtgaaggctgcggccaatcagatgaggaacttcctggtgcgcgctagctgcaggctgcgcttagagcctggtaaggaataccttattatgggtctggatggggctacttacgatttggaggggcatccccaatacctgctcgattccaatagttggatcgaggagatgccttcagagcgtctttgccgctccacccgccagagagctgcttgtgctcagttgaacgacttcttgcaagagtacggaacccagggctgccaggtgtag

SEQ ID NO: 183668 - DNA, 5097 bp, synthetic construct
  misc_feature 1..5097: note = Description of Artificial Sequence: Synthetic coding sequence
  source 1..5097: mol_type = other DNA
atgcggctgctgtggggcctgatctgggccagcagcttcttcaccttgtcgctgcagaagccgcgcttgctgctgttcagcccttcggtggtgcatttgggtgtgcccctttcagttggagtacagcttcaagatgtccccagaggccaagtggtgaaaggatccgtgtttcttagaaacccttctagaaataacgtgccatgcagtccaaaggtggattttacactctcttctgaacgggactttgccttgctcagcctgcaggtccccctcaaggatgctaaaagctgcggcctccatcagctgttgaggggaccagaagtccagcttgtcgctcactccccctggttgaaggactcactgtcacggaccaccaacatacagggaatcaatctcctgtttagttccagacgcgggcacctcttcttgcagacggatcagcccatttataaccctggacaacgggtaaggtatcgcgtgttcgcgctggatcagaagatgagaccatccaccgatacaataaccgtgatggtggaaaatagccacgggttaagggttcgtaagaaagaagtgtatatgccctccagtatctttcaggatgatttcgtaattcctgatattagtgagcccggcacctggaaaatcagcgcccggttttcggacggactcgagtctaattcctcaacacaatttgaggtcaaaaaatacgtcttacccaacttcgaggtgaaaattacacccgggaagccctatatcttgaccgtgccaggacacctagacgaaatgcagttggatatacaggctcgttatatttacggcaaacctgtgcagggggtggcctatgtaaggtttggattattggatgaggatggaaaaaaaactttcttcagggggctggaatcccagactaaactcgtgaatggacagtcccacatctcactgagcaaggctgagttccaagacgccctggagaagttgaacatgggaattacagacctgcagggtctgcgcctttacgtagccgcggctattattgaatcccctgggggcgaaatggaagaagccgaactgaccagctggtatttcgttagctcccctttttccctggacttaagcaagaccaaaaggcatctcgtgccaggggctccattcttactccaggcactggtcagagaaatgagcggttcgccggcctctgggatccccgtgaaggttagtgccactgtctcctcacccggatccgtgccagaagtgcaggacattcagcagaatacagatgggagcggccaggtttccattcctatcattattcctcagaccataagcgagttacagctaagcgtgagtgccggctccccacaccctgcaatcgctagactgactgtggctgccccacccagtgggggccctgggtttttgtctatcgagcgtcctgatagccggccaccccgcgtgggagacaccctcaaccttaatcttagggctgttggcagtggagctacattctctcactattattatatgatactttctagggggcagattgtatttatgaatagggaaccaaaacgcactctgaccagcgtttctgtatttgtggaccaccatctggctcccagcttttattttgtcgctttctactaccacggcgaccaccccgtcgcgaattccctgcgagtggatgttcaggccggagcttgcgagggaaagctcgagctctcagtggacggcgcaaagcagtatagaaatggcgagagtgtgaagttgcacctcgaaacagattcactggcactcgtagccctgggagctctggacactgccctctacgcagccggcagtaaatcacataagcctctcaacatgggcaaagtcttcgaggccatgaatagctatgacctcggctgtggccccggtggaggcgactctgcccttcaggtatttcaagcagctggcctggcttttagcgacggcgatcagtggacactgtctcggaaaaggttgagctgtccaaaggaaaaaaccacaagaaaaaaacgcaatgtcaacttccaaaaggccatcaatgagaagctggggcagtacgcctcacccacggccaagcgctgctgccaggacggagtgactagactccccatgatgcgctcctgcgagcagagggccgcgagagttcaacagccagactgccgggaaccctttctgtcatgctgtcagtttgcagagtcactgagaaagaagagtcgggataaaggtcaggcggggctgcagagggccctggagatattacaggaggaggacctcatagacgaagatgatatcccagtgaggtctttttttcccgaaaattggttgtggcgggtggaaacggtcgatcgttttcagatcctgacattgtggcttccagatagcctgaccacatgggagatccacggcctcagtctgtcaaaaactaagggcctgtgtgtggccactcctgtgcaattgagggtgtttcgggagttccacctgcacctgagattgcccatgtctgtccgccgattcgagcagctcgagttacgacccgtgctgtacaattacctggacaagaatctgacagtgagtgtgcacgtgagccccgtggagggcctctgtctggcagggggaggaggcctggctcagcaggtcctggtgccagcaggcagcgccagaccagtggccttctcggtcgtgccaaccgcagctgccgcggttagcctcaaggtcgtggcaagaggctcatttgagttccctgtgggggacgccgtgtctaaagtcttgcagatagagaaggagggagccatccaccgtgaggagctcgtctacgagcttaacccactagatcatcgcggcagaaccctggagatccctggcaattctgatcctaatatgattcctgatggcgactttaatagctatgtccgggttacggcgagcgacccccttgataccctcggcagtgagggagctctgagtcccgggggcgtcgcttctcttctgcgcctacccaggggctgtggtgagcagacgatgatataccttgctcccaccctggctgcgtctcggtatctagataaaaccgaacagtggtctacactgcctccagaaacaaaggatcacgcagtcgacctgatacagaaaggctatatgcggatccagcagtttaggaaagcggatggatcctacgctgcttggctgagcagagatagcagcacttggttaacagcttttgtgctcaaagtactgtccttggctcaggagcaggtcgggggcagccccgaaaaattgcaagaaacatccaattggttgctcagccaacaacaagcggacgggagcttccaggacccatgccccgtgctagaccgttctatgcagggtggcctggttggaaacgatgagacagtggcactgacagcctttgtgactatcgccctccatcatggtctggctgtgtttcaggatgagggtgcagaacccctgaaacaacgtgtcgaggcttccatttctaaagcttcctctttcctcggagaaaaggcatccgccggcttgctgggggcacatgccgcagccatcactgcctatgccttaacccttactaaggcccctgtggatctcctgggagttgctcacaataatttgatggccatggcccaggaaaccggcgataatttgtactggggatccgttaccggctcacagtcgaacgccgtctctccaacacctgcccccagaaatccaagtgaccccatgcctcaagccccggcgctgtggatcgagactacagcctatgcccttttgcacctgcttctgcacgaaggcaaagctgaaatggcagaccaggcagcagcatggctcactcgacaaggttcctttcagggaggatttcgaagcacacaggatactgtcattgccctggacgctctatccgcctactggatagcatcgcacactaccgaggagagggggttgaacgtgactctttccagcaccggcagaaatggatttaaatcgcatgcactccaattgaacaatagacagattcgtggcctggaagaggagcttcagtttagtttaggctctaaaattaatgttaaggtgggggggaattctaaggggactttaaaggtgctcagaacctataatgtgctggacatgaagaacacaacatgccaggacctccagatcgaggtcacggtgaaagggcatgtcgaatatacaatggaagccaacgaggactacgaagactacgaatacgacgaactgcccgctaaggacgatcccgacgcccctctacagcccgtcacgcccctccaattatttgagggacgccggaaccgcagacgcagagaggcgcccaagcttacttccttgtcggaccgatatgtctcacacttcgagaccgaagggccacacgtactcctgtattttgatagcgtgccaacatccagggaatgtgttggcttcgaagctgtgcaagaggtcccagtaggactggtgcagcctgccagcgctacactgtatgactattacaatcccgaaagaaggtgtagcgtgttctatggagcaccttctaagagcagactccttgctacgctgtgctctgccgaggtgtgtcaatgcgctgagggcaaatgccccaggcagcggcgcgcactggagcgtggcctgcaagatgaggatggttatagaatgaaatttgcgtgttactatcctagagttgagtacggtttccaggtaaaggtgctgagagaggactcgagggcggccttcaggctctttgagactaaaatcacgcaagtgttacactttaccaaggacgttaaagcggccgccaaccagatgaggaatttcctggtgagggcgagttgtaggctccgcctagagcccggtaaagagtacctcattatgggtctagatggagcaacatatgacttggagggtcacccccagtacctgctcgactctaactcgtggattgaagaaatgcctagcgaaagactttgtcgctccacaagacagcgtgcagcttgcgctcagctcaatgacttcttacaggaatacggtacccagggctgccaggtgtag

SEQ ID NO: 183669 - DNA, 5097 bp, synthetic construct
  misc_feature 1..5097: note = Description of Artificial Sequence: Synthetic coding sequence
  source 1..5097: mol_type = other DNA
atgcggctgctgtggggcctgatctgggccagcagcttcttcaccttgtcattacagaaaccacgtcttctgttgttctccccatctgtggtgcacctcggcgttccactctcagttggcgttcagctccaagacgttccccgtgggcaagtcgtcaaaggaagcgtgtttctccgcaacccaagtcggaataatgtgccgtgttctccaaaggtggacttcactctgtcctctgaacgagacttcgccctgttgagtctgcaggtgcctctgaaggacgccaagtcttgcggactccatcagctgcttcgggggcccgaagtgcaactggtggcacattccccatggcttaaagatagcctgtccaggacaactaacatccagggcatcaacctattgttttcttctcgacgcgggcatctcttcctacagaccgatcagccgatctataacccagggcagagggttaggtacagggtatttgcactggaccagaagatgaggccctctaccgataccatcactgtgatggtggagaacagtcacggactgcgcgtgcgcaagaaagaagtgtatatgccctcaagcatctttcaagatgatttcgtgatacccgacatatctgaacccggaacctggaagataagcgcccgcttttccgatgggctggaatctaacagctctacacagtttgaggtcaagaaatatgtgctgccgaactttgaggtcaagattacgcctggaaagccttatatccttacagtgcctggccacctggacgaaatgcagctggatattcaagccaggtacatctacggaaaacccgttcaaggtgtggcctatgttaggtttggcctgctggatgaagatggcaagaagacgttttttaggggccttgaaagccagaccaagctggtcaatggccagagccatatcagcttgtccaaggccgaatttcaggacgccctagaaaaattaaatatgggaatcacggatctccaggggttaagactgtacgtggcagccgctattatcgagtacccagggggagagatggaggaagccgagttaactagttggtacttcgtgtctagtcccttctcgctggaccttagcaaaacaaagcgccatctggtgcctggtgcccccttcctcttgcaagcactggttcgagagatgtccggatctcctgcaagcggtattccagtcaaggtgagcgctactgtcagtagtcccggctcagtccctgaggtccaggatatacagcagaacaccgatgggtcaggtcaagttagcatccctatcatcatcccccagacgatcagtgagcttcagctgtccgtaagtgccggtagcccacacccggccatcgcccgcctgacggtcgcagctcctccttccggagggcctggttttctgagcatagaaaggccggactctcggcctccgagggtcggcgatactctgaatttaaatctcagagcggtcggctctggagctacctttagtcactattactacatgattctgagccgcggccagatcgtctttatgaatagagagcctaagcgaaccctcacttccgtgagcgtgttcgttgaccaccatcttgcgccctcgttttatttcgtggccttctactatcatggggaccatcctgtcgctaatagcctcagagtggacgtacaggcaggggcctgtgagggcaagctcgagctctcagtcgatggagccaaacagtacaggaacggcgagtctgtgaaactccatctcgagacagatagcctggctcttgtcgctctgggtgccctggataccgccctctacgccgccggctcaaaaagccacaagcccctcaacatgggcaaagtctttgaagcaatgaattcctacgatctgggctgcggaccggggggaggagactctgcgcttcaagtcttccaggccgctggattggccttttcagacggagatcaatggacactctccaggaagagactgtcttgtcctaaggaaaagaccacaaggaagaaaagaaacgttaacttccagaaggctatcaatgagaagctggggcagtatgctagcccaaccgccaagaggtgttgccaggacggcgttactcggctccccatgatgcggtcttgcgaacagcgcgccgctcgggtgcaacaacctgactgccgggagccctttctgtcctgttgccagtttgcagagagcttgaggaaaaagagtcgtgataaggggcaggccggactgcagagagccctggagatactccaagaggaggacctgatcgatgaagatgatatccctgtcaggtcattttttcccgaaaattggttgtggagagtcgagacagtagaccgatttcagattctcaccttatggctcccagactccctgaccacttgggaaatccatgggctgtctctgtccaaaactaaggggctatgtgtcgcaacccctgttcagctgagagtttttcgggagttccacctgcacctgcgtcttccaatgtcagtgcgcaggtttgagcagctggaattgaggcctgtgctgtacaactatctagacaagaacctgaccgttagtgtgcacgtgtcccccgttgagggtctgtgtctcgcaggaggaggaggtttggctcaacaggtgctggtgcctgccgggtccgcaagacctgtcgcttttagcgtagtacccactgcagccgcagccgtctccttgaaagtggtggctagaggttctttcgaatttccagtcggcgatgccgtgtctaaggtattacagatcgagaaggaaggcgcaatccaccgggaagaactggtttacgagcttaaccctctggaccacagggggaggacacttgagatccccggcaacagcgacccaaatatgattccggacggcgatttcaacagctatgtgagagtcacagcatcagatcccctcgatacactgggtagtgaaggggccctctccccaggcggtgtggcatctctgctaagactcccacgcgggtgcggagaacagaccatgatctaccttgcccccaccctagccgcctccagatacctcgataagacagagcagtggagtaccctacctcccgagacgaaagatcacgccgttgaccttattcaaaagggttatatgaggatccaacagtttagaaaagctgacggctcatacgccgcctggctgtccagagactccagcacctggttgaccgcgttcgttttaaaagtcctaagtctagctcaggagcaagtgggagggtcaccagagaagctccaagagacctctaactggcttttgtcccagcagcaggcagatgggtccttccaggatccatgtcccgtccttgacagatcaatgcaaggcgggctggttggcaatgatgaaactgtggcccttactgcgttcgtgactatagctctgcatcatggcttggccgtgttccaagatgagggcgccgaacccctgaaacagcgcgtcgaggcctctattagtaaggccaactcctttctaggcgagaaagctagtgctggcttgctgggagcccatgccgccgcaattactgcttacgcactcacgctcacaaaggcccctgtagacctcctgggcgtagctcacaataatctgatggcaatggcccaagaaaccggggacaatctgtattggggcagcgtcacaggaagccagtctaatgctgtgagcccaacacccgcacccagaaatccttcagacccaatgcctcaagcccccgccctgtggatagaaacgaccgcttacgctctgctccacctgctgctccacgagggcaaagcggagatggctgaccaggccgcagcatggcttacacgccagggcagcttccagggggggttccggtccacccaggataccgtgattgcactggacgccctgagtgcctattggattgcctcgcatacgactgaagagcgagggttgaatgttacattaagctccacgggacgcaacgggttcaagtctcatgccctgcaactgaacaacagacagatccgcggactcgaggaagagctgcaattttccctcggaagcaaaatcaatgtgaaagtgggaggtaacagtaagggcactctcaaagtgttgcgcacttacaacgtgcttgacatgaagaacacaacatgccaagacctgcagatagaggtgactgtgaagggccacgttgaatacaccatggaagccaacgaggattacgaggactatgaatatgacgagctgcctgctaaagacgaccctgacgcacctttgcagcccgtaactcctttgcagctgttcgaggggcgtcggaaccgccggaggcgggaggctcctaagctgaccagccttagtgaccgatatgttagccactttgagaccgagggaccacacgtgctgctctatttcgattctgtcccaacctctcgagaatgcgtgggctttgaggcagtacaggaagtgcccgtaggactggtgcaaccagctagcgccacattatacgactactacaaccccgagcgccgctgttctgtgttctatggggccccgtccaagagcaggttacttgccactctgtgtagtgccgaagtgtgccagtgcgctgagggcaagtgccctaggcagaggagagctctggagaggggtttgcaggacgaggatggctatcgaatgaagtttgcctgctactatcctcgggtggaatatggatttcaggtgaaggttctacgggaggactcccgtgctgcttttcggctcttcgagaccaagataacgcaagtgcttcatttcacaaaagacgtcaaagcagccgccaatcaaatgcgcaatttcctggtgagagcgagttgcaggctgaggctagagcccgggaaagagtatcttattatgggcctggacggcgcaacttatgatctggagggacatccccagtacctcttggattctaattcttggattgaggaaatgcccagtgaacggctttgtcgatccacacgacagcgggctgcctgcgcccagttgaatgatttccttcaagagtatggaacgcaaggatgtcaggtttag

SEQ ID NO: 183670 - DNA, 1536 bp, synthetic construct
  misc_feature 1..1536: note = Description of Artificial Sequence: Synthetic coding sequence
  source 1..1536: mol_type = other DNA
atggccaagggcctgagcgtgcagaacgacaagcaccccggctaccagcctgcgctattgctgtcaccaggagcccccctttttgccgatggcccggcctatgccttgctgcacttgctgctgcatgagggcaaggcagaaatggccgaccaggcagccgcctggctgaccaggcagggtagctttcaggggggattcaggtccacccaggacaccgtgatcgcactggacgcgctgagtgcttactggattgcctcacataccacagaggaaagaggcctgaatgtgaccttgagttccaccggacgaaatgggttcaagtctcacgcgctgcaattaaataataggcaaatcaggggcttggaggaggaactgcaattttcccttggatctaagattaatgtaaaggtgggtggcaattccaagggcacactgaaagtcttgaggacttacaatgttctcgacatgaagaataccacttgccaggatttacagatcgaggtcactgtaaaaggccacgtcgaatatacaatggaggccaatgaagattatgaggactatgagtacgatgagctacccgcaaaggatgacccagatgccccattacaacctgtcaccccactccagctgtttgaggggcgccgtaatcgcaggagaagagaggcacctaaagtcgtggaggaacaggagtctcgcgtgcattacacggtctgcatctggcgaaacgggaaagtgggcctatccggtatggccatcgccgacgtaacccttctgtccggcttccatgccctcagagccgatctggaaaagctgacctccctaagcgatcggtacgttagtcacttcgagactgaaggcccacacgtcctcttgtattttgacagcgttccaacatcacgagaatgcgtggggtttgaggctgtccaggaagtccccgtgggtctcgttcaacccgccagtgccaccctctacgattactataatcccgagaggagatgttcagttttttatggcgcaccctcgaagagtcgcctgctggcaaccctctgcagcgccgaggtgtgtcagtgtgccgaaggcaagtgcccaaggcaacggcgtgcattggagcgcggcttgcaggacgaagatggctacaggatgaagttcgcttgttattatcctcgtgtggagtacgggtttcaggtgaaagtgttaagggaggactccagagccgctttccgtctctttgagacaaagatcacccaggtattgcactttactaaggacgtgaaggctgctgctaatcaaatgcggaattttcttgttagggcctcctgccgacttcgcctggagccaggcaaagaatacttgattatggggctggacggggcaacatacgatcttgagggacaccctcagtaccttttagacagcaacagttggatcgaggagatgcccagtgagaggctgtgcagaagcacccgccagcgcgccgcatgtgctcagttaaatgatttcctccaggagtatgggacacagggctgtcaggtgtag

SEQ ID NO: 183671 - DNA, 813 bp, synthetic construct
  misc_feature 1..813: note = Description of Artificial Sequence: Synthetic coding sequence
  source 1..813: mol_type = other DNA
atgtgccccgaggacagcctgcaggtgcccctgaaggacgccaagagttgcggactccatcagctgctgcgaggccctgaagtccagcttgtcgcccatagcccttggctcaaggattctttgtcacgcacaactaacatccagggcatcaatcttttgttcagtagccggcgggggcacctattcctgcagaccgaccagccgatctataatccaggccagcgcgtgcggtaccgcgtttttgcactggaccagaagatgcgcccctcaaccgacacaatcaccgtcatggtcgagaattcccacgggctcagggtcaggaaaaaagaagtttacatgccaagcagcatctttcaggacgacttcgtcatcccggatatctccgagccgggcacatggaagatctctgcgcggttctctgacgggctggagtcgaactcctcaacacaattcgaagtgaagaagtatgtgctgccgaacttcgaagtgaagatcacccccggtaaaccgtacattctcaccgtcccaggccatttggacgagatgcagctagacatccaggcgaggtatatctatgggaaaccagttcagggagtggcttatgtcagattcggcttgctagacgaggacggtaagaagaccttctttcggggactcgaaagtcagacaaaactcgttaatggccagagccatatctcgctgtccaaggcagagttccaggacgccttggaaaagctcaacatggggattactgacctgcagggactgcgactttatgtggctgccgcaatcatcgagtaccccggaggctag

SEQ ID NO: 183672 - DNA, 5235 bp, synthetic construct
  misc_feature 1..5235: note = Description of Artificial Sequence: Synthetic coding sequence
  source 1..5235: mol_type = other DNA
atgcggctgctgtggggcctgatctgggccagcagcttcttcaccctgtcacttcagaagccaagacttctgctgttctccccttccgtagtacacttaggtgtccccctttccgtcggggttcagctccaggatgtgccccgcgggcaggtcgtgaaaggctcagtcttcctaaggaatccgagccggaacaatgttccgtgttcccctaaagtggacttcactttaagtagtgaacgtgactttgctttgctctccctgcaggtacctctcaaggacgctaagagctgtggtctccatcagctgcttagaggtccagaggtccagctggtagcacattcaccttggctgaaagacagcttgagcaggacaacgaacatccagggcattaaccttctctttagttcacgccgcggtcatttgtttttacagacggatcaaccaatatacaacccaggccaaagggtgcggtatagggtttttgcactggaccagaagatgcgaccttctacagacacaattactgtcatggttgagaattcccatggcctgcgggtacgcaagaaggaggtctacatgccctcctcaatttttcaggatgacttcgttatcccggacattagtgaaccaggcacgtggaagatatctgcccgcttttcggatggcttggaaagcaattcctctacccagtttgaagtgaaaaagtacgtcctgccaaactttgaagttaagattacgccagggaagccttacatcctgactgtccccggacacttggatgaaatgcagttggatattcaggcgcgctacatctacggcaagcccgtacagggagtggcatatgtacgcttcggtctcctggatgaggatggaaagaaaacattttttcgcggtctggagagccagacaaaactggtgaacggccagtcccacatttccctgtcaaaggcggagttccaggatgctttggaaaagcttaacatgggcattaccgatcttcagggcctgagactgtatgtggcggctgccatcattgaatccccgggaggcgaaatggaagaagctgagctcacctcatggtatttcgtctcatcccccttttccctcgacttatccaaaaccaaaaggcacctggtcccaggtgcgccctttttgttacaggcccttgtgcgcgagatgagcggaagtccggcatcgggaataccagtcaaagtgagtgccaccgtgagtagccccggaagcgtccccgaagttcaagatatccaacagaacacggatggatcaggtcaagtttctatccctataatcatccctcaaactatcagcgaactgcagctgtccgtcagcgccgggagcccgcacccggcgatcgctcgactgaccgtcgccgcccccccttctggcggcccaggtttcctgtcgatcgaacgcccagatagccggccaccccgggtgggtgatacacttaatctgaatttgcgagctgtcggatctggagcaactttctcccactattactatatgattttaagccgtggccagattgtctttatgaaccgggaaccaaagaggacactgactagtgtttccgtgttcgtagaccaccacctggctccttccttctatttcgtggccttttactatcacggtgaccaccccgttgccaatagcctgcgcgtagacgtgcaggccggtgcttgcgagggaaaactggaactgagcgtcgatggcgcgaaacagtatcgaaacggcgagagcgtgaagctccacttggagacagatagcctggctttagtcgcgctgggcgccctcgataccgccctgtacgcagccggctctaaatcgcacaaacctttaaatatggggaaagtcttcgaagcaatgaattcttatgatctaggctgcggccctggggggggggattccgcccttcaggtattccaggctgcggggctggctttctccgatggcgatcaatggacattgagtcgtaagagactctcttgtcccaaggagaaaacaactaggaaaaaacggaacgtcaattttcagaaagccattaacgaaaaacttggtcagtatgccagccctaccgcaaaaaggtgctgccaggacggggtgacgcgacttcccatgatgcggtcttgcgaacaacgcgccgccagagtgcagcagcctgattgccgggaaccattcctgtcgtgttgtcagtttgctgaaagtctgagaaaaaagagtcgagacaaagggcaagccgggctacagagggccttagagatcctgcaggaagaggatcttatcgacgaggatgatatccctgtccgttctttttttccagagaactggttgtggcgggtcgaaactgtggatcgctttcagatactgaccctgtggctgcctgatagtctcacaacatgggagattcacggtctgtcactctcaaagaccaagggcttgtgcgtcgccacgcccgtgcagctgagagttttccgggagtttcatctgcacctgcggctgcctatgtccgtaagacgcttcgagcagctggagctgcggccagttctttataattacctggacaaaaacctcaccgtgagcgtgcatgtatcaccagtggaaggcttatgcttggctggagggggtggtctggcacagcaggttttagttcccgccggctccgctagacctgtcgccttctcagttgtacctacagctgcgaccgccgtttcccttaaagtcgtcgcccggggatcttttgaattccccgtgggtgacgccgtgtctaaagtactgcagatcgagaaagaaggtgcaatccatagagaagagctggtctacgaacttaaccccttggaccaccgggggcggactctcgagatcccaggaaatagtgatcccaacatgattcctgatggagacttcaactcgtatgtccgcgtcacggcaagtgatccattagatacactcggaagcgaaggggcgctgagcccaggcggtgtggcttccctcctgcgcctcccccgcggctgcggagagcagactatgatttaccttgcccctactcttgcggccagtaggtatcttgataaaaccgaacagtggagcacactacccccggaaacaaaagaccatgcagtcgacctcattcagaaggggtacatgcgcatacaacagtttaggaaggctgacggtagctatgctgcttggttaagccgcggctcgtcaacctggttaacagccttcgtgttaaaagtgttgtcacttgctcaggaacaggtcgggggatctccggaaaagctccaagaaacttctaattggctgctgtctcagcagcaggctgacggctcatttcaggatctatcacccgtgatacatcggtcaatgcaaggcggcctggtcggcaatgatgagaccgttgctttgaccgccttcgtgactattgcgctgcatcacggtctggctgtcttccaagatgagggggcagagcctctcaagcagcgggttgaggcaagtatttctaaggctagcagcttcctgggagagaaggcaagcgcagggttgctcggagcgcacgccgcagcaatcactgcatatgccctgacactgactaaggcccccgccgacctgcggggagtcgctcacaataatcttatggctatggcgcaggaaaccggcgataacttgtattggggcagtgtaaccgggagtcagagcaacgccgtgtctcccacacctgcccctagaaacccttctgatccgatgccccaggctcctgccctttggattgagactaccgcctacgcactgctacatttgctgcttcatgagggtaaggccgagatggccgatcaggctgcagcttggctcacacgtcagggcagcttccagggcgggttccggtccacacaggatacggttatagcgctcgacgccctgtcggcctactggattgcatcccataccactgaggagaggggccttaacgtgaccctgtcctccactggcaggaatggtttcaagagccacgccttacaactgaataatcgacaaatcagaggtctggaagaggagctacagttctcactgggatccaagataaatgtgaaggtaggtggaaattcaaagggcacgcttaaggtgctcagaacgtataatgtgcttgacatgaaaaatactacctgtcaggacctccagatcgaagtgaccgtgaaaggacacgttgaatataccatggaggctaacgaagattatgaagattatgagtacgacgagctcccagctaaggatgaccccgatgctccattacagccagtgaccccgctccaactttttgaagggaggagaaatcggcgacggagagaggcccccaaggtggtggaagagcaggagtcacgggtgcattataccgtgtgcatttggcgtaatggcaaggtgggcctgagcggtatggccatcgccgacgtgacactgctgtccgggtttcacgcactgagagcggatttggagaagctaacttcactgtcagaccgctacgtgagccatttcgagacggaggggcctcatgtgctgctgtactttgactctgtcccaacatcacgcgagtgcgtgggttttgaagctgttcaggaagtccccgttggcctggtgcaaccagctagcgcaacgctgtacgattactataatccggagcgacgatgctccgtcttctatggcgcaccctcaaagagtcggctcctcgccacgctttgttctgcagaggtctgccagtgtgccgagggaaaatgccctagacaaaggagagccctagagcgaggcttgcaagatgaagatggctaccgtatgaagtttgcctgctattaccctagggtggagtacggtttccaggtgaaagtgctgagagaagatagcagagctgctttccggctcttcgagacaaagataactcaggtgctccatttcaccaaagatgtgaaagcggccgctaaccagatgagaaacttcctggtgcgcgcctcttgccgtttgcggctggagcccggcaaagaatatctgattatgggactcgatggggcgacttacgacctggaaggtcacccccagtacctgttggatagtaacagctggatcgaggagatgccgtcagaacgactgtgcaggagtacgcgccagcgcgcagcgtgtgcacaactcaacgatttcttgcaggagtacgggacgcaaggatgccaggtgtag

SEQ ID NO: 183673 - DNA, 5097 bp, synthetic construct
  misc_feature 1..5097: note = Description of Artificial Sequence: Synthetic coding sequence
  source 1..5097: mol_type = other DNA
atgcggctgctgtggggcctgatctgggccagcagcttcttcaccttgtctctccagaagccacgactgctgctattttccccctctgttgttcatctaggggtcccactcagcgtgggcgttcagctccaggacgttccccggggccaggtggttaagggatctgtctttttgcgtaatcccagccgcaacaacgtaccatgcagtcctaaggtcgacttcaccctgtcctccgaacgggacttcgcactgctgagcctccaggttcccctgaaggacgctaagtcttgtggactgcaccagctcttgcgaggtccggaagttcagctcgtagcacattccccctggctcaaggatagccttagcagaactacaaatatccagggaatcaacctgctgttctcttcccgccgcggacatctgttcttgcagactgaccaacccatctataatcctggccaacgagtcaggtatcgggtttttgctttggaccagaaaatgcggccctcaacggacaccattacggtgatggtggaaaacagccacgggttgcgagtgcgaaaaaaagaagtgtatatgccttcctctatattccaagacgatttcgttatacccgacatatctgagcccggaacttggaaaatcagcgctcgtttctctgacgggctggaaagtaacagtagcactcagtttgaggtgaagaagtacgtcctaccaaactttgaagtcaagatcacacccggaaagccatacatactgaccgttcccggacatctcgatgaaatgcagctggacatccaagccaggtatatttatggaaaacccgtgcagggtgttgcctatgtgaggttcggactgttggatgaagacggcaagaagacttttttccggggactcgagagtcagaccaagctcgtgaatggccagtctcacatctctctctcaaaggctgaattccaagatgctttggagaagctgaatatgggtattacagacctgcagggtctgagactttacgtagcggccgccatcattgaaagtccagggggtgaaatggaagaggcagagctgacctcttggtacttcgtgagttctccattttccctggatctctcaaagactaaacgacacctagttccaggcgcccctttcctgctccaggccttggtccgcgagatgtctggctcacccgcctccgggatcccagtgaaggttagcgcaacagtgtcttccccaggctcagtgcctgaggtgcaggatatccagcagaacaccgacggcagcggacaggtgagtattccaatcatcatcccccagacaatttctgagttgcagctctcagtgtctgcaggctccccacacccagccattgcacgactcacagttgctgcacctccttctggcggtcctggctttctaagtattgaaagaccagactccaggccccctcgggtgggcgacacgctcaacctgaatctccgcgccgtgggtagcggggcaacatttagccactactattatatgattctctccaggggacagattgtattcatgaaccgcgaaccgaagcgtaccctgactagtgtgtctgtgttcgtagaccatcacctcgctccctccttttactttgtagctttttattatcacggcgaccacccagtagccaattccctgcgcgttgacgtacaagcaggcgcgtgcgagggcaagctggagttgtcggtggatggtgccaagcaataccggaatggggagtctgtgaagttgcacctcgagacagatagcctggccctggtcgccttgggagccttggacactgctctgtacgcagctggttctaagtctcataaacctctgaacatggggaaggtctttgaggcaatgaactcctatgatctggggtgcggccctggcggcggcgactcggctcttcaggtgtttcaggctgcgggccttgcattctcggatggggaccagtggacactgtctcgcaaaagactctcctgccctaaggagaagaccacgcgcaagaagagaaatgtaaactttcaaaaagcgatcaatgagaagttaggccagtacgcctctccaacagccaagaggtgctgccaggatggggttactcggttacccatgatgcggagctgcgagcagcgagccgcccgcgtgcagcagcctgattgccgtgaaccttttctcagctgctgccagttcgctgaatcattaaggaagaagagtcgcgataaagggcaagccgggctccagagagctctggaaatattgcaggaggaagacctgattgacgaggacgatatccccgtacgcagtttcttccctgagaattggctgtggagagtagaaactgtagacagatttcagatcctgaccctgtggcttccggatagcctgaccacctgggaaattcatggactctccctgtctaaaactaaagggttgtgcgtagccaccccggtccagcttcgggtgtttagggagttccacttgcacctgcggctgccgatgtctgtccgcagatttgagcagctcgaattgaggcccgtgctgtacaactatctcgataagaacctgaccgtgtccgtgcatgtgtcaccagtggaagggctgtgcctggcagggggcggcgggctagcccagcaagtgttggtgcccgctgggtcggccaggcccgttgcatttagcgtggtgccaacagcggccacagctgtgtcccttaaggtcgtcgcacgcgggagctttgagttcccagtcggcgacgccgtgagtaaggtgctgcagatagagaaggagggcgctatccatcgtgaggagctggtttacgaacttaacccactcgaccatcggggacgcaccctggagatcccaggtaattcggatcccaatatgataccagacggcgattttaactcctacgttcgggttacagcatcggaccctcttgacacactcggatctgaaggggccctgtcaccagggggcgttgctagcctgttacgcctcccccggggctgcggggaacaaacgatgatatacttagcccccaccctggccgcatcccgatacttagacaagacagaacagtggagcaccttgcctccggagaccaaggatcacgcagtggatctgatccaaaaaggatatatgaggatccaacagttccggaaagccgacggttcttatgctgcctggctgtctagaggatcctccacctggctgactgcctttgttctcaaggtgttgagcctggcgcaggagcaggtgggggggtctccggagaaacttcaggagacttctaattggctactgtctcagcagcaagcagatggtagttttcaggacctctcacccgtgattcacaggtccatgcagggcgggctggttggtaatgacgagacagtggcactgactgcattcgtcacaattgcgttgcatcatgggcttgctgtgttccaagacgaaggagccgaacctttgaaacagcgggtggaagcttccatcagcaaagccagcagctttctcggggaaaaagcttcagcgggactcctgggcgctcatgcggcagctattacggcctacgccctgaccctgacgaaggctcccgccgatcttaggggcgttgcacacaataatctcatggctatggcacaggagaccggggacaatttatactggggaagtgtgacggggtctcagagtaatgccgtgtctccaacacccgcaccccgaaacccttcagacccgatgcctcaagcaccggctctgtggatcgaaaccacagcgtacgcccttcttcatctactgctccacgaaggcaaggctgaaatggccgaccaggcagccgcatggttgacacggcaaggttcatttcagggcggcttccgctctacccaggacaccgtgatcgccctggacgcactttccgcatattggatcgccagtcatacaactgaagaaagaggactcaatgtcacgctttcgtcaaccggtcgaaatggctttaaaagccatgcacttcagcttaataaccgccagattcggggtttagaggaagagctgcagtttagcttgggatcaaagattaacgtgaaggtgggcggaaattcaaagggaacgctgaaggtgctgagaacctacaacgtgctcgatatgaagaacactacctgtcaggatttacagattgaggtgactgtaaagggtcatgtagaatacaccatggaggcaaacgaggattatgaagattacgaatacgacgagctgcccgccaaggatgatccagacgcaccccttcagcctgtgacccctttgcaactgttcgagggccgcagaaatcggagaaggcgcgaagccccgaagctcacatccctgagtgaccgctacgtatcccatttcgaaactgaaggcccacatgtgttactctattttgacagtgttcccacatctagggagtgcgtaggcttcgaggcagtgcaggaggtacccgtggggctggtgcaacctgcctccgcaacactctatgattactataatcctgagcggaggtgttccgtgttctatggcgcacccagtaagagcaggcttctcgccactttatgtagtgctgaggtatgccaatgcgcggagggtaagtgtccaagacagaggcgtgctctggaaagaggcctgcaggatgaggacggatatcgcatgaaattcgcatgctattatcctcgggtggagtatggatttcaggtgaaagttctccgggaggactccagagcagcgttcagattgtttgagaccaaaatcacccaagtgttgcattttaccaaggacgtgaaagctgcggctaaccagatgcgaaacttcctggtgcgggcctcctgtcggctcaggctggaaccagggaaagagtatctcatcatgggactcgacggagcgacttacgatttagaagggcatcctcaatacctgctcgattctaattcctggatcgaggaaatgccctcagagagattgtgtaggtccacaagacagcgcgcggcctgcgcacagcttaacgattttctgcaagagtatggcacccaaggctgccaggtttag

SEQ ID NO: 183674 - DNA, 5235 bp, synthetic construct
  misc_feature 1..5235: note = Description of Artificial Sequence: Synthetic coding sequence
  source 1..5235: mol_type = other DNA
atgcggctgctgtggggcctgatctgggccagcagcttcttcaccctgtcactgcagaaaccgaggctccttctatttagcccttctgtcgtgcaccttggtgtgccccttagcgtgggggttcaacttcaggacgtccctcgcggacaagttgtgaaaggaagtgtgtttttgaggaacccatctaggaataatgtaccatgtagccctaaagtggatttcacattgtcaagcgagagagactttgctctgctgagcctgcaagtccctttgaaagacgccaagtcctgtgggcttcatcagttgctaagagggcctgaggtgcaattggttgctcactccccgtggctgaaggactcgctaagcaggaccactaacattcaaggcattaatttgctgtttagctctagacgtgggcacctcttccttcagacagaccagcccatatataaccccgggcagagagtgcgatatcgggtgtttgctttggaccaaaagatgcggcctagcaccgataccatcacagtgatggttgaaaactctcatggtcttcgagttcggaaaaaagaagtttacatgccctcatcgatttttcaagacgatttcgtgataccagacatcagcgagcctgggacatggaagatttccgccagatttagcgacggtctagagtccaattcctcaacacaatttgaagtcaagaaatacgtcctgcccaattttgaggtgaagatcaccccgggcaagccgtacatcctcacagttcccggccaccttgatgaaatgcaattagacatccaggcaagatatatctatggcaagcccgtacagggtgttgcatatgtccggttcgggttgttagacgaagacggcaaaaaaacatttttcagaggccttgagtcacagacaaagctggtcaacgggcagtcccatatttcactgtctaaagccgagtttcaggacgcccttgagaaacttaatatgggcattacggatttacaaggcctccgtctgtacgtggctgcagctataatagaaagtcctggcggcgaaatggaggaggctgagctgacaagttggtactttgtgagcagtccattctccctcgacctctccaaaacaaaaagacacctggttccaggggccccctttcttttgcaagctcttgttcgagaaatgtcaggcagcccagcaagcggtatcccagtcaaagtcagcgcaacagtttcgtcccctgggagcgtgcctgaagtgcaagacatccagcaaaacactgacggttctggtcaggtgtctattcccataataataccacagacaatctccgaactgcagctttcggtcagcgcagggtcccctcatcctgctatagcacggctgacagttgctgctccgccctcagggggacctgggttcctatctattgagcgccctgactcaagaccacctagggtcggtgataccttgaacctgaacctgagggctgtagggtccggggccacctttagtcactactattatatgattctgtccagaggacagatcgtcttcatgaacagggaacccaaacgcacacttacttcggtcagtgtgtttgtagaccaccatcttgctccctctttctacttcgtggcattctattaccacggcgaccatcccgtagcaaactcgttacgcgtagatgtgcaggcaggagcctgcgagggcaagctcgaactgtcggtggacggagccaaacagtatcggaacggcgaatctgtgaaattacaccttgagaccgacagtctcgccttggtggctcttggtgctctcgacacagccctgtacgccgcgggcagcaagtcccacaaaccgctcaatatgggtaaagtgttcgaagcaatgaattcttatgatctcgggtgcgggcccgggggaggagatagtgccctgcaagttttccaggccgccggcctggcttttagcgacggagaccagtggacactgtcaaggaagcgcttaagttgccccaaagagaagacaacaagaaaaaagcggaacgtgaatttccaaaaggcaatcaacgagaagctgggacagtatgccagccctactgctaaacgctgctgccaggacggcgtcacccgcctgcctatgatgagaagctgcgagcagcgagccgcgcgggttcagcagccagactgccgagagccatttctgtcctgctgccagttcgctgagtctttacgcaaaaaatctcgagataaaggccaggctggcctgcagagggcgctggaaattctgcaggaggaagatctgattgatgaggacgacattcctgttcgcagtttctttcctgagaactggctgtggagggtggagaccgtagaccgttttcagatactgactctgtggctccctgattcgctaacaacatgggagatccacgggctttccttatcaaaaacaaagggcttgtgcgttgcgacccccgttcagcttagagtcttccgtgaatttcatctgcatctgcggttaccaatgtccgtgagacgtttcgagcagctggagttgcgtcctgtcctctacaattacctagacaaaaatctcaccgtgtcagttcacgtttcccctgtggaagggctgtgcctggccgggggtggcggtcttgcccaacaggtcctggtgccagccggatccgcccgcccggtggctttctctgtggtgcctactgccgccactgcggtctccttgaaggtggttgccaggggcagcttcgaattccccgtgggcgatgccgtgtccaaagtgttacagatcgagaaagagggtgccatccatcgtgaggaactggtctacgagctcaacccactcgaccaccgcggacggactctcgagatcccaggcaattctgatccaaacatgattccagacggcgattttaactcttatgtgcgcgtcacagcaagcgaccccttggacacgctgggatccgagggtgccctgagcccagggggagtggcgtccctacttagattgccaagaggttgcggtgagcagaccatgatttaccttgccccgacactcgcagctagtagatatctcgacaagaccgagcagtggtcaaccttgccccccgaaacgaaggatcacgccgtagacctgattcagaaaggatatatgcgcatacagcagtttagaaaagccgacggctcatatgcggcctggctgtctcgagggagtagtacctggctcacagccttcgtactgaaggttctgtcgctcgcccaggaacaggttggaggctctccagagaagttacaagagacctcaaactggctgttatcacagcagcaggccgacgggtccttccaagatctgtcacctgtgattcatcgctcaatgcaggggggccttgtgggcaacgacgaaacagtggctcttacagcgtttgtaacgatcgccctccatcatggtctggcggtgttccaggacgagggggccgagccactgaagcagagagtcgaggccagtatcagcaaggcctcgagttttctaggggagaaggcatccgcgggtctcctgggcgcacatgcagccgctattaccgcatatgcactcacactcacgaaagctcctgctgatcttaggggggtggcacacaacaatctgatggctatggcacaggagaccggggacaatctgtactggggatctgtgacaggctctcagagcaacgctgtgagtcctacccctgcgccacgaaatccatccgatccaatgccccaggctcccgccttgtggattgagactacagcttatgccctgctccacctgttattgcatgaagggaaggccgaaatggccgaccaggcagccgcctggcttacccgccagggctcctttcaaggtggctttcgctctacacaggatacagtgattgccctggatgccctgtccgcctattggatcgcctcacacacaactgaagaacgtggcttgaatgtgactctcagcagcacggggcgaaatgggtttaagagccatgccctgcagcttaataaccgacagatacgaggactcgaggaagagttacagttcagtctcggatcaaaaatcaatgtcaaggtgggaggtaactctaaggggacattaaaagtcctgcgcacttataatgtgctcgatatgaagaacactacctgccaggatctgcagatcgaagtaacagtgaagggacacgttgagtacaccatggaggcaaatgaggactatgaagactatgagtacgacgaacttccagctaaagacgacccagatgctccccttcagcctgtaacaccgctccaactttttgaggggagacgaaatcggcgaaggagggaagcccccaaggtggtggaagaacaggagtcccgcgtccactacaccgtgtgtatatggcgtaacggaaaggtgggattaagtgggatggcgatcgccgacgtgaccctcctcagtggctttcacgccctgcgagccgacctagagaagctgacctccctgagcgaccgctatgtatctcatttcgaaacagaaggaccgcacgtgcttctgtactttgattcagtgcctacctcccgggagtgtgtcggctttgaggctgtgcaggaggtgcccgtaggcttggtgcaacccgcctcagccactctgtatgactattacaatccagagcgcaggtgtagcgtcttttacggcgccccatctaaatcacgattacttgctaccctgtgctccgccgaggtgtgccagtgcgctgaggggaagtgcccacggcaaaggagagcactggaacggggtttgcaagacgaggatggatatcgcatgaagttcgcttgctactacccaagggtggaatatgggtttcaggtgaaagtgttgcgtgaggactcgcgagccgcgtttcgcctgtttgagaccaagattacccaagtgttacacttcaccaaggatgtaaaagcagctgccaaccaaatgagaaattttctggtgagagcctcttgtcggcttcgcttggaacccggaaaggaatatttgatcatgggcctcgatggtgcgacatacgatctcgaaggtcacccacagtacttgctcgattcgaactcgtggatagaggagatgccatcggagaggttatgccgatctacaagacaacgtgcagcttgtgcccagcttaacgatttcctgcaggagtacggcactcagggttgccaagtgtag

SEQ ID NO: 183675 - DNA, 5235 bp, synthetic construct
  misc_feature 1..5235: note = Description of Artificial Sequence: Synthetic coding sequence
  source 1..5235: mol_type = other DNA
atgcggctgctgtggggcctgatctgggccagcagcttcttcaccctatcactgcagaaacccaggctgctgctgttctcacccagtgtggtgcacctgggagtccccctgtctgttggcgttcagctccaggacgttccccgcggccaagtcgtgaagggttcggtgttcctgagaaacccatctcgaaataacgtcccatgttcacctaaggtcgatttcacactgtcttcagagagagattttgctctgctgagcctgcaggtaccgcttaaggacgctaagtcctgtgggctgcaccagctgcttcggggaccagaggtccagctcgtggcccattctccgtggctgaaggacagccttagtcggaccacgaacattcagggtatcaatctcttattctcgagccggcggggccatttgttcctccaaaccgatcagcctatctacaaccctgggcaacgggtgcggtacagggttttcgccctcgaccagaaaatgagaccctctactgatactatcaccgttatggtcgagaactcacatggtctccgagttaggaaaaaggaagtttatatgccctcgtctatctttcaggacgatttcgtgattccggacatttcagaacctggcacttggaagatttccgccagattttctgacggcttggaaagcaacagctccacacaatttgaggtcaaaaagtatgtattacccaactttgaagtcaagattaccccagggaaaccttacattttgaccgtgccagggcatttggacgagatgcagcttgatatccaagcccgatacatttacggaaagccagtgcagggagtagcttacgttcggttcggccttctggacgaagacgggaaaaaaacattttttaggggtcttgagagtcagaccaagctagtcaacgggcagagccacatatccctcagcaaggctgagttccaggatgcattagagaagttgaacatgggtatcaccgacttacagggactgagactgtatgtggcggccgccattattgaatcccctggtggggaaatggaggaagccgagcttacttcttggtatttcgtgtcctctccgttcagcctcgacctgtcaaagaccaagcgtcatctggtcccaggcgcccccttcctgctgcaggctctggtgcgagagatgtctggtagcccagcctcaggcattcctgtaaaagtgtccgcaacagttagcagtcccggctcggtgcccgaagtccaagacattcagcagaatacagatggctccgggcaggtgtcaatacccataattatcccccagaccattagcgagttgcagctgtctgtgtctgccggcagcccacatcccgctatcgcacggttgactgtggcagccccaccatccgggggacccggcttcctgtctatcgagcgacccgacagcagaccccctcgcgtgggggatacacttaatctgaacctgagagccgtgggaagcggagctaccttcagccactattactacatgatccttagtagaggacagatagtgttcatgaatcgcgagcccaagcgcaccttaacatctgtgtccgtctttgtggatcatcacctggctccttctttttatttcgtcgccttctactaccatggcgaccacccagttgctaattcattgcgcgtcgatgtgcaggccggcgcctgcgagggaaagctggagctgtctgtggacggcgccaaacagtacaggaatggtgagtccgttaagctccacttggagaccgattctcttgctttagtggcgctgggagccctggataccgctctgtacgccgccggcagcaaatcccacaaaccccttaatatggggaaggttttcgaggcaatgaactcatacgatcttggctgcggaccaggtggaggggactcagctttgcaggtattccaggccgcaggtctggccttcagcgacggagatcagtggacgctgagccgcaagagactgagctgccctaaagaaaaaaccaccagaaagaagaggaacgtcaacttccagaaagctataaacgagaagctgggccagtatgccagcccgacggcgaagcgctgctgccaggatggcgtgacacgattgcccatgatgcggagctgcgagcagcgggcagcccgcgtgcaacagcctgactgccgtgagccgtttttgtcctgctgtcaatttgccgaaagtcttcgcaaaaagagccgcgataaaggacaggctggtttacaaagagctctggaaatcctacaggaggaggacctgattgatgaagatgacatccctgttagatcctttttccccgagaattggctgtggcgtgtcgagaccgtcgaccgattccagatcctcacactctggcttcccgacagcttaacaacttgggaaatacatgggctgtctctgagcaagaccaagggtctgtgcgttgccacacccgtccagctccgtgtttttcgcgaattccacctgcatctgaggctccccatgtcagtccggagattcgaacagctggaactgcggcctgtcctttacaactaccttgacaagaatctgaccgtgtccgtgcatgtttctccggtggaaggtctgtgtctggctggaggcggtggcctggcccagcaggtgctggttcccgccggaagtgcccgcccagttgccttttcggttgtgccaaccgccgctgccgctgtcagccttaaagtagtggcacgtggatcgtttgaatttccggtgggtgacgcggtgtccaaggtgctgcagatcgagaaggagggcgccattcaccgcgaggaattggtctatgagttgaaccctctggaccatcggggacgaactcttgaaattccggggaactcggaccccaatatgatacctgacggggatttcaactcctatgttcgcgttactgcgtccgatccacttgatacactcggatctgagggggccctatctcctggcggagtggcttccctgctgaggcttcctcgcggctgcggcgaacagaccatgatctatctggcgccaacgctcgccgcttctaggtacctggacaagactgagcagtggagcacattacctcctgaaactaaggaccatgcggtggacctgattcagaaaggctacatgagaatccaacagtttcgcaaagcagatggttcatatgctgcttggttgtcacgggggtcctccacgtggctcactgctttcgtgctgaaagtactcagtttggcacaggagcaggtgggcggaagccccgagaaattacaggagacctcaaactggttgctgtcccagcagcaagcagacggttctttccaggatctgtccccagttatccacagatcgatgcagggcggcctggttggtaacgatgagacggtcgcgttgacggctttcgtgaccatcgctctgcaccatggtttagccgtctttcaggacgagggagccgaacccctgaaacagcgcgtggaagcatctatcagcaaggcaaactcattcctgggtgagaaagcttcagccggcctacttggagctcatgctgccgctatcacagcttacgctttaaccctcactaaagctcctgccgacctgcgcggcgtcgctcacaataaccttatggctatggctcaggagacaggcgacaatctctactggggttctgtcacgggcagccaatccaatgccgtttcccccacgccagcaccacgcaatccaagcgaccctatgccccaggcacctgcgctctggatagaaacaacagcatatgccctcttacacctcttgctccatgagggcaaagcagaaatggcagatcaggcggcggcttggctgaccaggcagggctctttccagggaggcttccgatccacccaggacactgtgatcgccctggacgcactaagtgcttactggatagcctctcatacaacagaggaacgagggctcaatgtgactttgagcagtaccggtcggaatggttttaaatctcacgcgctgcagctcaataatagacagattcggggcctcgaggaagaactacaatttagcctggggtcgaaaatcaacgtaaaggtgggaggcaattccaagggcacattaaaggtcctgagaacatacaatgtgctagatatgaagaatacaacctgccaggacctccagatcgaggtgacagtgaaaggacacgtggaatacactatggaagccaatgaggactacgaggattacgagtacgatgagctaccagccaaggatgatcccgatgccccacttcagcctgtgacccccctccagttgttcgagggaagacgcaatcgtcgaagaagggaagctcccaaagtggtggaagaacaggagtcccgcgttcactataccgtgtgcatttggcggaatggtaaagtcggcctaagtgggatggcgatcgccgatgtaacactgctttccggctttcacgccttgagggccgatcttgaaaaacttaccagtctgtccgatagatatgttagccatttcgaaacagaaggcccacatgtactgctgtatttcgattctgttcccacttctagggaatgcgtggggttcgaagccgtccaggaggttcctgttgggctcgtgcagccggcaagcgccactctgtacgattattacaatccagaacggaggtgctccgtattctatggcgccccctctaagtccagactgctggctactctatgctctgcagaggtctgtcagtgtgccgagggcaagtgtccccgtcagagaagagccctggagaggggactgcaggatgaagatggataccggatgaagtttgcctgttattacccacgggtcgaatacggattccaggtgaaggtactcagagaggactcccgcgcggcttttcgactgtttgaaacgaagattacacaggtgctacacttcaccaaggacgttaaagcagcggctaaccagatgcgcaacttcctggttcgcgcgagctgcaggcttaggctcgagcctggtaaggagtatctgataatgggcctggacggagctacctacgacttagagggtcaccctcagtacctgttggattccaattcatggatagaggaaatgccatcagagagactgtgtcggagtacgcggcagcgcgcggcttgtgcccaattgaatgacttcctgcaggagtatggtacccagggttgccaggtgtag

SEQ ID NO: 183676 - DNA, 807 bp, synthetic construct
  misc_feature 1..807: note = Description of Artificial Sequence: Synthetic coding sequence
  source 1..807: mol_type = other DNA
atgtgccccgaggacagcctgcaggtgcccctgaaggacgccaagtcttgcggactccaccagttgcttaggggtcccgaggtacagcttgtggctcattcaccctggctgaaagattctctcagccggacaaccaacattcaggggatcaatctattgttttcatcccgacgaggccatctgttcctgcagactgaccaacctatctataatcccgggcagagggtgcggtatcgtgtttttgcattggaccaaaagatgaggccttccaccgacactatcactgttatggttgagaatagccacggacttcgagtacgaaagaaagaggtttacatgccctctagcatctttcaggacgacttcgtgattccggatatatctgagccaggtacatggaagattagcgccagattctcagacggcctggagagtaactcaagcacccaattcgaagtcaagaagtatgtgttgccgaactttgaagtgaagatcactccaggcaaaccttatattctgacggtacccggccatctagatgagatgcagctagacattcaggcgcgctacatttatggcaaacctgtccagggtgtggcttatgtgaggttcggtctgctggacgaagacgggaagaagactttcttccgaggcctggagtctcaaacaaagctggtgaacggacagtctcacattagtttgagcaaagctgagttccaggacgctctggaaaaacttaatatgggaatcaccgacctccagggtctgcgcctttatgtggctgctgcaatcattgaatcaccatag

SEQ ID NO: 183677 - DNA, 5097 bp, synthetic construct
  misc_feature 1..5097: note = Description of Artificial Sequence: Synthetic coding sequence
  source 1..5097: mol_type = other DNA
atgcggctgctgtggggcctgatctgggccagcagcttcttcaccctctctctacaaaagccaagactgctgctattctcaccaagtgtcgtgcatctaggagttccactgtccgtgggcgtgcaactccaggatgttccccggggccaggtggttaaggggtcagttttcctgaggaatccttccagaaacaacgtgccctgttccccgaaagtggattttaccctcagtagtgagcgggattttgccttgctttctctgcaggttcccctaaaggacgccaagagttgtggactgcaccagctactgcgcgggccagaggtacagttagtcgctcatagtccctggctgaaagatagccttagccgcactaccaacatccagggtatcaacctgcttttcagttcacggcgtgggcatcttttcctccagaccgatcaaccgatttataatcccggccagagggtcaggtaccgcgtgttcgcactggaccaaaaaatgaggccttcgacagacacgatcacagtgatggttgaaaattcacacggtttgcgagtccggaagaaggaggtgtatatgccctcttcgatctttcaggacgacttcgtcattcctgatatttctgaacctggcacttggaaaatttctgcaaggttctcagacggcttagaaagtaacagttcaacacagttcgaggtgaagaaatacgtgctgcctaactttgaggtgaagatcactcccgggaagccctacatcctcaccgttcctggccacctggacgaaatgcagctggacatccaggctagatatatttatggaaagccagtgcagggagtggcctatgtaagattcggattgcttgatgaagatgggaaaaaaacattttttagaggcctggaaagccagaccaagctggtgaacggccagagtcacatttctttgagtaaagctgagttccaggacgctctcgagaagctcaacatgggcattacggatctacaggggctgcggctatatgtcgctgccgcaatcattgagagtcccgggggcgagatggaggaggccgaattgactagctggtatttcgtgagctcaccttttagtcttgacctttccaaaacaaagcgacacctggtacccggcgcacccttcctactgcaggccctcgtacgcgaaatgtctggaagcccggcatctggcatccccgtcaaagtgtcagctactgtctcgtctcccggatccgtgcccgaggtccaagacattcagcagaatactgacggctctggacaggtttcgattccaatcattataccacaaactatctctgaattgcagctgagtgtatctgccggctccccccaccctgctatcgctcgtctgacagtggcggccccacctagcggtggaccaggcttcttgtctatcgaaagaccggactcacggccacccagggtgggtgacactctgaacctcaatttgcgtgctgttggcagtggagctaccttctcccactactactacatgattctttccagaggccaaatcgtctttatgaaccgcgagcccaagaggactctgacatccgtaagcgtgtttgtcgatcaccacctagcaccctccttctactttgtggccttttattaccatggcgatcatcctgttgccaactctctgagagtggacgttcaagcaggtgcctgtgaaggaaaactggaactttctgtggatggagctaagcagtacagaaatggagagtctgtcaaacttcacctcgagaccgacagcctcgccctagtggcgctcggagccttagacactgctctttatgccgctgggagcaagtcacataagcctctaaacatgggtaaggtgtttgaggccatgaatagttatgatctgggctgcggcccagggggcggcgactccgccttgcaggtcttccaggctgccgggctggccttctccgacggcgatcagtggactctgagcaggaagcgcctcagctgccccaaggagaaaactactagaaagaaacgcaatgtgaatttccagaaagcgattaacgaaaagcttggccaatatgcttccccaacagccaagcggtgttgtcaggatggcgtgacaagactgccgatgatgcgatcttgcgaacagcgcgcagctcgcgttcaacagcccgactgtcgtgaacctttcctgtcctgttgccagttcgccgagtccctccggaagaagtctcgcgacaaaggtcaagccggtctgcagagagcactggagatactgcaggaagaagatcttatagatgaggacgacataccagttcgatccttcttccctgagaactggctctggagagttgagacggtggaccgcttccaaatcctgacactttggttgcccgacagcttgacgacctgggaaatccacggcctcagcttgagcaaaacgaagggtctatgtgtggcaacccccgtacagttgcgggtgtttcgcgagtttcacttacacctgcgcctccctatgtcagtgcgcagatttgaacaacttgaactgaggccagtcctgtacaattatctcgacaaaaacttaactgtgagcgtgcacgtgtcacctgtggaggggctgtgtttagcaggcgggggcggtttagctcagcaagtgctggtgccagctggtagcgcccgccctgtggcgttttccgttgtgccgacagcagccgctgcagttagtctcaaggtagtggcccgtgggtcttttgaattcccagtgggggacgccgtcagtaaggtgctccagattgaaaaagagggggctattcacagagaagaactcgtgtatgaattgaaccccctggatcaccgcgggaggacactagagatccccggcaactccgaccccaacatgattccagacggagactttaactcgtatgtgagggtaacagcgagtgacccgctcgatactctgggttccgaaggagctctgtctccgggaggcgtcgcaagccttctgcggttaccccggggctgcggagaacagaccatgatctatctagctccaacgctggcagccagcaggtacttagataagacggaacaatggagcacactgccacccgagacaaaagatcacgcggttgacttgatccagaaaggctacatgaggatccagcagttcaggaaagcagacggctcttacgctgcttggctgagccgcgggtcctccacatggctcacagcgtttgtgctcaaagtactgtcgctggctcaggagcaggtcgggggcagcccagagaaactgcaagaaacaagcaactggttgctatcccagcagcaggctgatggatcttttcaggatctgagcccagtgatccaccggtctatgcaaggcgggctcgtcggaaacgacgagaccgtcgccctgaccgcctttgtgacgatcgccctccatcacggattagcagtctttcaggatgagggtgcggaacccctgaagcagagagtggaagctagcattagcaaagccaattcctttctgggggagaaagcgagtgccggactgctcggggcccacgctgccgctatcaccgcttatgcactaacattgaccaaggccccagctgatttgcgcggagtggcccacaacaatctcatggcgatggcacaggagaccggggataacctgtattggggatcagtcacaggctcccagagcaacgcagtaagtccaacccccgcccccagaaacccatccgaccccatgccacaagcccccgcgctgtggattgaaactactgcctacgccctcctgcatctcctgttgcacgaagggaaggccgaaatggccgatcaagccgctgcttggctgacgaggcaggggagcttccagggcgggtttcgttctacacaagataccgtcattgctctggacgccttgtcagcctattggatcgcctcccacactacagaagagaggggcttgaacgtgactcttagtagcactggcaggaatggttttaagtcccatgctctccagcttaacaacagacagattcgtgggttagaggaggagttacagttttccctgggttctaaaatcaacgtgaaagtgggggggaattctaaagggactctgaaagtgctaagaacttacaatgtgcttgatatgaaaaataccacctgtcaggacctgcaaatagaagtcaccgttaaaggtcatgttgaatatactatggaggccaacgaagattacgaggactatgaatacgacgaactccccgcgaaggacgacccagatgctccactccaaccagtgaccccactgcaattatttgaaggtaggcggaacagacgcagacgcgaagccccaaaattgacctccttatccgataggtacgtcagtcactttgagaccgaaggccctcacgtgctgttatatttcgattccgtccctacgtcacgcgagtgcgtggggttcgaagccgtccaggaggtgcccgtcggcctagtccagcctgcttccgccactctgtatgactactacaaccccgagcgcaggtgctcagtcttttacggcgccccctcaaagagtcgtctcctagcgactctctgcagcgcagaagtctgccagtgtgccgaagggaagtgccctcgacaaaggcgggccctagagaggggactgcaggacgaggacggatatagaatgaagttcgcctgctactacccccgggtcgaatacgggttccaggtcaaggttttacgcgaggactcgagggccgcgttccgactgttcgagacaaagattacacaggtgctccactttaccaaggatgtcaaggccgccgccaaccaaatgcgaaactttcttgtgagagcctcttgtcgactgaggttagagcccggtaaggagtatctcatcatgggactggatggtgctacctatgaccttgaaggtcacccacagtatttgctggattctaactcatggatcgaggagatgcctagcgagagattatgtcggagtacccgccagagagctgcatgtgcccagctgaacgacttcctgcaggaatatggtactcagggctgtcaggtatag

SEQ ID NO: 183678 - DNA, 813 bp, synthetic construct
  misc_feature 1..813: note = Description of Artificial Sequence: Synthetic coding sequence
  source 1..813: mol_type = other DNA
atgtgccccgaggacagcctgcaggtgcccctgaaggacgccaagtcttgcggccttcaccagctccttagagggcctgaagtgcaattggtcgcccattccccgtggctgaaagattcgctaagccgaacaactaatatccaggggatcaatcttctcttcagctctaggcgcggacacctgtttctccagaccgaccagccaatatacaacccagggcaaagagtgcgttacagagtgtttgccctagaccagaaaatgaggccttctacggacaccattaccgtcatggttgaaaactctcacggcctccgcgttcgcaagaaggaggtctacatgccatccagcatctttcaggatgactttgtgattccggacatttcggaacccgggacctggaagatctccgcccgattttccgacggacttgaaagcaatagcagcactcagtttgaggtgaaaaagtacgtgctgccgaactttgaggtcaagattacccctgggaagccgtatatactaactgtaccaggacacctggacgagatgcagctcgatattcaggctaggtacatctacggcaaaccagttcagggagttgcatatgtacggtttggtctgctcgacgaggacggtaagaaaaccttttttagaggactagagtctcagaccaagttagtgaatggccagagccatatctccctctctaaggcggagttccaggatgcattagaaaagcttaacatgggcatcaccgacctccagggccttcgcctatatgtggcggcagcaattattgagtcgcctggaggatag

SEQ ID NO: 183679 - DNA, 5097 bp, synthetic construct
  misc_feature 1..5097: note = Description of Artificial Sequence: Synthetic coding sequence
  source 1..5097: mol_type = other DNA
atgcggctgctgtggggcctgatctgggccagcagcttcttcaccctcagcctccagaagcctcgattgttgcttttctcaccttccgtggtgcacttaggagttccactgtcggtgggggtacagctgcaggatgtgccccgagggcaggttgtgaaaggatctgtctttctccgaaacccctccagaaataacgtaccgtgctcacccaaggtggactttacgctcagttctgagcgcgattttgcactgcttagcctgcaggtccctctgaaagacgccaagtcttgtggtctgcaccaactattgcgcggtcctgaggtgcagctcgtggcccactctccctggctcaaagatagcttaagcaggacgactaatattcagggaatcaatctactgttttcgtccagacgcggtcatctctttttacagacagatcaacctatatacaatcccgggcagcgcgtccgctacagggtcttcgcactggaccagaaaatgcgtccaagcacagataccatcactgtaatggtggagaattctcatggattgcgcgtccggaaaaaggaagtgtatatgccctccagcatcttccaggatgactttgtgatcccagatatatccgaaccaggtacctggaagatttctgcgaggtttagcgatggtctggaaagcaactccagtacacagtttgaagtgaagaagtacgtcctccccaactttgaagttaagatcaccccagggaaaccatacatactcaccgtccctggccatctggacgaaatgcagcttgacatccaggcacgttacatctatggaaagccggttcaaggagtcgcatacgttaggtttggcctgctggacgaagatggaaaaaagacttttttcagaggcctggaatcacagacaaagcttgtaaacggccagtcacacatcagcttgtcgaaagccgagtttcaggatgcccttgaaaagctgaatatggggataaccgatctgcaaggcctgcgattgtacgtggctgccgctatcatcgaatcacccgggggagaaatggaggaagcggaacttacctcctggtatttcgttagttctccgttctctcttgacttgtctaagacaaagcgacacctcgtacccggtgccccgtttctcttgcaggctctggtacgggagatgtccggcagccctgctagtgggatccctgtgaaggtgtcagcaacagtctccagcccggggtctgtgcccgaggtccaggatattcaacagaacacagatggcagcggccaggtgtctattccgatcataattccacagacaatatctgagctgcagcttagtgtctccgcaggatctccgcacccagctatcgctcgtctgaccgtcgccgctccgccatcagggggcccaggctttcttagtatagaacgccccgattctaggcccccacgggtgggcgataccctgaatctcaacctgcgcgccgttgggtcgggcgccacatttagtcactactattacatgatcctgtccagaggacaaatagtcttcatgaatcgcgaaccaaagagaaccctcaccagcgtgtcggtgttcgtagatcatcatttggcaccatccttctacttcgtcgccttctactaccatggagatcaccccgttgcaaactcacttcgggtggacgtccaggctggcgcgtgcgaaggcaaattagaacttagcgtggatggggccaaacaataccggaatggcgagtccgtcaagctgcatctggaaaccgattccctcgcactcgtcgctttgggcgctctagacacagcactctacgcagccgggagtaaatcccacaagccattgaacatgggtaaggtttttgaggcaatgaactcctacgacctgggatgtgggccaggtgggggagacagcgccctgcaggtgtttcaagcagcagggcttgccttcagcgatggcgatcagtggactctgtctcggaagcgcctcagctgcccgaaagaaaagacgactagaaagaagagaaacgtcaacttccagaaggctatcaatgaaaagctaggtcaatacgccagcccgaccgcaaaacggtgctgccaggacggggttacaaggcttccgatgatgaggtcatgcgagcagcgggctgctagggtccaacagcctgattgcagggagccttttttgtcatgttgtcagtttgcggaatcgcttcgcaagaagagccgggacaaaggccaggcaggcctgcagcgcgccttggaaatactgcaagaagaagacctaattgatgaagatgacattcctgtacgttccttctttccagaaaactggctgtggcgcgtcgaaactgtggataggttccaaatccttaccctctggctgcccgattcactgaccacctgggagatccatgggctgtcgctctcgaagaccaaaggcctttgcgttgctactcccgtacagctgcgtgtcttccgggagttccatctacacctacggctacctatgtctgtaagacggttcgaacaactggaactgcgacccgtgctgtataattacttagacaagaatctgacggtgtctgtgcatgtgtcacccgttgagggtctgtgtctggccgggggagggggacttgcacagcaagtgttggttccagcaggcagcgcacgcccagtagccttttcggttgttcctaccgctgccacagcagtgtcattgaaagtggtggcccggggcagttttgagttccccgtcggcgacgcagtgtcgaaagtacttcaaatcgagaaggagggcgccattcatagggaggaactggtgtacgaacttaatcccctagaccacaggggtaggacccttgaaatccccggaaatagcgacccaaatatgatccccgacggcgactttaatagttatgtgcgagtgactgcttcggacccactggacacactgggcagtgagggagcgctgagtccaggcggcgtcgcttccctgctacgcctgccccgcgggtgcggggagcagaccatgatctatttggcacccactctggctgctagccgttatctggacaaaaccgaacagtggtctaccctccccccagagaccaaagaccatgccgtggatctgatccagaaaggttacatgaggatccagcaatttcggaaggcagacgggagctacgcggcgtggctgtctagggggtcctcaacctggctgacggcattcgtgttgaaggtgctgtccctggcccaggaacaagtagggggcagcccagagaagctccaggaaacatctaactggctcctcagccagcagcaggccgatggcagctttcaagacctttcgccagttatccatcgctccatgcaaggaggactggttggcaatgacgagacagtcgctctaaccgcctttgtgactatagctctccatcatggtctagctgttttccaagatgagggggcggagcctctgaaacaacgggtggaagccagcatctctaaggcctcgtcgttcctgggtgaaaaggctagtgcaggactgctgggcgcgcacgctgccgcgattacagcttacgcgttgaccctaacaaaggcgccggcggacctccgcggagttgcacacaataacctgatggcgatggcccaggaaacaggtgacaatttatactggggcagcgtcactgggagtcagagtaatgcggttagccccacccccgctccaaggaatccctccgacccaatgccacaggcacccgccctgtggatagagacaacagcgtacgccctcctccaccttctcctgcacgagggaaaggccgagatggccgatcaagcagctgcatggcttacccggcaggggagctttcaaggcgggtttcgctccacacaagatactgtgatcgccctagacgccctcagcgcttactggattgcctcacacacaactgaggaaaggggccttaatgtgacactgtcctcaacgggcaggaacggctttaaaagccatgccttacagcttaataataggcagatcagaggactggaagaagagttgcagttcagcctgggaagcaaaattaatgtgaaagtgggggggaattcaaaaggtaccctcaaagtgttgcgcacgtataatgtgctcgatatgaagaacaccacatgccaggacctacagatcgaggtgactgtcaagggacatgtggaatacactatggaagccaacgaggactacgaggactacgaatacgatgagctgccagccaaggacgaccccgatgcacccttacaacccgtcacacccctgcagctgttcgagggacgtaggaacagaaggaggcgtgaggctccgaagttaactagcttgagcgacagatatgtctcacacttcgagacagaaggaccacacgtgctgttgtatttcgattccgttcctaccagtagggagtgcgtgggcttcgaagccgtgcaggaggtgccagtcggccttgtgcagcccgcgtccgccaccctgtacgactactataacccagagagacgctgttctgtgttctatggagcacccagcaaatcccgccttctggccacactgtgcagtgcagaagtatgtcagtgcgccgagggtaaatgcccgcgccagcgtagggctctcgagcgcggattgcaggacgaagacggttaccgcatgaagttcgcctgctactaccctagagttgagtacggcttccaagtgaaggtcctgagggaagattccagagcagccttccgcctgttcgagaccaaaatcacgcaggttcttcatttcaccaaggacgtcaaagcggcagccaaccagatgaggaacttcctggtgcgggccagctgtcgcctgaggttggagcccggaaaggagtatctgatcatgggacttgatggagcgacctatgacctcgaaggacacccgcagtacctcctggattctaactcatggatagaagaaatgccctccgaacggctctgcaggtccacaaggcagcgcgccgcatgtgcgcagctcaacgattttctgcaagaatatgggacacaagggtgtcaagtctag

SEQ ID NO: 183680 - DNA, 1536 bp, synthetic construct
  misc_feature 1..1536: note = Description of Artificial Sequence: Synthetic coding sequence
  source 1..1536: mol_type = other DNA
atggccaagggcctgagcgtgcagaacgacaagcaccccggctaccagcccgcgctcctgctgagccccggggctcctctgttcgcagacggccccgcatacgcgcttttgcatctgttacttcacgaaggtaaggccgagatggccgaccaggctgcagcatggctcacgaggcaagggtctttccagggaggattccgatccacgcaggacaccgtgatcgctctcgacgccctctcagcctactggattgcctctcatacaactgaagaacgcgggctgaacgtgacactaagtagtaccggcaggaacggttttaaatcacacgctctgcagcttaacaaccgccagatccgcgggttggaggaggagcttcagtttagcctggggtccaaaattaatgtgaaagtgggcgggaactccaaagggactctgaaggtgctcagaacttataatgtccttgacatgaaaaacaccacctgtcaggatttacagatcgaggtgaccgtaaagggtcacgtggaatacacaatggaggcgaacgaagattatgaggactacgaatatgacgagctgccagccaaggatgatccggacgcacccctccagccagtgactcccttacagctctttgagggtcgccgcaaccggcgtcgcagagaagcacccaaagtggtggaggaacaggaaagcagggttcattacactgtttgcatctggagaaacggtaaggtcggactgtcaggcatggcgatcgctgatgtaacactactgtctggcttccacgccctcagggccgatcttgaaaaactgacatctctatcggatcggtatgtgtctcattttgaaaccgaagggccgcacgtgctgctgtactttgatagcgtgccaacttcccgcgaatgcgttggattcgaggcagtccaggaagtacctgtggggctcgtgcaacctgcgagtgctaccctgtatgattactataacccggagaggagatgtagtgttttttacggcgcccccagtaagagtagacttctcgcgactctgtgtagcgctgaagtgtgtcagtgcgctgaagggaaatgcccccgacagaggagggccctggaaagggggctacaggacgaggatggatacaggatgaagtttgcgtgctactatcccagagttgagtacggatttcaggtcaaggtcctccgggaagattcccgggcagccttccgactgtttgagactaagataacccaagtgttgcattttaccaaggatgtcaaagccgcggccaatcaaatgcgaaattttctggtgcgcgccagctgcaggttgaggctggaacccggaaaagaatacctcatcatgggacttgacggtgccacatacgacctggagggccatccccaatacctgctggactcaaattcgtggattgaggagatgccgagcgagagactttgtcgctcaacaaggcaaagagccgcttgcgctcagctgaatgacttcctacaggagtacgggactcagggctgccaggtttag

SEQ ID NO: 183681 - DNA, 1953 bp, synthetic construct
  misc_feature 1..1953: note = Description of Artificial Sequence: Synthetic coding sequence
  source 1..1953: mol_type = other DNA
atgggcagccagtgccggggctggcacatgtgcgccctgggcagccagcagcaggcggacggatcttttcaagatctatcacccgttatccatagaagcatgcaaggcggacttgttggaaacgacgagacagtggccctaacggcctttgtgacgatcgccttgcatcacggactggcggtgttccaagatgagggcgcagaacctctgaagcagcgggtggaggccagcatctctaaagcgtcctctttcctcggcgaaaaagcgagcgcaggacttctgggcgcacacgccgcagccatcaccgcatatgccctgacgctcacgaaagcacccgctgacctgcggggggtcgcccataataacctcatggcgatggcccaggagactggggataacctgtactggggctctgtgacaggatctcagagtaatgctgtcagccctacaccggcaccaaggaatccctctgatccgatgccccaggctcccgcactgtggatcgagaccactgcctatgctctgttacacctgctgcttcatgaaggcaaggcagagatggcagatcaggccgccgcctggcttacccggcaggggtcatttcagggcggattcagatcgacccaggataccgtgatcgcactggatgccctgagcgcttattggatagcctcacatacaaccgaagaacgaggcctgaacgtaactctgtcttcaaccggtcgcaatggatttaaatcccatgcgcttcagcttaacaaccggcagattcggggactcgaggaggagcttcagttctcacttggctccaagattaatgtgaaagtgggcggtaactccaaaggaaccttgaaggtgcttagaacatacaatgtgctggatatgaagaacactacatgtcaggatctgcagattgaggttactgtgaagggccacgttgaatacacaatggaagccaacgaggactacgaagactatgagtacgatgagcttccagccaaggacgatccagatgcgcccctccagccagtaacaccgctgcaattgttcgaaggcagaaggaaccgcagaagacgtgaagcgccaaaggtcgtggaggaacaggagagccgagtccattatacggtctgcatatggagaaacggtaaggtgggcctgagtggcatggcaattgctgacgtcactctgctctccgggtttcatgcattgagggccgatcttgaaaagcttacatctctgagtgaccgctatgtgtcccactttgaaaccgaagggcctcatgttctgctttattttgactctgtgcccacttctcgcgagtgtgtgggatttgaagcagtgcaggaagtgccggtaggactcgttcaaccagcttccgctaccctgtacgactactacaatcccgagagaagatgcagtgttttttacggagcccccagtaaatcacgcctgctagccactctttgtagtgccgaagtttgccaatgcgcggaggggaagtgtccccgccagaggcgagccctggagaggggacttcaggacgaggacggttaccgcatgaagtttgcatgctactatccaagagtcgaatatggattccaggtgaaagtattgagagaggactctcgggctgcgtttcggctgttcgaaacaaagatcacccaagttcttcattttaccaaggacgtcaaggccgccgccaaccaaatgagaaactttttagtaagagcaagttgccgactcagacttgaacccgggaaagagtacctgatcatggggctcgacggcgcaacttatgacctcgaaggccatccccagtacctgttagatagcaacagctggatcgaggaaatgccttctgagcgcctatgcagatctactaggcagcgagcagcatgcgcccagctgaatgatttccttcaagaatacggaacccagggatgccaggtgtag

SEQ ID NO: 183682 - DNA, 291 bp, synthetic construct
  misc_feature 1..291: note = Description of Artificial Sequence: Synthetic coding sequence
  source 1..291: mol_type = other DNA
atgcccggccccacccccagcggcaccaacgtgggcagcagcggccgatcgccaagcaaggcggtggcagcccgggccgccggttctacagttagacagcgcaagaatgccagctgcgggaccagaagcgctggacgtacaaccagcgccgggaccggcgggatgtggagattttacactgaagactcgcccggcctgaaagttgggcccgtacccgtcctagtaatgtctctgctgttcatcgcaagcgtattcatgctgcacatatggggcaagtatacacgatcctag

SEQ ID NO: 183683 - DNA, 3318 bp, synthetic construct
  misc_feature 1..3318: note = Description of Artificial Sequence: Synthetic coding sequence
  source 1..3318: mol_type = other DNA
ggccgggccggcgaggtgcgggccctgagcagcggcgcccagcggagaggaagccacttcgtagttctgtgtcggttgcctcgcgggagggccagggtggtcggtgcctctctatcacacgctcccctgcccctccgatattgttggaaggggcgaggaggggtctcaaggctgttttgctctcagcgtgcccggatgcctggcagcctggggagagaagctagcgggcgcgccggtccaacgggttgtggagcctttgccttcggcctacgctgccgttatgtcattagcgccccgaagatctttcgtgtgggcgcttcagagaacatagtgatccaagtatacggttatactgaagcttttgacgctaccatttctatcaagagttaccctgataagaaattctcctattcatctgggcacgtacacctctcgtccgaaaataaatttcagaatagtgcaatactgacaatccagcctaagcaactgcctgggggccagaacccagtgtcatacgtttacctggaagtggtgagcaagcacttttcgaagagtaaacgaatgccaatcacctatgataatggcttcctgttcatacacacggataagccagtatatactccagatcagtcagtgaaggtgcgtgtctattctctaaacgacgaccttaagcccgccaagagagaaaccgtgctgacattcattgaccctgagggctctgaggttgatatggtggaagaaatcgatcatataggcatcatctcattccccgatttcaaaataccttctaaccctcgctacgggatgtggacgattaaggctaaatacaaagaagatttcagtacaaccgggacagcatattttgaggtcaaagaatacgttctgcctcacttttctgtgtccatagagcccgaatacaattttatcggttataaaaattttaaaaacttcgaaattacaatcaaagctagatacttctacaacaaagtggtgaccgaagccgacgtgtacattacttttggtatcagggaagacctgaaggatgaccaaaaagagatgatgcagactgccatgcagaatacgatgctgattaacggcattgcccaagttacgttcgatagcgaaacggctgtcaaggaactgagctattactcattggaagacctcaataataagtatctctatatcgctgtcacagtgatagagtctaccggagggttctcagaggaggcggaaataccagggataaaatacgtactgtcaccctacaagctgaacctggttgctactccattgtttctgaagcctggcatcccctatccaatcaaggtgcaggtgaaggatagcctcgatcaacttgtcggtggtgtccctgtgacactgaacgcccaaacaatcgacgtgaatcaggagacatcagatttggatccgtcaaagagcgtgacccgggtagacgacggcgtggcctcatttgtcctgaacctgcctagcggagtgaccgttctggagttcaatgttaagacagacgcccccgacctccctgaagagaatcaagctcgggaaggatatagagcaatagcctacagctcgctttcccagagctacttgtacatagactggaccgataaccataaagctttgttagtcggggagcatctcaatatcattgtcacccccaagtctccttatatcgacaagatcacccattacaattacctaatcctgtccaaggggaagataatccattttggcacccgcgaaaagtttagtgatgcctcctaccagtctatcaatattcctgttactcagaatatggttccttcctcccgactcctggtgtactacattgtgaccggtgaacagactgctgagctggtgagcgactcagtctggttaaacatcgaggaaaagtgtggcaaccagctgcaggtgcacctcagccctgacgccgatgcttattccccagggcagaccgtttctcttaacatggccacgggcatggatagttgggtggccctcgcagctgtggactctgctgtctatggcgtacagcgcggtgctaaaaagccgctagagcgcgtattccaattcctggagaagtcagatctggggtgcggagcgggcggggggctgaacaacgccaatgtgttccatctggccggactgacgttcttgactaacgcaaacgccgatgattctcaggaaaacgacgagccctgcaaagaaattctccgaccacgtcggacgctgcagaagaagattgaggagatagccgctaaatacaagcattcggtcgttaaaaagtgttgctatgacggagcatgcgtgaacaacgacgagacatgcgagcagcgtgccgcaagaatctcactgggaccccggtgcatcaaggctttcaccgaatgttgtgtcgtggcgtcacagcttagagccaatatcagccataaggacatgcagctgggcagattgcatatgaaaacgctgctgccggtgagcaagcctgagattagatcctatttccctgaaagctggctgtgggaggtacatctggtgccgcgccgaaagcaacttcaattcgctctccccgacagtctcaccacttgggagattcaaggagtgggcattagcaataccggtatctgcgtggcagataccgtgaaagccaaagtctttaaggatgtgttcctggagatgaatattccgtactctgtagtaagaggtgaacaaatccagttgaaggggacggtgtataactacagaacttctgggatgcagttctgcgtcaagatgagcgcagtggaagggatttgtacttccgaatccccggtaattgatcatcagggtactaagagctctaaatgcgtacgacagaaagtggagggaagctcttcgcacctggtcacgttcacagtcctgccactcgaaatcggcctacataatatcaacttcagcctggagacatggtttggcaaagagattctcgtgaaaaccctgcgcgtggtgccagagggggtgaagcgcgaatcctactccggcgtgaccctcgatccaaggggaatttatggcactataagccggagaaaggaattcccttatagaatcccactcgacctggtcccgaaaacagagatcaaaagaatactgtcagtcaagggcctgctagtgggagagattctgagcgctgttctatctcaagagggtataaacatcctgactcacctgccaaagggtagcgcggaggccgaacttatgtctgttgtcccagtgttctacgtgtttcccgggaatcgcaaaagccttgaacacttttccttttag

SEQ ID NO: 183684 - DNA, 2805 bp, synthetic construct
  misc_feature 1..2805: note = Description of Artificial Sequence: Synthetic coding sequence
  source 1..2805: mol_type = other DNA
atggcccggcggagcgtgctgtacttcatcctgctgaacgccctgatcaacaagggacaggcctgtttttgcgatcactacgcatggactcaatggacaagctgcagtaaaacctgcaacagcggaacacaatcaaggcacagacagattgtagtggataagtattatcaggaaaatttctgtgagcagatatgtagtaagcaggaaacacgtgagtgcaactggcagcgctgccctattaactgtctgctgggcgattttggtccctggtccgactgcgacccttgtatcgaaaaacagagcaaagttcgctcagtcttgcgcccaagtcagttcggcggccagccctgtacagccccccttgtcgcattccagccttgcattccgagtaagttgtgtaagattgaggaagccgattgcaaaaataagttcagatgtgacagcggcagatgcattgcccggaaactggagtgtaatggagaaaatgattgcggtgacaattccgatgagcgagactgcggacgaacgaaagccgtctgcacaagaaaatataaccctatcccatccgtccagctcatgggaaatgggtttcactttttggccggagaaccccgtggagaggtcctggataacagctttacaggcggaatatgtaaaaccgtgaaaagcagccggacttctaatccatacagggtcccagccaatctcgaaaatgtggggttcgaggtccagactgcggaggatgatttgaagactgacttctataaggacctgacctctctcgggcacaatgagaaccagcaggggtccttttcaagccaaggcggaagctcattctccgttccgattttttacagctcaaagcgatctgagaacattaaccacaattctgcatttaagcaagcaatacaggctagccataaaaaggactctagcttcatccgaattcataaagtaatgaaagtgctgaatttcactacaaaggctaaggatctgcacctctccgacgttttccttaaagccctgaaccacctccccctggagtacaatagtgcactgtattctaggatcttcgacgacttcggaactcactatttcacttctggcagcctcgggggcgtctacgacctcctttaccagttttcctctgaagagcttaagaacagcgggctgaccgaggaggaagcaaagcattgcgtccggatcgaaacaaagaagcgcgttctctttgcaaaaaagaccaaggtcgaacaccgttgcactacgaataaactgtctgaaaagcatgagggatccttcatccagggcgcagagaagtcgataagcctcattagagggggccgcagtgagtacggggcggcattggcctgggagaagggatcctcgggacttgaagagaaaactttttcagagtggctggagtcggttaaggaaaaccccgccgttatcgatttcgagctcgcacccatcgtagacctggttagaaatattccctgtgccgtcacgaaaaggaacaacttgagaaaggcccttcaggagtacgcagccaaattcgacccttgtcaatgtgccccttgcccaaataacggccgacctaccctttccggcaccgagtgcctttgcgtgtgccaaagtgggacatatggggagaactgcgaaaagcagtcccccgactacaagagtaacgcagtggatggccagtggggatgttggtccagttggagtacatgtgatgcaacgtacaagaggtcacggacacgggagtgcaacaatcccgcaccccaaagaggagggaagagatgcgagggtgagaagcggcaagaagaagactgtacgttctctatcatggagaacaatggccagccctgcatcaacgacgatgaggaaatgaaggaagttgatttgccagagattgaggccgactcggggtgtcctcagccagtccctcctgagaatggatttatcagaaatgaaaagcaactttatcttgtaggcgaggatgtggaaattagctgcctaacgggatttgaaactgttgggtatcagtacttcaggtgtctccccgacggtacttggcgccagggggatgtggaatgccaacgcacggagtgcatcaagcccgtcgtccaagaggttctgactataaccccattccagcggttatacaggattggcgagagtatcgagctgacctgtcctaagggatttgtggttgcaggacctagtagatatacctgccagggtaactcatggacacctccaatcagcaatagccttacctgtgagaaagataccctgaccaagctcaaaggacactgccagctgggccagaaacagtccggctcagagtgcatctgcatgtcccctgaggaagattgttcacaccactccgaagatctctgtgtattcgacaccgattcaaatgactacttcacgtccccagcgtgcaagtttttggccgaaaaatgccttaacaatcagcagctgcactttttacatatagggtcctgccaggacggccgtcaactggagtggggactagagcgcacccgcctttccagtaacagcacaaaaaaagaaagctgtggttacgatacttgttatgactgggagaagtgttccgcttcgacatctaaatgcgtatgtctgttaccccctcaatgcttcaagggaggtaatcagttgtattgcgtcaaaatggggtcttctactagcgaaaaaactctcaatatctgtgaggtcgggaccatacgctgtgccaataggaagatggagattcttcacccggggaaatgtctagcgtag

SEQ ID NO: 183685 - DNA, 2805 bp, synthetic construct
  misc_feature 1..2805: note = Description of Artificial Sequence: Synthetic coding sequence
  source 1..2805: mol_type = other DNA
atggcccggcggagcgtgctgtacttcatcctgctgaacgccctgattaacaagggccaagcgtgcttttgtgaccattatgcttggacacagtggacctcctgctccaaaacttgtaactccggcacccagtctagacacagacagatcgtggtggataagtattaccaagaaaacttctgcgaacagatatgctccaaacaggaaacccgagagtgcaattggcaacgctgccccatcaactgcttgcttggggactttggaccatggtcggattgcgacccctgcatcgaaaaacaatcaaaagttcggagcgtgctccggcccagtcagttcggcggccagccctgtacagctccattagttgcatttcagccctgcattccatctaagctatgcaaaatcgaggaagcagactgtaagaataagttcagatgcgactccgggagatgtatagcgaggaagctagagtgtaatggtgagaatgattgcggagacaactccgacgagcgggactgcggacggacgaaggctgtctgtacccgcaagtataaccccatcccgtcagtgcagctgatggggaacggctttcatttcctagcaggcgagccaaggggagaagtccttgataattcctttacgggaggcatatgtaagacggttaagagctctcgaacctcgaacccctaccgcgtgcccgcaaacctagaaaacgtaggctttgaagtgcaaacagctgaggatgatcttaagacggacttttataaggaccttacgtcccttggccacaatgagaatcagcaggggagcttttcctcccagggagggagttccttttccgtgccgatattttatagttccaagagatctgagaatatcaatcacaattccgctttcaaacaggctatccaggcgagccataagaaagacagcagcttcataaggatacataaagtgatgaaagttttgaattttactaccaaggccaaggacctgcacctgagcgacgtgttcctcaaggcgctgaatcatctcccccttgaatacaacagcgccttgtacagtaggatattcgacgattttgggacacactactttaccagtggctctctgggtggtgtgtacgatttgctgtaccagttcagtagcgaagaactcaagaattcaggactcacagaagaggaggctaagcactgcgtccggattgaaactaagaagcgggtgctttttgctaagaagaccaaggttgagcatcgatgcacaactaataagctgtctgagaaacacgagggatcttttattcagggggccgaaaaatctatctccctgattcgtggcggccgatccgaatacggagccgcgctagcctgggaaaaaggcagcagcggcttagaagaaaagacattcagcgaatggctcgagagcgttaaagaaaaccccgccgtcatcgacttcgaacttgcccctatagttgatctggtgagaaacatcccttgtgccgtgacgaagcggaacaatctgaggaaggccctgcaagagtatgcggctaagtttgatccctgccagtgcgctccatgtcctaacaatggtaggcccactctgtcgggcacagaatgcttatgcgtctgccaaagcggcacatacggggagaattgcgagaagcagtctcctgactataagagcaatgcagtggacggacagtggggctgctggagctcctggtcgacctgcgacgcaacttacaagagatcacgcacccgagagtgcaataaccccgccccccagcgagggggaaagcggtgtgaaggggagaaaagacaggaagaagactgtaccttctcaattatggagaacaatggtcagccctgcattaatgacgatgaggaaatgaaggaggtggacctgcctgaaatcgaagcagatagcggatgtccccagccggtgccacctgagaacgggttcattcggaacgagaaacagctatatctggtgggcgaggacgttgagattagctgcttaacagggttcgagacagtggggtatcagtatttcaggtgcttgccagacggcacttggagacaaggagacgtggaatgtcagcgaactgagtgcatcaaaccggtggtgcaggaggtgttgaccatcacgcccttccagcgtctttatagaatcggggaatcaatcgagttaacttgcccaaagggattcgtggtggcaggccccagccggtatacgtgtcagggaaactcttggacaccacccatcagtaattctttgacttgtgagaaagatacactaacaaaattgaagggccattgtcaactcggacaaaaacagtcgggctctgagtgcatctgtatgtctccagaagaagattgtagccatcattcagaggacctgtgcgtttttgacaccgatagcaacgactatttcaccagcccagcttgtaaattcctggcggagaagtgtctaaacaaccaacagctgcactttcttcatattgggagctgtcaggacggacgtcagcttgagtgggggctcgaaaggacccggctgtcctcgaattccacaaagaaggaatcctgtggctacgatacatgctatgattgggagaaatgcagcgctagcacctctaaatgtgtgtgcctgctccccccacaatgctttaaggggggtaatcagttatactgcgttaaaatgggtagtagcacatctgaaaagaccttgaacatatgtgaggtaggcaccattcggtgcgccaatagaaaaatggagatcttacatccagggaaatgtctggcatag

SEQ ID NO: 183686 - DNA, 2532 bp, synthetic construct
  misc_feature 1..2532: note = Description of Artificial Sequence: Synthetic coding sequence
  source 1..2532: mol_type = other DNA
atgaaggtgatcagcctgttcatcctggtgggcttcatcggcgagttccagtccttctcatctgctagtagccctgtcaactgccagtgggacttttacgccccttggtccgaatgcaatggctgcaccaagactcagactcgcagacgctcagtcgccgtctatggccagtacggcggacagccttgtgtgggaaacgcctttgagacccaatcgtgcgagcctactcgtggatgcccaacggaggaggggtgcggcgagcgcttccggtgtttctcaggtcagtgcatttctaagagcctcgtctgtaatggcgactccgattgcgatgaggattccgcggacgaggacaggtgcgaggacagtgaacgcagaccttcttgcgacatcgataagcccccaccaaacatcgaactcaccggaaacggctacaatgagctgaccggccagtttaggaatagagtgatcaataccaaatctttcggtgggcagtgcaggaaagtcttcagcggagatggcaaggatttttaccgcctaagcgggaatgtactgtcatacacctttcaggtgaagatcaacaacgatttcaactacgagttttacaatagcacctggtcctacgtgaagcacactagcacggagcataccagctcttcaaggaagcgtagttttttcagatcaagtagttcaagtagccggtcttacacgtctcatactaacgagatacataaaggcaaatcctaccagctcctggtggttgagaacaccgtggaagtggcacagtttatcaacaacaatccggagttcctccagctcgccgagcctttttggaaagaattgtcccatctgcccagcctgtatgactacagcgcctacaggagactcatcgatcagtatggtacacactatctacagagcggctctttagggggagagtacagagtcctattctacgtagacagcgagaagctgaagcagaatgacttcaatagtgttgaggagaaaaagtgcaaatcctccgggtggcattttgttgtgaaatttagttcccacgggtgcaaagagctagagaatgctctcaaagcagccagtggcacacagaataatgtactgagaggggagccttttatcaggggagggggtgccgggttcatctccggcttgtcctacctcgaactggacaatcctgcaggcaacaagagaaggtattcggcttgggccgaatcagtcacgaacctgcctcaggtaatcaagcagaagcttactcctctgtacgaattagtgaaggaggtgccgtgcgcctcagtcaaaaagctgtacctgaaatgggcactcgaggaataccttgatgagttcgacccgtgtcactgccgaccttgccaaaatgggggcctggccacagtggaaggcacccattgcctgtgtcactgtaagccctatactttcggtgcagcctgtgagcagggcgtgctggtgggcaaccaggcaggtggcgtcgatggtgggtggagctgttggagctcatggtcgccatgtgtccagggtaaaaaaaccaggtccagagagtgcaataatcctcctcctagcgggggtggacggtcctgtgttggtgaaacaaccgaatccactcagtgtgaggatgaggagctggagcatctgcgcctgctagaaccccattgttttcccctaagcctggtgcctactgaattttgtccgtcgccacctgccctcaaagacgggttcgtgcaggacgagggtactatgttcccagtcggcaaaaatgtggtgtacacttgtaatgaaggatactctctgatagggaaccccgtggcgcgctgcggcgaagacttgagatggctggtgggcgagatgcactgccagaagattgcctgtgtgctcccagtgttgatggacggaattcagtcacacccacagaaacccttctacactgtcggggagaaagttaccgtatcttgttccggtgggatgagcctagaaggaccttctgcctttctatgcggctcttcactcaagtggagtcccgaaatgaagaatgcgcgatgtgttcaaaaggagaatccattgacacaagccgtaccaaaatgtcagcgttgggaaaagctgcagaactcccggtgcgtgtgcaaaatgccttatgagtgtggcccttctcttgatgtttgcgcccaagatgaaagaagtaaacggatcttgcccctcactgtttgtaagatgcatgttctgcactgccagggccgtaattatactttaaccggacgcgactcgtgcaccctcccggcaagcgccgaaaaagcatgtggcgcctgcccactgtgggggaagtgcgacgctgaatcttccaaatgtgtctgccgggaagcttctgaatgcgaagaggagggattcagcatttgtgtggaagttaatgggaaggagcagacgatgagtgagtgtgaggcaggagccctgcgctgccgcggacagtctatatcggtgacaagcatccggccatgcgctgcggagacccagtag

SEQ ID NO: 183687 - DNA, 1461 bp, synthetic construct
  misc_feature 1..1461: note = Description of Artificial Sequence: Synthetic coding sequence
  source 1..1461: mol_type = other DNA
atgaaggtgatcagcctgttcatcctggtgggcttcatcggcgagttccagagcttcagctctgcatccagtccagtgaactgtcagtgggacttctacgcgccctggagcgaatgtaatgggtgcacaaagacgcagacaaggaggagatctgtcgcagtctacggtcagtatggtgggcagccctgcgtcggaaacgcgttcgagacccagtcatgcgagccgaccaggggctgtccaaccgaagaaggctgtggcgagcggtttcgatgcttttctggacagtgcatttcaaagtccttggtgtgcaacggcgattcggactgcgacgaagatagcgccgatgaagaccggtgcgaagattctgagcggaggccttcttgtgatatagataaaccccccccaaacatagagctgaccggcaatggatacaacgaacttacagggcaattccgaaaccgcgtgttgttttacgtcgactccgagaagctgaaacaaaacgactttaattcagtggaggaaaagaaatgcaaatcatccgggtggcacttcgtggtcaaattctcatcccacggctgcaaagaattggagaacgcactcaaggccgccagtggcacgcagaataacgtcctccggggcgagccatttatccgaggcgggggcgccggattcatatccggactatcatacctggaactggacaatccggcaggaaacaaaaggcggtatagcgcatgggcagaaagtgtcacaaaccttccacaggtcattaaacaaaaattgaccccgctatatgaacttgtgaaggaggtgccctgcgcatccgtaaagaaactttacctgaagtgggcgctggaagaatacctggatgagtttgacccatgtcattgcagaccgtgtcaaaatgggggacttgccactgttgaaggtacacactgtctctgccactgtaaaccctacacatttggcgcagcctgcgaacagggcgtcctggtgggaaaccaggccggcggtgtagatggaggatggtcatgctggtcttcatggagcccctgcgtgcaggggaagaaaacacgttctcgagagtgtaacaaccccccaccttctggtggcggtcggtcctgtgtcggtgagacaactgaatccacccaatgcgaagacgaagaacttgagcacctgagactgttagagcctcactgcttcccattatcattggtgcctaccgaattctgccccagcccccccgccctgaaggacgggttcgtgcaggacgaaggcacaatgttcccggtaggtaagaacgtggtctacacttgtaatgaaggatattctctaattggaaatcccgttgcaagatgcggggaggaccttaggtggctcgtcggagagatgcactgccagaacgggaagataagcaactggatgaaggtgaacgagaccctcctcgtggaacatcactag

SEQ ID NO: 183688 - DNA, 1032 bp, synthetic construct
  misc_feature 1..1032: note = Description of Artificial Sequence: Synthetic coding sequence
  source 1..1032: mol_type = other DNA
atgaaggtgatcagcctgttcatcctggtgggcttcatcggcgagtttcaatcctttagctccgccagttcccctgtgaattgccagtgggacttctacgccccctggagcgaatgcaacggctgtacaaaaacccagacacggcggagaagcgtggcagtatacgggcagtatggcggacaaccctgtgtggggaacgccttcgaaacccagagttgcgagcctacaagagggtgccctaccgaagagggctgcggtgaacgcttccgctgcttttcgggacagtgcatcagcaaaagtctcgtgtgtaatggcgattccgactgtgacgaggatagtgctgacgaagacagatgtgaagattctgaacgccgcccatcatgcgatattgacaaacctccacctaatattgaactgactggcaacggatataacgagttgactgggcagtttcgcaatagggtgatcaacacaaagagttttggcggacaatgccgcaaagtgttctctggcgacggaaaggacttttatcgcctgtctggaaacgtcctcagctacacattccaggtgaagataaataacgacttcaactatgaattttataacagcacctggtcatatgtgaagcatactagcaccgaacacacaagttccagccgcaaacgcagtttctttaggtcttcaagttctagctcacggtcctacacctcgcacaccaatgaaatccataaggggaaaagttaccagctgctggtagtcgaaaacactgtggaggtggcacagtttattaacaataacccagagttcctccaactggctgagcctttctggaaagagctatctcatctgccctcgttgtacgattacagtgcctatagacggcttatcgatcagtacggcacgcactacctgcagtccgggtcacttggaggcgagtacagagtcctcttctacgtggacagtgagaagctcaagcaaaatgattttaactccgttgagaaaaagaagaagaaaaagaaaaaaaagaaatag

SEQ ID NO: 183689 - DNA, 1755 bp, synthetic construct
  misc_feature 1..1755: note = Description of Artificial Sequence: Synthetic coding sequence
  source 1..1755: mol_type = other DNA
atgttcgccgtggtgttcttcatcctgagcctgatgacctgccagcccggggtgactgctcaagaaaaggtgaatcagcgggtgagaagggctgctacacccgcagctgtgacgtgtcagctgtcgaactggtctgagtggacggactgcttcccctgtcaggacaagaaatacagacatcgcagtctgttacagccgaataagtttggggggactatttgtagcggagatatttgggaccaagctagttgttccagttccacgacctgtgtcagacaggctcaatgcggtcaagacttccagtgcaaggagaccggaaggtgtctcaaaagacacctggtttgtaacggagatcaggactgcctggatggatcagacgaagatgattgcgaggacgtgcgtgcaattgatgaggactgtagccagtacgaacccatcccaggctcccagaaggcagccctgggctataacattcttacccaagaggatgcacagtccgtgtatgacgcttcctactacgggggacagtgtgaaacggtttataatggcgagtggcgagagttaagatatgattctacatgcgaacggctatattacggagacgacgaaaaatacttccggaaaccatacaacttcctcaaatatcacttcgaagctttggccgacacaggcatttcatccgaattctatgacaacgcaaacgatcttctgtctaaagtgaagaaggacaaatctgatagctttggagtgactatagggattgggcctgccggatcccctctgctggtgggtgtgggagtttcacattcccaggacacttcctttctcaatgagctgaacaaatacaacgagaagaaattcatcttcacccggatcttcaccaaagtgcaaacagcccatttcaagatgcgcaaggatgatattatgctggacgagggaatgttgcagtccctgatggagctgccggaccagtataattatggtatgtacgctaaatttatcaacgattacggcacccactacatcacaagtggatcaatggggggaatatacgaatatatactggtcatcgataaggctaagatggagtcccttgggatcacttccagggatattacgacgtgcttcggaggaagcctcggcatacagtacgaggataaaatcaacgtaggggggggcctctcgggcgaccattgcaagaaatttggaggcggcaagaccgagagagcaaggaaggcgatggctgtggaggatataatctcccgagttcggggcggatctagcggatggagtggcggcctggcacagaaccggtcaacaatcacttaccggagctggggtcggtctctcaagtataatcccgtggtgatagactttgagatgcaaccaattcatgaagtccttcgccacacatctctgggtccgttggaggcaaagagacaaaatctgcggagggctctggaccagtacctgatggaatttaatgcctgtcgctgcggaccatgctttaataatggcgtgcccattctggaaggcacttcctgcaggtgccagtgcaggcttggaagccttggcgccgcctgtgaacaaactcagactgagggggccaaggccgatggctcatggtcctgctggagcagctggtccgtgtgcagagcgggcattcaggaaagaaggcgggagtgcgataaccccgcaccgcagaacgggggtgcttcgtgccccgggcgcaaagtgcagacacaggcatgttag

SEQ ID NO: 183690 - DNA, 1776 bp, synthetic construct
  misc_feature 1..1776: note = Description of Artificial Sequence: Synthetic coding sequence
  source 1..1776: mol_type = other DNA
atgaagaacagccggacctgggcctggcgggcccccgtggagctgttcttattgtgcgccgctctgggctgcctcagcttgccaggcagtagaggggagaggccccattcattcggaagcaatgctgtcaacaagtccttcgcgaagagcagacagatgcgatctgtcgatgtgacattgatgccgatcgactgtgaacttagcagctggtcatcctggaccacatgtgatccttgccagaagaagcgctaccggtacgcttacttgctgcagccgtctcagttccatggggaaccctgcaacttttctgacaaagaggtcgaagattgtgtgaccaaccgcccatgtggctctcaggttcgatgcgagggcttcgtatgtgcccagaccggccgctgcgtgaaccggagactgctgtgcaacggtgataatgattgtggagaccagagtgatgaagccaactgccgcaggatatacaaaaagtgccagcatgaaatggaccagtactggggaatcgggtcgttggcctctgggatcaatctgttcacaaatagcttcgaagggcctgtgctcgaccacagatactacgccggaggctgttcaccacattacatcttgaatacaagatttaggaagccttataacgtggagagctatactccccaaacacagggaaagtatgagttcattttgaaggaatatgaatcgtactccgattttgagaggaacgtgacagaaaaaatggcttcaaagtcgggtttctctttcggtttcaagatacccgggatcttcgagcttggtatcagcagtcaatccgatcgtggaaaacactacattcgccggacaaagcggttctctcatacaaagtctgtgtttttgcatgcgaggagcgacttggaagtcgcccattataagcttaaaccaagatctctcatgctgcattacgaatttctccagcgcgtgaagcgcctgccactggagtactcctacggcgaatacagagatctgttcagggacttcggcacccactacatcaccgaagccgtactcggcggcatctacgagtatacactggtgatgaataaggaggctatggaaaggggggactacactctcaataacgtgcatgcctgtgccaagaacgattttaaaatcggcggggcaatcgaagaggtctatgtgtccctgggtgtcagcgttggaaagtgcagaggaatcttgaacgagatcaaggaccggaataagagagacaccatggtggaagacctagtggtgctggtgcggggcggggcatcagagcatataacaacactcgcctatcaggagctgccaactgccgacctcatgcaggagtggggggacgcggtgcagtataatcccgcaataataaaggtcaaggtagaacccctctacgaactggtgaccgccaccgattttgcgtactcatctaccgttagacagaatatgaagcaggccctggaagagttccagaaggaggtgtcatcctgtcactgcgctccatgccaaggcaatggggtgccagtactgaaagggtcgcgctgcgattgcatctgtcccgtaggaagtcagggtcttgcctgtgaggtttcatacaggaagaataccccaattgatggtaaatggaactgctggtccaactggagtagctgttccggccgaaggaaaacccgacagagacagtgcaacaatcccccaccccagaatggtggttccccctgcagcgggcctgcctctgagaccctggactgtagctag

SEQ ID NO: 183691 - DNA, 1590 bp, synthetic construct
  misc_feature 1..1590: note = Description of Artificial Sequence: Synthetic coding sequence
  source 1..1590: mol_type = other DNA
atggacacctgcatgaccctggccttcaccctgagcggccggttcttcatgctactgagccagtatcgatatgcctacctgctgcagccttcccagtttcacggagagccatgtaattttagtgacaaggaagtagaggactgcgtgacaaaccggccctgtggctcacaggtcagatgcgagggcttcgtctgcgctcagacaggccgttgtgtgaacaggcggctgttatgtaatggcgataatgactgcggagatcaaagcgatgaagcgaattgccgaaggatatataagaaatgtcagcacgagatggatcagtattgggggattggatcgctggcctctggtatcaacctttttaccaacagcttcgaaggacccgtcctggaccacaggtactatgcaggcggatgctccccacactacattctgaacacgagatttaggaagccttacaatgtagagtcctacaccccgcagacccaggggaagtatgagttcatcctcaaagagtacgagtcctattccgattttgaaagaaacgtaaccgaaaagatggctagcaaatcaggcttctctttcggcttcaagatcccaggtatcttcgagctggggatctcctcacagagtgatagaggcaagcactacatccgtcgtactaagcggttttcgcacacaaaaagcgtcttcctgcatgctcggtcagacctagaagtggcccactacaagctgaagccacggtctctcatgttgcactacgaatttttacagcgagtcaagcggctccccctggaatattcctatggggagtatcgagatctgttccgagacttcgggacgcactatatcactgaagccgttctgggcggcatttacgagtatacccttgtgatgaacaaggaggcaatggagcgaggggattacacccttaacaatgttcacgcgtgtgccaagaacgattttaaaatcggaggcgctatcgaagaggtatatgtctccctcggagtgtccgttggaaaatgcagagggatactgaatgagatcaaggataggaataaacgggatacaatggtggaggacttggtagtgttggttcgtggaggtgccagcgagcacataactacccttgcatatcaggaacttcccaccgctgacctcatgcaagaatggggggacgccgtccaatacaatcctgccattattaaggtcaaggtcgagcctctgtatgaactggtgacagccacagacttcgcttactctagcactgtgagacagaacatgaagcaggccctcgaagagtttcagaaagaagtctcttcatgtcattgcgcaccatgtcagggtaatggtgttcccgtgttgaagggcagccgctgcgactgtatttgcccagtgggctcacagggcttggcctgcgaagtcagttaccgaaaaaacacccctatcgacgggaaatggaattgctggtcaaattggagctcttgcagcggtagacgcaagacccggcaaagacagtgtaataacccgcccccccaaaacggagggtcaccttgctccgggccggcctctgagacgctggactgctcatag

SEQ ID NO: 183692 - DNA, 1620 bp, synthetic construct
  misc_feature 1..1620: note = Description of Artificial Sequence: Synthetic coding sequence
  source 1..1620: mol_type = other DNA
atgcggagcgtggacgtgaccctgatgcccatcgactgcgagctgagctcatggtcgtcatggaccacttgcgatccctgccagaagaagcgctatcgatacgcctaccttctgcagccctctcaattccacggggaaccctgtaacttcagtgacaaagaggttgaggactgtgtgactaatcggccctgcggaagtcaggtgcgctgcgaaggcttcgtatgtgcgcagactggcagatgtgtcaatcggaggctgctgtgtaatggagataacgactgcggcgaccagagtgatgaggcaaactgtaggagaatctacaaaaagtgccagcatgagatggaccagtactgggggattggctctttggcctctggcattaatctctttaccaacagttttgaaggccctgtactcgaccatagatactacgccggagggtgctccccgcactacatattgaacactcggtttagaaagccatataatgtggagagttacacaccacagacccagggaaagtacgaatttatacttaaagagtacgagtcctacagcgacttcgagcggaacgtaactgagaaaatggcgtcaaaatcaggctttagctttgggttcaagattcctggcatcttcgaactcggtatcagttctcaatctgatcgtggtaaacattacattcgtcggacgaaaagattttctcatacaaagtcagtgttcctgcatgctcgcagcgacctagaagtggcccattataagctgaaaccaaggtctctgatgctccactacgagttcctgcaacgcgtgaagagactgccattggagtactcttatggcgaatacagagatcttttccgtgattttggtactcactacataaccgaggccgtcttgggcggcatatacgaatataccttagtgatgaacaaagaagctatggagaggggagattatacgcttaataatgtccatgcgtgcgccaagaacgattttaagattgggggtgctatcgaagaagtctacgtctcattgggagtctcagtaggcaaatgtagaggaatcctcaacgaaataaaagaccgaaacaagagagacaccatggtggaggacttagtggttctagtgcgcggaggggccagtgagcacataaccaccctggcataccaagaactaccaactgccgacttgatgcaagagtggggagacgccgtgcagtataatcccgccataataaaagtcaaggtggaaccactgtatgagctcgtgaccgcaaccgacttcgcttactcgtctacagtgaggcagaatatgaagcaggcgttagaagagttccagaaggaagtttcctcctgtcactgcgccccgtgtcaaggtaatggggtccccgttctgaaggggtcccgctgtgattgtatttgcccagtaggtagccagggactggcctgtgaggtgtcctatcggaaaaatacgccaattgatggcaaatggaattgctggtctaactggagcagctgcagtggacgtcggaagacccgtcagcggcagtgcaataacccgcctccccagaacggggggtcaccatgcagtggcccagctagtgaaaccttggattgctcttag

SEQ ID NO: 183693 - DNA, 675 bp, synthetic construct
  misc_feature 1..675: note = Description of Artificial Sequence: Synthetic coding sequence
  source 1..675: mol_type = other DNA
atggccacccaccacaccctgtggatgggcctggccctgctgggcgtgctgggcgacttgcaggcggcaccagaggcgcaggtctcagtgcagccaaacttccagcaggacaagtttctcgggcgctggttctcagctgggctcgcttccaactcgtcatggctgagggaaaagaaagcagcgctctcgatgtgtaaatctgtggttgcgcccgccaccgacggaggcctgaatttgaccagcacttttctcagaaagaaccagtgtgaaacacgcactatgctcttacaacctgccggcagcctgggttcttactcctacagatcaccgagggagtggggcttacatcggccaccaggcccatcattaggagctaccctggcaggcaccaccctcggccaacctccggccgccgaaatccacggtgtgggcgactgggggtctacatatagtgtctcagtggttgaaaccgattacgaccagtacgctcttttgtatagccagggaagcaaggggccaggggaggatttccgtatggctactttgtactcgaggactcagactccacgggccgagctgaaggagaaattcacagcattttgcaaagctcagggctttaccgaagacacgatcgtctttctgccacagacagataaatgtatgactgagcagtag

SEQ ID NO: 183694 - DNA, 495 bp, synthetic construct
  misc_feature 1..495: note = Description of Artificial Sequence: Synthetic coding sequence
  source 1..495: mol_type = other DNA
atgctgccccccggcaccgccaccctgctgaccctgctgctggccgctggctccctcggtcagaaaccacagcgaccccgacggccagctagccctattagcactatccagcccaaggccaattttgacgctcagcagtttgctgggacatggctcctggtggctgtcggcagcgcctgcaggttcctgcaggaacagggacatagggctgaggcaacaacactccatgttgcccctcaggggacagcaatggcggtgtccacttttcgaaagctggatggtatctgttggcaggtccgccagctttacggagacaccggagttttgggtagatttctcttgcaagctagggacgcgagaggcgcggttcacgtcgtcgtggccgagaccgattatcagagtttcgcggtcttgtatctggagcgcgcaggccagctcagtgtgaagctctacggcgcccaaggggtggtgacagaccgtccaggagtagggtag

SEQ ID NO: 183695 - DNA, 1680 bp, synthetic construct
  misc_feature 1..1680: note = Description of Artificial Sequence: Synthetic coding sequence
  source 1..1680: mol_type = other DNA
atgagcgcctgccggagcttcgccgtggccatctgcatcctggagatttcaattctgacagcacagtataccaccagttacgacccggaattgacagagtcatcaggcagtgcttctcatatcgattgtagaatgagcccgtggagcgaatggtcccagtgcgatccatgtttgagacagatgttcagatctcgatctatcgaggtcttcggacagttcaatgggaagcggtgtaccgatgccgtgggagatcggaggcagtgcgtacccaccgagccttgtgaggacgccgaagacgactgtgggaatgacttccagtgcagtacaggtcgttgcatcaagatgcggctgaggtgtaacggtgataacgattgcggagatttctctgatgaggacgattgtgaaagcgagccgcggcccccatgccgcgatagggtggtggaggagtctgaactagcacgcacagccggttacggcatcaatattcttggcatggacccactttctactccattcgataatgaattctacaacgggctttgcaaccgcgaccgtgatggaaacaccttaacttactaccgccggccgtggaatgtggctagtcttatctacgagaccaagggggagaaaaactttcggaccgagcactacgaggagcaaatcgaggctttcaagagtatcattcaggagaagacctccaattttaatgctgccatatccctcaagttcacccctaccgaaaccaataaggccgaacagtgttgtgaagaaacggcctctagcatctccctgcatggcaaaggctcatttcgattctcctatagtaaaaacgagacctaccagctcttcctgagctacagtagcaagaaagagaagatgtttctccacgtaaaaggcgaaatccatttaggtcgtttcgtgatgaggaaccgggacgttgtactcacaaccacttttgtggacgatatcaaagccctgcctacaacgtacgagaaaggagagtatttcgctttcctcgagacatatggcactcactactcatcttcaggatccctggggggattatatgaattaatctatgttttggataaagcgtcaatgaagcgcaaaggggttgaacttaaggatatcaagcgctgcctgggctaccatctcgacgtttcattggcctttagcgaaatatcagtgggcgccgaatttaacaaagacgattgcgtcaagagaggggaaggccgcgctgtcaatattaccagcgaaaatctaatcgatgacgtcgtttctctgatacgtggaggcacacgcaaatacgcattcgagctgaaagagaagctgctaaggggaacagtcatcgacgttaccgacttcgtgaattgggccagctctataaatgatgcaccagtcctgatttctcagaaactttcaccaatctacaatctagttccagtgaaaatgaaaaacgcccacctaaagaaacagaacctggaacgcgccatagaagactatataaacgaatttagcgtgcgaaagtgtcatacgtgccaaaacggaggcactgtgatactaatggacgggaaatgtttgtgtgcatgcccctttaagttcgaaggcattgcgtgtgaaatctctaagcaaaagatctcagaggggttgcctgctctggaattccctaacgaaaaatag

SEQ ID NO: 183696 - DNA, 1770 bp, synthetic construct
  misc_feature 1..1770: note = Description of Artificial Sequence: Synthetic coding sequence
  source 1..1770: mol_type = other DNA
atgggcagcaacctgagcccccagctgtgcctgatgcccttcatccttggccttctgtcgggaggtgtcaccacaaccccatggtcgctggctcagccacaggggtcatgtagcctcgaaggggtggaaatcaaggggggctcctttcgcttgctacaggagggacaagctctcgagtatgtttgcccgtccggcttctacccttatccagtgcaaacccggacatgtaggagcacaggctcgtggtctacactaaagactcaggatcaaaagacagtgagaaaggccgaatgtagggcaattcactgtcctcgtcctcatgatttcgagaatggagagtactggcctcgctccccctactacaacgtcagcgatgaaatttctttccattgctacgacggctatacccttcggggctccgctaacagaacctgccaagtcaacggtaggtggagtggacagacagctatctgtgacaacggcgcgggttactgcagtaaccccggtatccctattggtacaagaaaagtgggttcgcagtaccgcttggaggactcggtgacctatcactgctcacgaggtctgaccctgcggggtagccagaggagaacctgccaagagggaggatcttggagtggcacagaaccatcctgccaggattctttcatgtatgatacgcctcaggaagttgctgaagcattcctaagcagcttgacagaaactatcgagggtgttgatgctgaggatggtcatggccctggcgagcagcagaaaagaaagattgttttagatcccagcggctccatgaatatctacctcgtgctggatggatcagacagcatcggggcctctaactttaccggtgccaagaaatgtctggttaatctgatcgagaaagttgccagctacggcgtgaagccaaggtacggcctagtgacttatgcaacctatcctaagatttgggtgaaggtctccgaggcggattccagtaacgccgattgggtaacgaagcagttaaatgaaataaattacgaagaccataagcttaagtctgggacaaatacaaagaaagccttgcaagctgtgtacagtatgatgtcctggcctgacgacgtcccacccgaggggtggaatcgtactcgccatgttatcatactcatgactgacgggctccacaacatggggggcgaccctatcacagtgatcgacgaaatcagggacctgctttatattgggaaggaccgcaaaaatcccagagaggactaccttgacgtgtatgtgttcggtgtgggaccgttggttaatcaggtgaatatcaacgccctggctagtaagaaagataatgaacaacacgtgttcaaagtgaaggacatggagaacttggaagatgtcttttaccaaatgattgatgaatcccaatccctctccctgtgtggcatggtttgggagcatcgcaagggcaccgactaccacaagcagccttggcaggctaagatctctgtgatcagaccttccaaaggccacgaatcgtgtatgggcgctgtggtaagcgaatactttgtgctgaccgccgcccattgttttacagtggacgataaggagcactccatcaaggtgtccgttggcggggaaaagcgcgatctggagattgaggtcgtcctctttcatcccaactataatataaacggcaagaaggaagccgggatcccagaattctatgactatgacgtggctttgataaaactgaaaaacaagctgaagtatggctag

SEQ ID NO: 183697 - DNA, 1770 bp, synthetic construct
  misc_feature 1..1770: note = Description of Artificial Sequence: Synthetic coding sequence
  source 1..1770: mol_type = other DNA
atgggcagcaacctgagcccccagctgtgcctgatgcccttcatcctaggtctcctgtctggcggggtaaccaccaccccctggtccctggcgcaacctcaaggttcctgctccctggaaggagtggagattaagggcgggtccttcaggctgctgcaggagggtcaagcgcttgaatacgtctgtccctctgggttctatccatatccagttcagacccgcacatgcagatccaccggctcttggtcaaccctgaagacacaggaccagaagaccgtccgcaaggccgaatgcagagccatccactgtcctaggccgcacgactttgaaaatggtgagtactggcctcgctctccttactacaacgtgagcgacgaaattagcttccattgctatgatggttacacgctaagaggctccgccaatcgaacttgccaggtgaatggtaggtggtcaggtcagaccgccatatgcgataatggggctggctattgcagcaatcccggcatcccaatagggactagaaaagtgggatcgcagtatagactggaagattccgtcacgtaccattgcagccggggcctgaccctgcggggctctcagcgcaggacttgccaagagggaggatcctggagcggcactgagcctagctgtcaggactcttttatgtatgataccccccaggaagtcgctgaggcttttttatctagcctgacggaaaccatcgagggcgtggacgcagaagacggacacggtcccggcgaacagcagaagagaaagatcgtcttggacccatcaggcagtatgaacatctacctcgtgcttgacggttcagatagcattggtgcctctaactttactggggctaagaaatgcctggtcaatctcatcgaaaaggtggcctcttacggtgtgaaaccccggtacggcctggtgacatatgctacataccctaagatctgggtaaaggtcagtgaggcggactcatcaaatgctgactgggtgactaagcaactcaacgagattaactacgaggatcataagttgaagagcgggacaaatacaaaaaaagctttacaagcagtgtacagcatgatgagttggccagatgatgtcccaccagagggatggaacaggacccggcacgtgatcatcctgatgaccgatggcttgcacaacatgggtggagatcctatcacggttatcgacgaaattcgcgatttgctctatatcgggaaagaccgtaagaatcctagggaggattacctcgacgtgtacgtctttggcgttgggccccttgtcaaccaagtgaacatcaacgccctagcgtccaagaaagataatgagcaacatgtctttaaggtgaaggacatggaaaatctggaagacgtgttctatcagatgatcgatgagtcccagtccctgtcactttgtggtatggtttgggaacataggaagggtactgattatcacaaacaaccatggcaggccaagatatcagtgatcaggcccagtaagggacacgaatcttgtatgggagcagtggtcagtgagtacttcgttctgaccgccgcccattgcttcaccgtggatgacaaagagcactcaataaaggtgtcagtgggtggagaaaaacgagatctggagatcgaagtggtgctgtttcacccaaattataacatcaatggcaaaaaagaggcaggtatcccagaattctacgattatgatgtggcacttataaagctgaaaaacaaactgaaatacggatag

SEQ ID NO: 183698 - DNA, 2295 bp, synthetic construct
  misc_feature 1..2295: note = Description of Artificial Sequence: Synthetic coding sequence
  source 1..2295: mol_type = other DNA
atgggcagcaacctgagcccccagctgtgcctgatgcccttcatcctaggtctgctgtcggggggagtcacaacaaccccatggagtctcgctcgaccccagggctcatgctctcttgagggagtggagatcaagggagggagcttccgtctgcttcaggagggccaggcattggaatacgtgtgccccagtggtttttatccctaccctgtgcagacaaggacttgtaggagcactggatcctggagtaccctaaaaactcaggaccagaagaccgttagaaaagctgaatgtcgtgcaatccattgcccccgaccccacgatttcgagaatggggagtactggccccgttccccctactacaacgtctctgacgaaattagctttcactgttatgatggctatacactgcgaggcagtgccaatagaacttgccaagtgaatggacgatggagtggccaaaccgcaatatgcgataatggtgccggttactgctctaatccaggcattccaattgggacccgaaaagtgggttcccaataccgactcgaggacagcgtgacttaccactgcagcagaggactcacgcttcggggctctcaaagacgcacatgtcaggagggcggctcatggtcagggaccgaaccatcctgccaagacagctttatgtacgacacacctcaggaggtggccgaagcctttctgagctccctaacagagaccattgagggggtggatgctgaagacggacacggccccggggagcagcagaagagaaaaattgttttagacccaagtggatcaatgaacatctatctggtgctggacggcagtgactccatcggagcaagcaatttcaccggggctaagaaatgcctggtgaacctgatcgagaaggttgcatcctacggagtaaagcctagatatggactggtcacatatgcgacctaccccaagatctgggtgaaagtatcagaagccgattcttctaatgccgactgggtaacaaagcagctgaacgaaatcaactacgaggatcacaagctaaagagtggcactaatacgaaaaaggctctccaggccgtttactctatgatgagctggccagatgacgtgccacctgagggctggaaccgaacacgtcatgtgataatcctaatgaccgacgggctgcataatatgggtggggaccctataaccgtgatcgacgagattagagacctgctgtacatcggtaaagatagaaaaaatccccgcgaagattacctcgatgtctacgtgtttggggtaggtcctctggttaatcaggtcaacattaatgccttggccagcaagaaggataatgaacagcacgtcttcaaggtaaaagacatggagaacctggaagatgtgttttaccagatgatagatgagtcacagtcactcagcctgtgtgggatggtgtgggaacaccgcaagggaacggactatcacaagcagccctggcaggcaaaaatttcggtcatccgccctagcaaaggtcatgaaagctgtatgggggctgtcgtctctgagtattttgtgctcacggcagcgcactgctttacagtcgacgacaaggaacactccattaaggtctcagtggggggagaaaagagggatttagagatcgaagttgtgctcttccaccccaactacaacatcaatggcaaggaggaggcagggatcccagaattctacgattacgatgttgcgctgatcaagctgaagaacaagctgaagtacggccagaccatcagaccaatctgtctgccctgtactgagggcactactcgcgcccttagacttccccccaccacaacctgccagcagcagaaggaggagctcctgccggctcaggatattaaggctctgtttgttagcgaggaagaaaagaaactgactcggaaggaggtgtatataaaaaacggggataaaaaaggcagttgtgaacgcgacgcgcagtatgctcctggttatgacaaagtgaaagatatatccgaagtggtgacaccaagatttctctgtactggaggggtgtctccctatgccgacccaaatacatgtaggggggattcgggaggaccactaattgttcacaagaggagcaggttcatacaggtgggggtaatcagttggggtgttgtagacgtatgtaagaatcagaaacgacagaagcaggtgcccgcccatgcaagggactttcacattaacctttttcaggtgctgccatggctcaaagagaaattgcaggacgaagatcttggctttctatag

SEQ ID NO: 183699 - DNA, 2295 bp, synthetic construct
  misc_feature 1..2295: note = Description of Artificial Sequence: Synthetic coding sequence
  source 1..2295: mol_type = other DNA
atgggcagcaacctgagcccccagctgtgcctgatgcccttcatcctgggtttactttcaggaggagtgacgactaccccatggtcacttgctcggccacagggtagctgctctttagagggtgtggaaatcaaaggggggtcctttagactgttgcaagaaggtcaggctctcgagtatgtttgccccagcggtttttatccatatcctgtacaaacacgcacctgcaggtcaacaggctcatggagcacccttaaaacccaagaccagaaaaccgtgaggaaggccgaatgtagagccatccattgtcctagaccccacgatttcgaaaacggcgaatattggcctcggagtccctattataatgttagcgatgagatctcctttcattgctacgacgggtatacccttcggggcagcgcaaatcggacatgccaagtgaatggaagatggagcggccagaccgctatctgtgacaacggcgcaggctactgtagtaacccaggtattcctataggtacgaggaaggtgggcagccagtaccgcctggaggattctgttacgtatcattgcagtagagggcttactctaagggggagtcagaggcggacgtgccaggagggggggtcatggtccgggactgaaccatcgtgccaggattcattcatgtacgatacacctcaggaggttgcggaagccttcctctcttctcttacagagactattgagggcgttgacgctgaagatgggcatgggcctggcgaacagcagaagcggaaaatcgttttggatccctcagggtccatgaacatttatctggtgctggacggttctgatagcatcggggccagtaattttacgggggctaagaagtgcctggtgaatctgattgaaaaagtggcctcctatggggttaagcccaggtatgggctggtgacctacgcgacatacccaaaaatctgggtgaaggtgtctgaagctgattcctcaaacgctgattgggtcactaagcagttgaatgaaattaattacgaggatcataagcttaaatccgggaccaacaccaaaaaagctctgcaggccgtgtactcaatgatgtcatggcctgacgatgtgcccccggagggctggaacaggacaaggcacgtcattatacttatgacagacgggctgcataacatgggaggagacccgatcaccgtgattgacgagatacgagatctcctctatataggtaaggatcggaaaaaccccagagaagactatctggacgtgtatgttttcggagtcggccctctggttaatcaggttaacattaacgctctcgcgtctaaaaaagacaacgagcagcatgtgttcaaggtgaaggacatggagaacctggaagatgttttctatcagatgattgatgaatcacaatctctgtctctgtgcgggatggtatgggaacaccgaaagggaaccgattaccataagcagccctggcaggccaaaatcagcgtaattagacccagcaagggccatgagagctgcatgggagctgtggtgagcgaatacttcgtccttactgcggcccactgtttcaccgttgatgataaggagcacagcattaaggtgtcagtgggcggcgagaagcgcgatctcgaaattgaggtggtactgttccacccaaactataacattaatggtaagaaggaggctggaatccccgaattttacgactatgacgtggctttaatcaaactaaagaacaagttgaagtatgggcagacaatcagacccatttgtcttccttgtaccgaaggaaccacaagggccctcaggctccccccaaccaccacttgtcagcaacaaaaagaagaactcctgcccgcacaggacatcaaggctttatttgttagtgaagaggagaaaaaactgacacggaaggaagtctacataaagaatggcgataagaagggcagttgcgagcgtgatgcccaatatgcccctggctacgataaggttaaagacatctccgaggttgtgactcccagattcctatgcactggaggcgtgtctccttacgccgacccaaatacgtgcagaggtgactccggcggccccctcatcgtgcacaaaaggtcccgcttcatacaggtgggagtgatcagttggggcgtggtggatgtttgtaaaaaccagaaaaggcaaaaacaagtccctgcccacgccagagatttccacatcaacctctttcaggttctcccctggctgaaggaaaagctgcaggacgaggatttgggatttctttag

SEQ ID NO: 183700 - DNA, 2295 bp, synthetic construct
  misc_feature 1..2295: note = Description of Artificial Sequence: Synthetic coding sequence
  source 1..2295: mol_type = other DNA
atgggcagcaacctgagcccccagctgtgcctgatgcccttcatccttggactgctgtccggtggtgtaacaaccaccccttggtcgcttgcccgcccgcagggttcctgcagccttgagggtgttgaaatcaaaggcgggtcatttagattactgcaggaaggccaggccctggagtacgtgtgtcctagcggcttttatccttaccctgtccagactaggacttgtcgctcaaccggatcatggtcgaccctgaaaactcaggatcaaaagacggtacggaaagctgaatgccgagctatacactgcccccgcccccatgacttcgagaacggcgagtattggccgcgcagcccatactacaacgtgagtgacgagatctcttttcactgttacgacgggtatactctgcgcggttcagcaaatcgcacgtgccaggtgaacggacggtggtcaggccagaccgccatctgcgataacggcgctggctattgctctaatcccggaatccccatcggcacccggaaggtgggtagccagtacaggctggaggattcagtgacttaccactgctcccgtgggctaacactacgaggtagtcagcggaggacctgtcaggagggcggtagttggagcggcaccgaaccaagctgtcaagactctttcatgtatgacacgccacaggaggtagcagaagccttcttgtcatccctcacagagaccattgagggcgtcgacgccgaagacgggcacggccccggcgaacaacaaaagcggaagatagtgctggatccctctggctccatgaatatttacctggtgctcgatggctcagacagcattggcgcatcgaatttcaccggtgctaaaaagtgcctcgtcaacctgatcgagaaggtggcctcttacggcgtaaagcccagatacggacttgtcacctatgccacgtacccaaaaatctgggtcaaggtgtccgaagcagacagttccaacgccgactgggtgaccaaacaactcaacgaaattaattatgaagatcacaaactaaagtcaggcacaaataccaagaaagccctgcaggccgtgtacagcatgatgagctggcccgatgacgttccaccagaggggtggaaccggaccaggcatgtgatcattctgatgaccgacggactccacaatatgggcggcgaccccattaccgtgatcgacgaaatccgcgacctgctttatataggcaaggaccgaaagaatccgcgcgaggactacctcgatgtctatgttttcggggtggggccccttgtcaatcaagtaaatattaacgcactggcatctaagaaagataacgaacagcatgtgttcaaagtgaaggatatggaaaatctggaggacgtcttctatcaaatgatcgatgaaagtcaatcgctgtccctttgtggcatggtgtgggaacatcggaagggcactgattaccacaagcaaccatggcaggcaaagatcagcgtaattcgaccatccaagggccacgaaagctgcatgggggcagttgtatccgagtactttgtcctaactgcagcacactgttttacagtggatgataaagaacactcaatcaaagtgagcgttgggggcgagaaacgggacctagaaatcgaggtggtgctcttccatccaaactacaacattaatggcaaaaaggaggccgggatccccgagttctacgactatgatgtggcactgatcaaactcaaaaataagctgaaatacgggcagacaataaggcccatttgtctcccctgtacggagggcaccacccgcgccctgaggctgccccccacaaccacctgccagcaacagaaggaagaactgctgccagcccaggatattaaagcactcttcgtttcagaggaagagaaaaaattgactaggaaggaggtctacataaagaacggcgataaaaagggctcgtgtgaacgagatgcccaatacgcccctggatatgataaggttaaggacatctctgaggtggtgacgcccagatttctttgtacgggaggggtatctccatacgctgaccccaatacatgcaggggagattcggggggccccttaattgtgcataagaggagccgatttattcaggtcggcgtgatatcgtggggagtggttgacgtttgtaagaatcagaagagacagaagcaggtgcccgcccatgctcgcgactttcatataaatctctttcaggtgttgccatggctaaaggagaaacttcaggatgaggatctggggttcctttag

SEQ ID NO: 183701 - DNA, 2295 bp, synthetic construct
  misc_feature 1..2295: note = Description of Artificial Sequence: Synthetic coding sequence
  source 1..2295: mol_type = other DNA
atgggcagcaacctgagcccccagctgtgcctgatgcccttcatcctagggctgttgtcaggtggggtgacgactacgccctggtctctcgccagaccgcagggcagttgttccctggaaggggtggaaattaaaggtggatccttccgacttcttcaggagggccaagccctggaatacgtgtgcccatctggcttttatccttacccggtgcagacaaggacctgcaggagtactggatcatggagtacactgaagacgcaagaccagaagaccgtcagaaaggccgaatgtagagccattcactgccccaggccccatgattttgaaaacggcgaatactggcccaggagcccctactacaatgttagtgatgaaatctctttccattgttatgacgggtacaccctgcgaggctctgcaaaccgcacctgtcaagtcaacggtcgttggtcaggacagaccgccatctgtgataatggcgccggctactgctctaatcccggaatccccatagggacaagaaaggtaggctcacagtacaggcttgaagactccgttacctaccactgcagccgaggcttaactctgcgtggcagtcagcgccgaacgtgccaggaaggtgggagctggtctggtactgaaccttcatgtcaggacagtttcatgtacgatacaccccaggaggtcgcggaagctttcttgtcatcattgacagaaactattgagggcgtagacgcagaggatggccatggccccggagaacagcagaaacgcaaaatcgttcttgaccctagcggctccatgaacatttatctggtgttagatggttctgattccattggagccagcaatttcactggtgctaagaagtgtctggttaacctaattgagaaggtggcctcgtatggagttaaaccaagatacggactggttacatacgctacatacccaaaaatctgggtaaaggtctccgaggccgactctagtaatgctgactgggtgactaagcagctcaacgaaattaattatgaggaccacaagctgaagtccggcactaacacaaaaaaggctcttcaggccgtttacagcatgatgagctggccagacgatgtgcccccagagggctggaacaggacacgacatgttattattttgatgaccgatggactgcacaacatgggcggagatccgatcactgtgattgatgagattcgcgatcttctatatatcggtaaggatcgaaaaaatcctcgcgaggattatctcgacgtctacgtgtttggagtcggcccgcttgtaaaccaggtcaacattaacgccctggccagcaaaaaagacaatgagcagcacgttttcaaagtgaaggatatggagaacttagaagacgtgttctatcagatgatcgacgagagccaaagtcttagtctttgcgggatggtgtgggaacaccgtaaggggacagattatcataaacagccgtggcaagccaaaatttctgtgattagaccttcaaagggtcacgagtcgtgtatgggcgcagttgtgtctgagtatttcgtcctcactgccgcacattgttttacggtggatgataaggagcattcaataaaggtgtctgtggggggagagaaaagggatcttgagatagaagtcgtactttttcaccctaactacaacataaacggaaaagaagaggcgggaatccctgagttttacgattatgatgtggccctgataaaattgaagaacaaactcaagtacggccaaaccattcgccctatttgtctaccatgcacggaaggtaccacccgtgctctacgactgccaccaacaaccacctgccagcagcagaaagaggagctgctgcctgctcaggacatcaaggccttatttgtctcggaagaagagaaaaaacttacccgtaaagaggtgtacatcaagaatggcgacaaaaaaggctcatgcgagagggacgcccagtatgctcctggttatgataaggtgaaggacataagtgaagtcgtaaccccccgcttcctgtgcaccggtggtgtgtcaccatatgcggatcctaacacttgcaggggcgacagtggtggcccccttatagtccacaagagatcacggttcatacaggttggcgttataagttggggggtagtggacgtctgcaaaaatcagaagcggcagaaacaggtgcctgcccatgcgcgcgactttcatattaacctgtttcaggtgctgccatggcttaaagagaagctacaagatgaggatctgggatttctgtag

SEQ ID NO: 183702 - DNA, 2295 bp, synthetic construct
  misc_feature 1..2295: note = Description of Artificial Sequence: Synthetic coding sequence
  source 1..2295: mol_type = other DNA
atgggcagcaacctgagcccccagctgtgcctgatgcccttcatcttggggctcttgagcggcggtgtcacaacaaccccttggagcctagccagaccccaagggagctgctcactcgagggcgtggaaatcaagggcggttcttttcggcttctgcaggagggtcaggcactggaatacgtctgtccatcaggcttctatccttacccggtacagacgcgaacttgccgttccaccggctcgtggtctacccttaaaacacaggatcagaagaccgtacgaaaagcagaatgtcgcgctatacattgcccccgaccacatgactttgagaatggtgagtactggccgcgcagcccttactacaatgtcagtgatgagatctccttccattgctacgacggctacacgctccgaggcagtgccaaccgaacctgccaggtgaatgggaggtggagtggacagactgcaatctgtgacaacggggccggttactgtagtaatccaggtattccaatcggtacaaggaaggttggctctcagtataggctggaggactctgtcacataccactgttcacgtggactgaccctgcgcggcagccagaggcgtacctgccaggagggcggttcatggtccggcacagaaccgtcttgccaagacagcttcatgtatgacacgcctcaggaagttgcagaggcattcctctcatcactcacagaaacaatcgaaggcgtggatgctgaggatggacatggccctggcgagcagcagaagaggaagatagtgttagacccatctggcagtatgaacatctaccttgtcctggacggaagcgactccatcggcgcctccaattttacaggggcaaagaagtgcttggttaatctaatcgagaaggtcgccagctacggggtgaagccacgctatggactggtgacttacgccacctacccaaaaatttgggttaaagtgtccgaagcggactcaagcaacgccgactgggtcactaagcaattgaacgagatcaactacgaagatcacaagttgaagtcgggaaccaatactaaaaaagctttgcaagctgtatattcgatgatgtcctggccagacgatgtgccccccgaaggttggaacaggacaagacacgtgatcatcctcatgaccgacggtttgcataatatgggaggtgatccaatcaccgtcattgatgaaatcagagatctattgtacattggcaaggataggaaaaacccccgagaggattatttagacgtgtatgtgtttggtgtcggtccgttggttaatcaggtgaacatcaatgccctggcatccaaaaaggacaacgaacagcacgtgtttaaagtgaaggacatggaaaacctcgaagacgtgttttatcagatgattgacgaaagtcaaagtcttagtctgtgtggcatggtctgggagcataggaaggggacggactaccataaacaaccttggcaggctaaaataagtgttatccggccaagcaagggccacgagtcatgtatgggagcagtcgtcagcgagtacttcgttctgacagcagctcactgcttcacagtggacgataaagagcacagtattaaggtttcagtcggcggagaaaagcgggatctggagattgaagtggttctgtttcacccaaactacaatatcaatgggaagaaagaggctggtatccctgagttctacgattacgacgtggcattgattaagctcaaaaacaaactcaagtatggtcagacgataaggcccatatgtttaccgtgcaccgaaggaacaacccgagctctgcggctcccccctactaccacgtgtcagcagcagaaggaggaactgttgccagcacaggatattaaggccctttttgttagcgaggaagaaaaaaagctgacccgcaaagaggtgtacatcaaaaacggggacaagaaagggagctgcgaacgagacgcccaatatgcacccggatacgacaaagttaaggacattagtgaagtggtgactcctcgcttcctctgtacaggcggtgttagtccctacgcggatcctaacacatgcagaggagattcgggcgggccactgattgtacacaagcggtccagattcatacaggtgggagttatcagttggggcgtcgtcgacgtttgcaagaatcagaagcggcagaagcaggtccccgcgcacgcacgagacttccatattaacctgttccaggttctgccgtggctgaaggagaaactgcaggatgaggacctaggatttctgtag

SEQ ID NO: 183703 - DNA, 2295 bp, synthetic construct
  misc_feature 1..2295: note = Description of Artificial Sequence: Synthetic coding sequence
  source 1..2295: mol_type = other DNA
atgggcagcaacctgagcccccagctgtgcctgatgcccttcatcttgggactgctgtccggaggcgtgactaccactccctggtctctcgcccgcccacagggaagctgctcgctcgaaggggtagagatcaagggagggagttttcgacttctgcaagaaggccaagctctcgaatatgtttgccccagtggcttctacccctaccccgttcagacccggacctgccgctcaacagggtcatggagtaccctgaaaactcaagaccagaaaaccgtgaggaaggccgagtgtcgagctatccattgtccaaggccgcacgactttgagaatggcgaatattggcctcgatccccgtactataatgtgagtgacgaaattagcttccactgttacgatggctacacgctgcgtggctcagcaaacagaacttgccaggtgaatggcagatggtctggccagaccgccatttgtgacaatggagctggctactgtagtaatcccggaattcccattggtaccaggaaggtgggcagccagtacaggctcgaggattctgtcacttaccattgcagccgcggtctgacccttcggggctcacagcggcggacctgtcaagaaggaggtagttggagcggtaccgaacccagttgccaggattctttcatgtacgacacacctcaggaggtggcagaagctttcctgagcagcctcacggagacaattgagggggttgatgcagaggacggtcacgggccaggagaacagcagaagcggaaaatagtcctcgatccgtctggcagcatgaatatctacctggtgctcgacggcagcgattcaattggagcttctaacttcaccggtgccaaaaagtgtttggtcaaccttatcgagaaagtcgcatcgtacggtgtgaagccaaggtatgggctagtgacatatgccacttacccaaagatatgggttaaggtgtctgaggccgacagcagcaatgctgattgggtcacaaagcagcttaacgagatcaattatgaagatcacaagctgaaaagcggcaccaacactaaaaaggctctacaggccgtgtattccatgatgagttggcccgacgatgtgcctccagaggggtggaataggaccaggcatgtgataatcttgatgacggatggccttcataacatgggcggcgacccgataactgtaattgacgaaattcgggatttgctgtatatcgggaaggatcgaaagaacccacgcgaggactatcttgatgtgtatgtatttggagtgggccctctcgtaaatcaggtgaacatcaacgctctcgcgagcaagaaggacaatgagcagcacgttttcaaggtgaaggatatggagaatttagaagatgtgttttaccagatgattgacgaaagccagtcactatccctttgcggcatggtctgggaacataggaaaggaaccgattaccacaaacagccctggcaggcaaagatttcagtgattagaccctctaaaggccacgaatcttgcatgggtgccgttgtttcagaatattttgttttgacagccgcccattgttttacagtggatgacaaggaacattcgatcaaagtgagtgtggggggtgaaaaaagggatttagagatcgaggttgtgctttttcaccctaattacaatattaatggtaagaaggaggcaggtatccccgagttttatgattacgacgtggccctcatcaagctgaaaaacaagttgaagtatggccagaccatcagacccatttgtctaccatgcaccgagggtaccacacgggcgctgaggctccctcctactacaacctgtcagcagcagaaggaagagttactccccgcccaggatattaaagccctgttcgtgtctgaagaagaaaaaaagctcactcgcaaggaggtgtatattaagaacggcgataagaaagggtcctgcgagagggatgcccaatatgcccccggctacgacaaagtcaaggatatctccgaagtagtaacgcctagatttctgtgcacaggtggtgtaagcccgtacgcagatcctaacacatgtagaggagatagcgggggcccactgattgtacacaagaggtcaagattcatccaggtaggggtgattagctggggagtggtggacgtgtgcaagaatcagaaacgccagaagcaagtgcccgcccacgcgagggacttccacatcaacctgtttcaggttctgccgtggcttaaggaaaagctgcaggacgaagacctgggctttctgtag

SEQ ID NO: 183704 - DNA, 2295 bp, synthetic construct
  misc_feature 1..2295: note = Description of Artificial Sequence: Synthetic coding sequence
  source 1..2295: mol_type = other DNA
atgggcagcaacctgagcccccagctgtgcctgatgcccttcatcctgggactgctttccggaggcgtgaccactactccatggtccctggctagacctcaggggtcctgctcattagagggtgtagaaatcaagggcgggtccttccgcctgctgcaggagggccaggcactggagtatgtatgccctagcgggttctatccctacccagtgcagacccggacgtgccggtccactggatcttggtccaccctgaaaactcaggaccagaagactgtgcgaaaagccgaatgccgcgctatacactgtcctcggccgcatgatttcgaaaatggggaatattggccgcgcagtccctactacaacgtgtcagacgagatcagcttccactgctacgatggttacacactgcgcggctccgccaaccgtacctgtcaggtaaacggaagatggtccggacagactgctatatgtgataacggtgccgggtactgttctaaccccgggatacccattggtactcggaaggtgggatcccagtatcgcttggaagatagcgtgacctatcattgttcccgcggtttgaccctccgcggctcgcagcgcaggacttgtcaggaaggaggatcatggagcggcacagaaccttcttgtcaggactcctttatgtatgacaccccccaagaggttgctgaggcgttcctatctagtctgaccgagacaattgagggagttgacgcagaggacggccatgggcctggcgaacagcagaagcgcaaaatagtacttgatcccagcgggtcaatgaacatttatctggtgctagacgggtcagactcgataggtgcatctaatttcaccggggcgaagaagtgtttagttaatctgatcgaaaaagtagcatcgtacggtgtaaagccaagatacggccttgtaacctacgcgacgtatcccaaaatatgggtgaaggtttcagaagccgacagtagtaatgctgattgggtcacaaagcagctgaatgagatcaactacgaagaccataaactcaagagcggcaccaacactaagaaggccctccaggctgtttacagtatgatgagttggccagatgacgtgccccctgagggctggaaccggacacgccatgtgattatattgatgacggatggtttacataacatgggcggggatcctattacagttattgacgagattcgtgatttattatatatcggaaaagaccggaagaacccacgagaggattatttggacgtgtacgtcttcggtgtgggtcccctcgtcaatcaggttaacataaacgctctggcgagcaaaaaggataacgagcagcacgtgttcaaggtgaaagacatggagaatcttgaggacgtgttttatcagatgattgatgaaagtcagtccctgagcctctgtggcatggtgtgggaacatcggaaaggcactgactatcacaaacaaccctggcaggctaagatatccgttataagaccgagtaaggggcacgagagctgcatgggagcagttgtctcagagtacttcgtgctgacagccgcccactgttttactgtggacgataaggagcacagcatcaaagtgtctgtggggggagagaaaagggacctggaaattgaggtggtactcttccatcccaattacaacatcaatggcaaaaaagaagcagggatccctgaattctacgactatgacgttgccctcattaaactgaagaacaagctcaaatacgggcagaccattcggcccatatgccttccctgtactgagggcacaaccagagcgcttcggctgcccccaaccacaacctgccagcagcaaaaagaagagctgctccctgctcaggacattaaagctctgttcgtctctgaagaggagaagaagctgaccaggaaagaagtgtacattaagaacggcgataagaaggggtcctgcgagagagacgcccagtacgcgcccgggtacgacaaagtcaaagacatctccgaagtagttactcctcgttttctgtgcaccggtggagtctcgccatatgccgatcccaacacatgtcgtggagatagcggaggacctttgattgttcacaagcggtcccggttcattcaggtaggagtaatttcatggggtgtcgtagacgtgtgtaagaaccagaaacggcagaagcaggtgcccgcccatgcgcgcgatttccatatcaacctgttccaggtcctgccctggctcaaagaaaagttacaagacgaagatcttggctttctgtag

SEQ ID NO: 183705 - DNA, 2295 bp, synthetic construct
  misc_feature 1..2295: note = Description of Artificial Sequence: Synthetic coding sequence
  source 1..2295: mol_type = other DNA
atgggcagcaacctgagcccccagctgtgcctgatgcccttcatcctgggcctgctgtccgggggggtcaccacaactccatggtcactggcaaggccccagggctcctgctcacttgagggggtggagatcaaggggggcagctttaggcttctccaggagggccaagccttggagtacgtctgcccttctggcttctacccctaccctgtgcagacacggacatgccgcagcactggctcctggtctaccctgaagacccaggatcagaaaaccgtgcgcaaggcagagtgccgggcgattcactgtcccaggccacacgactttgagaacggcgaatactggccccgcagcccatactataatgtgagcgatgaaatttcgttccattgctacgacggctacacactgcgggggtctgcgaacagaacttgccaggtgaatggccgctggagtggacaaacggcaatatgcgacaatggtgcggggtattgctcaaaccccggaattcccattgggaccagaaaggtaggctctcagtaccgcttggaggattcagtgacttatcattgttcgcgtgggctgactctgcggggctcccagcgtcggacctgtcaagaaggcggttcgtggtccggaactgaaccatcttgtcaggacagttttatgtacgacaccccgcaggaggtagctgaagccttcttatcaagtttaacagagaccattgagggggtcgatgctgaggacggacacggccctggcgaacaacaaaagaggaagatcgtgttggatccttctggttccatgaatatctacctagtgctggatggatcggactcaattggagcctctaatttcacgggcgccaagaagtgcctagttaatctcatagaaaaggtcgcttcttatggggttaagccacgttatggtctcgtgacctacgcaacctacccaaagatttgggttaaggtgtctgaggcagattcttcaaatgccgattgggtcactaagcaactcaatgagataaactacgaagaccataaattaaaatcaggcactaatacaaaaaaggcacttcaagcagtgtattccatgatgagttggccagacgacgttccaccagagggctggaatagaaccaggcatgtaataattcttatgactgatggcctgcacaatatggggggtgacccaatcaccgtaatcgatgaaatcagggatctgctgtacatcggcaaggacagaaaaaatccaagagaggactatttggacgtttatgtgtttggagtgggacctctcgtgaaccaagtgaacattaatgccttagctagtaaaaaggacaacgagcaacacgtcttcaaggtgaaggatatggaaaacctcgaggatgttttctatcagatgattgatgaaagtcagtccctcagcctgtgcgggatggtctgggaacacagaaaggggaccgattaccataaacagccatggcaggctaagatcagcgttatcaggccttccaaagggcatgagtcatgcatgggtgcagtggtctccgagtatttcgtcttgacagcggcccactgctttactgtcgacgacaaggagcattcaattaaagtgtccgttgggggagaaaagagggaccttgagatcgaggtcgttttatttcatcccaattataatatcaatggtaagaaagaggcgggtattcccgagttttacgactacgatgttgccctgattaagctgaagaacaagctgaagtatggccagacaatcaggcctatttgcctaccatgtaccgagggaacaactcgtgcactgcgactcccacctacaaccacatgtcagcagcagaaagaggagctgctgcccgcgcaggacataaaagccctgtttgtatcagaagaagagaagaaattaacacggaaagaagtctacattaagaacggagataaaaaagggtcatgcgaacgggatgcccagtacgcaccaggttatgacaaggtgaaagacatctcggaagttgtgaccccgagatttctttgtaccggcggggtgagtccatacgcagacccaaacacctgtagaggggattctggcgggcctcttatcgtccacaagcgttcccgatttatccaggtcggtgtgatctcttggggtgtggtcgacgtatgcaaaaatcagaagaggcagaagcaggttcctgcacacgcccgcgatttccatataaatctcttccaggtgctaccatggctgaaggagaaactccaggatgaggatctggggttcctctag

SEQ ID NO: 183706 - DNA, 2295 bp, synthetic construct
  misc_feature 1..2295: note = Description of Artificial Sequence: Synthetic coding sequence
  source 1..2295: mol_type = other DNA
atgggcagcaacctgagcccccagctgtgcctgatgcccttcatcctgggccttctgtctggaggcgtgacaaccacaccttggtccttagcaaggccacagggaagttgcagccttgaaggtgtcgaaattaaaggaggcagttttcgcttgctccaggagggacaggctctggagtacgtttgcccctccgggttttacccttatccggtgcagacccgtacatgtcgttctaccggctcctggtctactctgaagacccaggaccagaaaacggtgcggaaggcggaatgcagagcaatccactgtccccggccacacgattttgagaatggtgagtattggcctaggtctccctactacaacgtgagtgacgagatatctttccactgctacgacggctacaccctgagaggatctgccaaccggacctgtcaggtcaatggtcggtggagtggacagactgccatttgcgacaatggagccggttattgctcaaacccaggcatccccattggaacccgcaaagttggtagccagtatcgccttgaggattccgtgacataccactgcagcaggggactgacgctgagggggtctcagaggcgcacctgtcaagagggcggcagctggtcaggcacggaaccttcttgtcaggactccttcatgtatgataccccacaagaagttgcggaggccttcctgagcagtttaacagagaccatcgagggtgttgatgctgaggacggccacggccctggagagcagcagaaaaggaagattgtcctggatccgtcggggagtatgaatatctatcttgtgctcgatgggtccgatagtattggcgcatcaaactttactggtgctaagaaatgtctggtcaacctgatcgaaaaagtagcttcctatggcgtaaagcctcggtatggcctggtgacctacgcaacctatccaaaaatctgggtaaaagtgagcgaggctgattccagtaatgcggactgggtgacaaagcagctgaatgagataaactacgaagaccacaagctgaaatcaggtacaaacacaaagaaagcccttcaggccgtgtactcaatgatgtcatggcctgacgacgttcctccggagggctggaaccgcaccaggcatgtgattatcttgatgaccgacggactccataatatgggcggcgatcctattaccgttatcgatgaaatcagagacctgctgtacatcggcaaagatcgcaaaaatcccagagaagattatctggacgtatacgtattcggagtgggcccactcgtaaatcaagtcaacataaatgcccttgctagcaaaaaagacaacgagcagcacgtgtttaaggtcaaggatatggaaaaccttgaagacgtgttttatcaaatgatcgatgagagccagtcattgagtctgtgtgggatggtgtgggaacaccggaagggcacagattaccacaaacagccgtggcaggcaaagatatcggtgatacgtcctagcaaaggccacgaatcttgtatgggcgccgtcgtcagcgagtattttgtcttgaccgcagcccactgcttcactgtggatgacaaagaacactctatcaaagtaagcgtgggtggagaaaaaagggatctggagatcgaggtcgtgctctttcaccctaactataatattaatggaaaaaaagaagctgggattcccgagttctatgattatgatgtagctctgattaagttaaaaaataagctgaaatacggccagacgatacgacccatttgtctgccttgcacagagggaaccacacgggctctccggctgccaccgacgaccacatgccagcagcagaaagaagaactgctgcccgcccaggacatcaaagccctgtttgtatccgaggaagagaagaagctgaccaggaaagaagtgtacatcaagaacggggacaagaagggatcatgtgaacgggacgcgcaatacgcgccgggctacgataaggtgaaagatatctcagaagtagtgacgcctaggtttctttgcacaggcggcgtctcaccatacgctgacccaaacacgtgcagaggagactccgggggccccctgatagtccacaagcgcagcagattcattcaagtgggggtcattagctggggcgtggtggacgtgtgtaaaaaccaaaaacgccagaagcaggtgcctgcccatgcgagggatttccacattaatctgttccaggtactcccttggctgaaggagaagctccaggatgaggacctgggcttcctctag

SEQ ID NO: 183707 - DNA, 2295 bp, synthetic construct
  misc_feature 1..2295: note = Description of Artificial Sequence: Synthetic coding sequence
  source 1..2295: mol_type = other DNA
atgggcagcaacctgagcccccagctgtgcctgatgcccttcatcctcggactgctgtccggaggagtgaccaccaccccttggtccctggcccggcctcagggctcctgtagccttgaaggcgtagaaatcaagggcgggtctttccgacttctgcaggaggggcaggcgctggaatacgtctgtccatccggattctatccgtatcccgtgcaaaccaggacatgcaggtcaaccggatcatggtctacccttaagactcaggatcagaaaaccgtgcgcaaggccgaatgcagggccattcattgtccgcgacctcacgacttcgagaacggtgaatactggccgcgctctccttactacaatgtgtccgatgagattagttttcactgctatgacggttacaccctgcgcgggtccgccaatcgcacctgtcaggtgaatggaaggtggtcagggcagaccgcgatctgtgataatggcgctggatattgtagcaaccctggaatccctattggaactcgtaaggttggatcccagtacaggctagaggattctgtgacgtaccattgtagccgaggactaaccctccggggctcgcagagacggacctgtcaagaaggcggaagctggtcaggcactgaaccctcttgccaggactcttttatgtatgacactccacaggaggtggctgaggctttcctttccagtttgactgagacaatagaaggcgtggatgcggaggacggacacggccccggtgagcagcaaaagagaaaaatagtgttggacccctcggggagcatgaacatatatcttgtgcttgatggtagcgacagtatcggtgccagtaatttcactggagcaaaaaaatgcctcgtcaatttaatcgagaaggttgctagctatggagtcaagcctcgctacgggctggtgacatacgcgacttatccgaaaatatgggtcaaggtcagtgaagccgattcaagcaatgccgactgggtgaccaagcagctaaatgaaatcaattacgaggatcataaactcaaaagtgggacaaacactaagaaggccctgcaggctgtgtactccatgatgtcttggcccgacgatgtgccaccggagggatggaataggacgcgccacgtcatcatcctcatgaccgacggcctgcataacatggggggcgatccaatcactgtgatagatgagattagagatctgctgtacattggcaaagataggaaaaatccgagggaagattacctggacgtatatgttttcggggtgggcccattggtcaaccaggtcaacataaatgcactcgcgtccaaaaaggacaacgagcaacacgtgttcaaggtgaaagacatggagaatctcgaagacgttttctatcaaatgatagatgaatcgcaaagcctttccctgtgtgggatggtgtgggagcatcgtaagggcactgattaccacaaacaaccctggcaggctaaaatctccgttatccgtcctagtaaagggcatgaatcctgtatgggagcagtggtctcagaatattttgtgctcaccgctgctcactgctttactgtggacgacaaggaacattcgataaaggtgtccgtggggggtgaaaaaagagacctagagattgaagtagtgttatttcaccccaattacaatattaacggaaaaaaggaagctggtattcctgagttctacgattacgatgtggcgctcattaaactgaagaacaaactcaagtatgggcagactattcggccaatctgtctgccctgcaccgaaggcaccacaagagccctaaggctcccgcccactaccacttgccagcaacagaaagaggaattgctgccagcccaggatataaaggccttgttcgtgtctgaagaggagaaaaagctcacccgcaaggaggtctacattaagaacggggacaagaaagggtcgtgcgaaagagacgcccagtacgcaccagggtatgataaagtgaaggatatctcagaggtggtgactccgcgatttttatgcactggaggcgtgtccccctatgctgatcccaacacatgccgaggagatagcggcggcccactgattgtccacaagcggagcagatttattcaggtgggagtgatttcctggggtgtggtcgacgtgtgtaagaaccagaaaagacagaagcaggtgccagcacacgcacgagactttcacataaatctctttcaggtattaccctggctgaaagagaaactccaggacgaagatctgggcttcctttag

SEQ ID NO: 183708 - DNA, 2295 bp, synthetic construct
  misc_feature 1..2295: note = Description of Artificial Sequence: Synthetic coding sequence
  source 1..2295: mol_type = other DNA
atgggcagcaacctgagcccccagctgtgcctgatgcccttcatcctgggattattgtctggcggagtgaccacgacgccatggtctctcgcaaggccgcaaggctcctgttcgctggaaggtgtcgagattaaaggtggcagtttccggctactgcaggagggtcaagccctggagtacgtatgcccatctgggttctacccttatcctgtgcagactaggacttgccggagcaccggttcttggtctacactaaaaacccaagatcagaagactgtgcgcaaagcagaatgcagggccatccactgtccccggccccacgattttgagaacggtgaatactggcctagaagcccttactataatgtgagcgatgagatctccttccactgttatgacgggtatacacttaggggatctgcgaaccgcacatgtcaggtcaatggcaggtggtctggccagacagctatatgcgataatggtgcgggatactgcagcaatcctggaatcccgattggaacgagaaaagtcggcagtcagtaccgactcgaggattcagtgacgtaccattgttcacgaggtctgactctgagaggtagccagaggaggacctgtcaggaaggcgggagctggagcggtactgaaccttcctgtcaggattcttttatgtacgacacaccccaggaagtagccgaggcattcctgagcagcctgactgaaactatagaaggagtggacgctgaggacggtcacggtcccggcgaacagcagaagaggaaaatcgtactggatccctctggaagcatgaatatctacctggtgcttgatggctccgattccatcggtgcatccaattttactggagctaagaaatgcctggttaacctcattgagaaggtggcttcctatggggtgaagccccgctatggtctggtcacttacgccacctatccaaagatttgggtgaaagtttccgaagccgacagctccaatgccgactgggttacaaaacagctgaacgaaatcaattatgaagaccacaagctcaagtccgggacaaacacaaagaaggccctccaagcagtgtacagtatgatgtcatggccagatgatgttcctcccgaaggctggaatagaactcgccacgtgataatattgatgactgacggtctccataatatgggcggagaccctattacagtgattgatgagatccgtgacctgctgtacattggcaaagacagaaagaaccccagggaggattacctggatgtgtacgtcttcggcgttggaccacttgtcaatcaggtgaatataaatgccctcgcctctaaaaaagataacgaacagcatgtgttcaaagtaaaggatatggagaacctggaggacgtgttttatcagatgattgatgagagtcaatcattgtctttgtgtggtatggtgtgggagcacaggaaggggacggactaccacaagcaaccgtggcaggcaaaaatatccgtgattagaccttcaaagggacacgagtcttgtatgggcgctgttgtctccgagtacttcgtcctcactgccgctcactgctttaccgttgatgacaaagagcactccattaaggtgtctgtcggaggagaaaagagggatctggagatagaggtcgttctcttccatcccaactataacattaacggcaagaaagaagccgggatccccgaattttacgattatgatgtggccctgattaaacttaagaacaaactgaaatacggccagacaatccgccccatatgcttgccatgcacagaggggactacacgcgctctgcgcctgccacctactacgacctgccagcagcagaaagaagaattgctgcccgcacaagacatcaaagccctatttgtgagtgaggaagagaaaaagctgactaggaaggaagtatatattaagaacggcgataaaaagggctcctgtgaaagggatgctcagtatgcccccggttatgataaggtaaaggacatcagcgaggtggtcacaccaaggtttctctgcacggggggagtaagtccctatgcggatcccaatacgtgccggggcgactccggaggaccattaatcgtgcataaaaggtctcggttcatccaggtgggggtcatctcttggggcgtggtggacgtctgcaaaaaccagaaaagacagaaacaggtgcccgcccacgcacgcgacttccacattaacttgtttcaggtgctaccgtggctcaaagaaaaacttcaggatgaagacctgggttttctctag

SEQ ID NO: 183709 - DNA, 435 bp, synthetic construct
  misc_feature 1..435: note = Description of Artificial Sequence: Synthetic coding sequence
  source 1..435: mol_type = other DNA
atgggcagcaacctgagcccccagctgtgcctgatgcccttcatcctggggctgctatctggaggagttaccaccactccatggtccttggctcgccctcagggatcctgtagcctggaaggcgttgagatcaagggcgggagctttaggttgctccaggagggacaggcactcgagtacgtgtgtccctcagggttttacccttaccctgtccagacacggacttgcaggagtaccgggtcctggtcaaccttgaagacccaagaccagaaaacagtccgaaaggctgagtgtcgcgcaatccattgtccccgccctcatgactttgagaacggcgaatattggccccggagtccctattataacgtttctgatgaaatcagttttcactgctatgacgggtacacgctccgcggatctgccaaccgtacctag

SEQ ID NO: 183710 - DNA, 3801 bp, synthetic construct
  misc_feature 1..3801: note = Description of Artificial Sequence: Synthetic coding sequence
  source 1..3801: mol_type = other DNA
atgggccccctgatggtgctgttctgcctgctgttcctgtaccccggtctagccgattcagccccatcttgcccacagaacgttaacatcagcggcggtacttttactttgagccatggctgggcccccggctctctgctgacatattcatgccctcagggactgtacccttcgccagcatccagactctgtaagagcagcggccagtggcagacccctggcgccacgcggagcctcagcaaagctgtatgtaaacccgggcactgcccaaacccagggataagcctgggtgccgtcagaactggatttaggtttggacacggagataaagtgcggtaccgctgctccagtaacctggtcctgacaggctcttcagagcgggaatgccaggggaatggggtctggtccgggactgagccgatctgccgccaaccctactcatacgatttcccagaggacgttgcgcccgctctcggaacttccttttcacacatgctaggcgctacaaatcccacgcagaagacaaaggaccatgagaacggaacaggcaccaacacctacgccgccctgaattctgtgtaccttatgatgaataatcagatgcgtctgctcgggatggagacaatggcctggcaagagataaggcatgcaataatcttgctaaccgatggaaagagtaacatgggaggatctcccaaaaccgcagtggaccacattagggagatcctgaatattaatcagaagcgcaacgactacctggatatttacgccatcggcgttggtaagctggatgttgattggcgagagctcaacgagcttggatcaaaaaaagacggagaacgtcatgccttcatcttgcaggatacaaaggctctgcatcaggtgtttgagcacatgcttgacgtgagtaagcttactgataccatctgcggcgtggggaacatgtccgccaatgcatcagaccaggagcgtaccccctggcatgtgaccatcaaaccaaaaagccaggagacctgtagaggagctcttattagtgaccagtgggtcctcaccgcagcccattgtttcagggatggaaacgatcattcattgtggcgcgtgaatgtcggcgatcccaaatcgcaatggggaaaagaattcctcattgagaaggcagtgatttccccgggattcgacgttttcgctaaaaaaaaccagggcattctcgagttctacggagatgacatagcactgctgaaactggcacagaaggttaagatgagcactcatgcacgcccaatatgtctgccctgcacaatggaagccaatctggctcttcggagaccccaaggaagcacctgccgcgaccacgaaaacgagctgttgaacaagcagagcgtgcccgctcattttgtagctttgaatgggtctaaactaaatatcaacctcaagatgggagtggagtggacctcctgtgccgaggtggtgagtcaagaaaaaacaatgttcccaaacttgaccgacgttcgggaggtggtaactgaccagttcctgtgcagcggaacgcaggaagacgagagcccctgcaaaggagtcactactaccccctggtcattggcacgccctcagggctcctgcagcctggaaggtgttgaaatcaaaggcggtagctttcgcctgctccaagaagggcaggcactggagtatgtgtgcccttcagggttttacccatatcctgtgcagacgcgaacatgtaggagtactggcagttggagtacgcttaagacgcaagaccagaagacggtgcgcaaagccgagtgtagagccatccattgccccagacctcacgactttgagaatggagaatactggcccaggtcaccctattataatgtctctgacgagatatcctttcactgctacgatggctatacgcttagggggagtgccaatcgaacatgccaggttaatggcaggtggtcagggcagaccgcgatttgtgataacggtgccggctactgtagcaatcctggaatccctattgggacccgtaaagttggtagtcagtatcgactggaggattctgttacctatcattgttctagggggctgacacttaggggcagccagcgacgcacatgccaagagggaggcagttggagtggcacggagccaagctgtcaggactcttttatgtatgatacaccacaggaggttgctgaggcttttctgtcgtccctcacggaaacaattgagggcgtcgatgccgaggacgggcacggacccggagagcaacagaagagaaaaattgtactggatccttcaggtagtatgaacatctacctcgtcctggatggaagtgactctataggcgcctccaacttcacaggtgcgaagaagtgtctggttaatctaatcgagaaggttgcttcatacggcgtgaagccgcggtacggtcttgtgacctacgccacatacccaaaaatttgggttaaggtttcagaagccgacagttctaacgccgactgggtcaccaaacagctcaatgaaattaattacgaagatcataagctgaaatctggcaccaacacaaaaaaagctctgcaggccgtttactccatgatgtcctggcctgacgacgttccccctgaaggctggaaccgtacgagacacgtgataatcctaatgactgacggtctgcacaatatggggggagaccctatcacggtgatcgatgagattcgggatcttctatatatcggcaaggaccgcaagaacccgagggaagattatcttgatgtttatgtgttcggagtgggcccactggttaaccaggttaacattaacgcgcttgcttccaaaaaggacaatgagcagcacgtgttcaaagtaaaggatatggaaaacctggaagacgtgttctatcaaatgatcgatgaaagtcaaagcctttccctctgtggcatggtgtgggaacatagaaagggcacggactaccacaagcaaccttggcaagccaagatctcagtgatcaggccatccaaaggtcacgagagctgtatgggcgcagtcgtaagcgagtacttcgtgctcaccgccgctcactgttttacagttgatgacaaggagcatagtatcaaggtgtccgttggaggagaaaaacgtgatctcgaaatagaggtggtcctgtttcacccaaactacaacataaacggaaagaaggaggccggaatacccgagttttatgattatgatgttgcactgatcaagctgaagaataaactgaagtacggacagacaatcaggccaatctgtcttccatgcaccgagggcactaccagagctttaagactcccccctaccacaacctgtcagcagcagaaagaagagctcttgccagcccaggatatcaaagcgctgtttgtgtccgaggaggagaaaaagctcacccgaaaagaggtctatatcaagaatggtgacaaaaagggttcctgcgagcgcgatgctcagtacgcccctggctacgacaaggtgaaggacattagtgaggtggtgactcctcgattcctgtgtaccggcggcgtctccccctacgccgacccaaacacctgtagaggggacagtggaggacctctgattgtgcacaaacgttcacggttcatacaagtaggagtgatcagctggggtgtcgtagatgtgtgcaaaaatcaaaagcggcagaagcaggttccagcccacgctcgggattttcacatcaatctgtttcaggtgctgccttggctgaaagaaaaacttcaggatgaagacctgggctttctgtag

SEQ ID NO: 183711 - DNA, 3801 bp, synthetic construct
  misc_feature 1..3801: note = Description of Artificial Sequence: Synthetic coding sequence
  source 1..3801: mol_type = other DNA
atgggccccctgatggtgctgttctgcctgctgttcctgtaccccggcctggcagattctgccccaagctgccctcaaaacgtgaatatttctggaggtacgttcaccttatctcatggttgggcgccaggctcccttctcacctattcatgcccgcagggtctttacccctcgcctgcctccaggctttgcaaaagctcaggccagtggcagacccctggcgctacccggtctctgtccaaggccgtgtgtaaacctggccactgccccaaccccggaattagcctaggggctgtgaggactggatttagatttggccatggcgacaaagtgcgctatagatgctccagcaacctagtgcttacggggtcctccgagcgagagtgtcagggcaatggggtttggtccgggactgaaccgatttgtagacagccctatagttacgatttccccgaggatgtggcccccgctttgggcacctcctttagccatatgctaggggcaactaatcccactcagaaaacaaaagaccatgaaaacgggacgggcaccaacacatatgccgctttgaactctgtgtacctgatgatgaataatcagatgcgcctgctcggaatggagacaatggcctggcaggagatacggcatgcaatcattctgctcaccgatggaaagagcaatatgggcggaagccctaaaactgctgtggatcacattcgagagattctgaacatcaaccagaaacgtaatgactacctggacatctacgccataggggttggtaaactggacgtggactggcgcgaactaaacgagctgggttccaagaaggatggggagaggcatgcttttattctgcaggataccaaggccttacatcaggttttcgagcacatgctagacgtgtcgaaactgaccgataccatttgcggtgttggcaacatgtctgccaacgcttccgatcaggaacgaacaccatggcacgtgaccattaaacccaagtcccaggagacgtgtcgaggcgccctgatcagtgaccagtgggtgttgaccgccgctcattgtttcagagacggcaacgaccattccctatggagagtgaatgtgggagatcccaaaagccagtgggggaaagaattcctgatagaaaaggcagtgatttcgccgggatttgacgtttttgcaaagaaaaatcaaggaatccttgaattctacggggatgatattgctctgctcaaacttgcccaaaaggttaaaatgagcacacacgccagaccaatttgccttccttgcactatggaagctaacctagctctaaggcggccgcagggttctacatgtagggaccacgagaacgagctgttgaacaagcagagcgttccagctcacttcgttgctttgaacggttctaaactgaatataaatttgaaaatgggagtggagtggacctcctgcgcggaggtggtctcccaagaaaaaaccatgtttccaaatctgaccgacgtgcgcgaggtggtgaccgatcagttcctttgttccggcactcaggaagatgaaagcccctgtaagggcgtgactacaaccccctggtctctggcccggccacagggcagctgctctttggaaggagtcgagattaagggcgggtcttttcgcttgcttcaggagggacaggctctggaatacgtttgccctagcggattttatccctacccggtccagacccggacatgccgatccaccggttcatggagtaccctgaagactcaagatcaaaagacagtaagaaaagctgagtgtcgggcaatccattgtccccgcccacatgattttgagaatggggagtattggccacggagtccttactacaacgtgtccgacgagattagtttccattgctacgacggttataccctccgcggctctgcaaatcggacgtgtcaagttaacggacggtggtccggtcaaacagccatctgcgataacggagcgggctactgctccaacccagggatcccaattgggacccgcaaagtcggtagtcagtatcggttagaggactctgtcacctatcactgtagccggggactgacactgaggggttcgcagaggcggacatgccaggagggaggctcatggtcaggtactgagcctagctgccaagactcattcatgtacgatactccgcaggaggtggctgaggcctttctatccagcctgactgaaacaatagagggtgtagacgcagaagatgggcatggacctggagagcagcagaagcgtaagatcgttcttgacccgtcagggtctatgaatatttatctggtcctggacggatcagactcaatcggcgcttccaatttcacgggcgccaaaaaatgcctggttaacttgatagaaaaagtagcttcttacggggttaagccccggtatgggctcgtgacttatgccacgtaccctaaaatctgggtcaaggtgtcagaagctgattcctcaaacgcagattgggtgacaaaacaattgaacgaaatcaactacgaagatcataaattaaagtccggtaccaatacaaaaaaagctctgcaagccgtctatagtatgatgagctggcctgatgacgtgcctccggaaggttggaaccggacgcggcacgtcataattcttatgaccgatggcctgcacaacatggggggtgatcctataactgtgattgacgagattagagacctgctgtatatcggtaaagatcgaaaaaaccctcgggaggattacctggacgtctatgtctttggagtcggcccactagtcaatcaggtgaatattaatgcattggcgtcgaagaaggacaatgaacagcatgtgtttaaggtcaaagacatggagaacttggaggacgttttttaccagatgattgacgagtctcaaagcctgagtctgtgcggtatggtatgggaacatagaaaaggaactgattatcataagcagccctggcaggccaagatatctgttataaggccaagcaagggccatgaatcctgtatgggcgcagttgtctcggagtacttcgtgctcaccgctgcacactgctttaccgtcgacgacaaggaacattccattaaggttagtgttggcggcgagaagcgtgatttggaaatcgaagtcgtcctctttcacccaaattacaacatcaatggcaaggaggaagcagggatcccagaattttatgattacgatgtcgcactcattaagttgaagaacaagctgaaatacggccagaccatccgaccaatttgcctcccgtgtaccgaaggcacaaccagggccttgcgactgcccccaaccacaacttgtcagcaacagaaagaagaattgctccccgctcaggatattaaggctttgttcgtttctgaggaagagaaaaagctgacccgcaaggaggtatacataaaaaatggcgacaagaaagggtcatgtgagcgcgatgcccagtatgcacctggctatgacaaggtgaaagacatttccgaggtcgttaccccccgatttttgtgcactgggggagtttcaccttacgccgatccaaacacatgccggggggactcagggggcccactaatagtgcataagcgctccaggttcatacaagtaggggtgatctcttggggagtggtggacgtctgtaagaatcaaaaacgccagaaacaagtgcccgcacatgcacgggacttccatatcaacctgttccaagtgctaccatggttgaaagagaagctgcaagacgaggatctagggttcctgtag

SEQ ID NO: 183712 - DNA, 3801 bp, synthetic construct
  misc_feature 1..3801: note = Description of Artificial Sequence: Synthetic coding sequence
  source 1..3801: mol_type = other DNA
atgggccccctgatggtgctgttctgcctgctgttcctgtaccccggactggcggactctgcaccctcctgccctcagaacgtgaacatatccggcgggaccttcaccctgtcgcatggctgggcacctgggtccctgctgacctatagctgccctcagggtctgtatcctagcccagccagccgcctgtgcaaatcctcaggacagtggcaaacccccggtgccaccagatcactcagcaaggccgtgtgcaaacccggccattgccccaacccgggaatcagtctaggagcagtacgcacaggcttccgcttcggccatggagataaagtccgctacagatgctccagcaacctggtgctcaccgggtcaagtgagcgcgagtgtcaggggaatggtgtctggtccggcacagagcccatttgccgacagccgtattcttatgacttcccagaggacgtggccccagcactgggaacatcattctctcatatgctgggggccactaaccccacccaaaaaacaaaagaccatgagaacggcacaggaaccaacacttacgccgcgcttaacagcgtgtacctcatgatgaacaatcagatgcgtcttctgggcatggaaacgatggcatggcaggaaatacgccacgccataattctgctcacagatggtaaatcaaacatgggaggctccccaaaaaccgcagtcgaccatataagggaaatccttaatattaaccagaaacggaatgactatcttgatatttacgctataggcgttgggaagctcgatgttgactggcgtgagttaaatgaattaggctctaagaaagatggcgagcgtcatgcttttattttacaagatacgaaggcacttcaccaggtgtttgaacacatgctggatgtgagcaagctgacggatactatttgcggagtgggcaatatgtcggcaaacgctagcgaccaggagcggacaccttggcatgtcacaatcaaaccgaaatcccaagagacctgcaggggagctttaatcagcgatcagtgggtcctgacagccgcccattgctttcgtgatgggaacgaccactcactgtggagagtcaacgttggggaccctaagtctcagtggggaaaggaatttctgattgagaaagcggtgatttctccagggtttgatgtctttgcaaagaagaatcagggaatcctggagttctacggggatgacattgcgttactgaagctggcccagaaagtgaagatgtccacacatgctcgacccatatgtttgccttgcactatggaggcgaatctcgctcttcgccgtcctcagggttctacttgtagggaccacgagaatgaactcttaaacaaacagagcgttcctgcacacttcgtagctctgaatggctccaagttgaacataaatttaaagatgggagttgagtggacctcctgcgctgaagtggtgtctcaggaaaagaccatgtttcccaacctgacggatgtgcgcgaggtggtgaccgatcagttcctctgctcaggaacccaggaggatgagagcccttgcaaaggagtgacgactactccatggtctttagcccggccacaaggcagctgcagcctggagggtgtcgagattaaaggcggctccttcaggttgttacaggaaggacaggctctggaatacgtctgtccatccggtttttatccataccctgtccagacgaggacctgccgatcaactggtagttggtccactcttaagacacaggaccagaagacggtacgcaaagctgaatgtcgggcgattcattgcccaagacctcacgacttcgagaatggggaatactggccgcgaagcccatattataatgtatccgacgagatcagctttcactgttacgacggctacaccttaagagggagtgcaaacaggacatgccaagtgaacgggaggtggagcggccaaacagcaatttgcgataacggcgccggctattgttcaaatcccgggatccctatcggaacgagaaaggtgggttctcagtatcggttggaagactccgtcacctatcattgttcgcgcggcctgacgctgagaggatcgcaacgaagaacatgccaggaaggtgggagctggtcaggaactgagcctagttgccaggactcgtttatgtacgatacccctcaggaggtggccgaagcttttttaagctctcttacagaaacaatagagggggtcgatgccgaagacggccacggccctggcgagcaacagaagaggaaaattgtgctggatcccagcggcagcatgaatatctacctcgtccttgacgggtccgactcgataggcgccagcaactttaccggcgcaaaaaaatgcctggttaacctgattgagaaagtcgcttcctacggcgttaagccacggtatggactggtgacgtacgctacatacccaaagatctgggttaaggtatcggaagctgattctagcaatgccgattgggttaccaagcagttaaatgaaataaactatgaagaccataagctgaagtctggtactaatacgaaaaaggccctgcaagctgtttactctatgatgtcctggcctgacgacgtgcctcctgaaggctggaacaggactcgacatgtgatcatcctgatgactgacggactccataatatgggaggggaccccataactgtaatcgacgagatccgggatctactttacattggcaaggaccggaaaaaccctagagaagactacttagatgtgtatgtgttcggtgtcgggccgttagtgaatcaggtgaacataaacgcactcgcaagtaagaaggataacgagcagcacgtttttaaggtgaaagacatggagaaccttgaggacgtgttttatcaaatgattgacgagtctcagtctttatctctctgcggaatggtttgggaacaccgcaaggggaccgattaccacaagcaaccttggcaggccaagataagcgtgattagaccgtccaaaggccatgagagttgtatgggagctgtggtgagcgagtattttgtgctgacagcggcccattgttttaccgtggatgataaagaacactccattaaggtgagcgtgggcggggagaaacgtgatctcgaaattgaggttgtactcttccaccccaattataatattaatgggaaaaaagaggctggaatacctgaattttacgattacgacgtcgccctcatcaaacttaagaacaagctgaagtacgggcaaactatcaggcctatttgtctgccatgcaccgaggggacgaccagggccctaaggttgccacctacgaccacctgtcagcagcagaaagaggagctgttaccggcacaggatatcaaggctctctttgtgagtgaggaagagaagaaattaaccaggaaggaagtgtatatcaaaaacggggataaaaaagggtcctgtgagagggatgcacagtacgccccaggatatgataaagtcaaggatatttctgaagttgtgacccccagatttctgtgcacgggaggagtctcaccctatgcggaccccaacacgtgccgtggtgacagtggaggtccacttatcgtccataagaggagtcgcttcatacaagttggggtgattagctggggcgtggtcgatgtttgtaaaaatcaaaagagacagaagcaggtgcctgctcacgcacgggatttccatatcaatctgttccaagtcctcccatggctgaaagagaagctgcaggacgaagatcttggattcctgtag

SEQ ID NO: 183713 - DNA, 3801 bp, synthetic construct
  misc_feature 1..3801: note = Description of Artificial Sequence: Synthetic coding sequence
  source 1..3801: mol_type = other DNA
atgggccccctgatggtgctgttctgcctgctgttcctgtaccccgggctggcggattcagccccctcttgtccccagaacgtgaatatcagtggaggaacatttacactgtcccatggttgggccccaggcagcttgctgacctattcttgtcctcaaggtctgtatcctagcccggcgagtcgattatgtaagtctagcggccaatggcagacccccggagctacacggagcctctcgaaggccgtctgcaagccgggccactgtcccaatcctggaatcagtcttggggccgtaaggaccggcttccgcttcgggcacggcgacaaagtgcgataccggtgcagcagcaacctggtccttaccggcagttctgaaagggagtgtcagggcaatggagtgtggagtgggacagagcctatttgccggcaaccctatagttatgatttccctgaagacgttgccccggcactgggcaccagcttcagccacatgttaggcgccactaacccaactcaaaaaaccaaggaccatgaaaacgggacaggaaccaacacctacgcagccctcaactcagtttacctgatgatgaacaaccaaatgcggttgctgggtatggagaccatggcttggcaggaaatacgacacgcgatcattctgctgactgacggtaagtcgaacatggggggctcgcctaagaccgcggtggatcatatccgcgaaatcctgaatatcaaccaaaagcggaatgactacttggatatatacgctattggggtgggcaaacttgatgtcgattggagagaactcaacgaactcggttcaaaaaaagatggagagaggcacgctttcatcttacaagacacaaaggcgctgcatcaggtattcgagcatatgctggatgtgtcaaaactgacagataccatctgcggcgtcggaaacatgagcgctaatgctagtgatcaggaaaggactccatggcatgtgaccattaaacccaaatctcaggagacatgtcggggagctttgatatccgatcagtgggtgctcactgccgctcactgttttcgggatggcaacgatcattccttatggcgggtgaacgtcggggaccctaaatcgcagtggggcaaagaatttctgatcgagaaggccgttatatcccctggattcgatgtatttgcgaagaagaatcaaggcatccttgagttttatggggatgatatcgccctactgaagctggctcagaaagtgaagatgtcaacccatgcacgcccaatttgcctcccctgcaccatggaggcgaatctcgcactgcgacgtcctcaggggagcacctgccgagatcacgaaaacgagttgctcaacaagcagagtgtgccagcacactttgtggccttgaatggcagtaagctgaatatcaacctgaagatgggcgtggagtggacatcatgcgctgaggtggtgagccaggagaaaacgatgtttcccaatctgacagacgtgagggaggttgttaccgaccagttcctgtgtagcggaacccaggaggatgagtcaccatgtaaaggcgtgaccacaaccccatggagcctagcccggccccaggggtcatgctcattggaaggagtcgaaatcaagggcggttccttccggctgttgcaggaggggcaggccttagaatacgtgtgtccctcaggcttttacccgtatcccgttcagactaggacctgtcgaagcactgggtcctggtcaaccctcaagacccaggaccaaaagacagtccgcaaggccgagtgtcgtgctatccactgtccgagacctcatgacttcgagaacggagaatattggccacggtctccttattataacgtgtcagacgaaattagctttcactgttatgacggctatactctccggggatcagccaacagaacatgccaggtgaatggacggtggagtggccagactgccatctgcgataacggcgcaggctactgttcaaacccaggcatccctattggtactcgaaaggttgggtcccagtatcggttggaggactcagtcacttaccactgcagtcgtggattgaccctcaggggatcacagaggcgcacatgtcaagaaggtggctcctggtccggcacagagccttcctgccaggactccttcatgtacgacaccccacaggaagtggccgaggccttcctgtcctctcttaccgagactatagagggggtggatgccgaagacgggcatggccccggcgaacagcagaaaagaaagatagtactggatccctctggttccatgaacatctacctggtgctggacggatcagactccatcggtgcaagtaatttcacaggcgcaaaaaaatgtcttgtcaatctgattgaaaaggttgccagctatggggtaaagccccgctacgggctggtaacatatgctacttatcccaaaatttgggtaaaggtctccgaggccgatagttccaacgccgattgggtgactaaacagctcaatgagatcaattacgaggatcataaactcaaaagcgggaccaacaccaagaaagcgctccaagctgtgtacagcatgatgtcctggcctgacgacgtccctcctgaaggctggaatcggactcgccacgttatcatcctaatgactgatggactgcacaatatgggcggagaccctattactgtcatcgatgaaatcagggatttactgtatattggcaaggaccggaagaatccaagggaagactacctcgatgtgtacgtcttcggggtcggtccgctggtaaaccaggtaaatattaacgcattggctagcaagaaggacaacgagcagcatgtctttaaagtgaaagatatggaaaacttagaagatgtgttctaccagatgatcgatgagtcccaatcgttaagtctctgcggcatggtgtgggagcaccggaagggtactgattaccacaaacagccatggcaggccaagatctcagtgatcaggcccagcaaaggtcacgagtcatgcatgggcgccgtggtaagtgagtacttcgtgttaacagccgctcactgcttcaccgtggatgataaagagcactcaatcaaagtaagcgtgggtggcgagaagagggacctggaaatcgaggttgtgctatttcatccaaattataatattaacggcaagaaggaggctggaattccggaattctatgattatgacgttgctctaatcaagctcaagaacaagctgaaatatggccaaactattcgacccatttgcttaccttgcacggaggggaccacacgcgccctgcgccttcccccgacgacaacctgtcaacagcagaaagaggagctgttgccagcacaggatattaaagccctgttcgtgtccgaagaagagaagaagctgacgcgaaaggaggtctacatcaagaacggtgacaagaaaggaagctgtgagcgcgacgcacagtacgctcctggctacgacaaggtgaaggacatctccgaagtggtgactccccgattcctgtgtacaggcggggtctccccctatgctgaccctaacacttgccgcggcgacagcgggggtccacttatcgtccataagcgaagtagatttatccaggtgggagtcatctcatggggcgtggtagacgtctgtaaaaatcaaaagagacagaagcaggtgcctgcccatgcacgcgatttccacatcaatctctttcaggtactgccatggcttaaggagaagctgcaggatgaagatctaggctttctgtag

SEQ ID NO: 183714 - DNA, 3801 bp, synthetic construct
  misc_feature 1..3801: note = Description of Artificial Sequence: Synthetic coding sequence
  source 1..3801: mol_type = other DNA
atgggccccctgatggtgctgttctgcctgctgttcctgtaccccgggctagccgactccgccccgtcatgcccacaaaacgttaacatttccggaggaacgttcactctgtcacatggatgggctcctggatcgctgctgacgtatagttgtcctcaggggttgtacccatctcccgccagcagactctgtaagtcttcggggcaatggcaaaccccaggcgcaaccagatctctgtcaaaagcagtatgtaagcctggccattgtcctaacccaggcatctcactgggcgcagtacgcactgggttccggttcggacatggtgataaggtgcggtatcggtgttctagtaatctggttctgactgggagcagcgagcgggaatgtcagggcaatggcgtgtggagtggaacagagcccatatgccgccagccgtactcctatgatttccccgaagatgtcgcgcctgcactagggacatcattctcacatatgctcggggctaccaatccgacacaaaagactaaggaccatgagaacggtaccggcaccaatacttacgcagccctaaattcagtctatctgatgatgaacaaccagatgcgcctgctcgggatggagaccatggcctggcaggagatccgccacgctataatcctcctgacagatgggaagtccaacatgggcgggagccctaagacggctgttgaccatattcgtgagattctcaacattaatcaaaaacggaatgactacctagacatttatgccattggggtcggcaaactcgacgttgactggagggaattaaacgagttaggatccaagaaggatggagaaagacatgcttttattctacaagacactaaagccctgcatcaggtgtttgagcacatgctggacgtgtccaaactcactgacacaatatgcggcgtggggaatatgagcgccaatgcctcagaccaagagcgtacaccatggcatgtcaccattaagccaaaatcccaggagacctgccggggggcattaatcagcgaccagtgggtcttgactgcagctcattgtttccgggacggaaacgatcatagcctttggcgcgtgaatgtaggagatccgaagtcgcaatggggcaaggagtttcttatcgagaaagccgtgatctcacctggtttcgatgtgttcgccaagaagaaccagggaatattagagttttacggagatgacatcgcactgctgaaattggcccagaaagtaaaaatgagtacccacgcacgcccgatttgcctgccttgtaccatggaggcgaacctggccctgagaaggccccaaggaagcacctgtagagatcatgaaaacgaactactcaataagcagtccgtcccggcccatttcgtagccctgaatggatccaaattgaacataaaccttaagatgggtgtcgaatggactagctgcgctgaggtggtgtctcaagaaaaaacaatgttccccaacctgactgacgtgcgcgaagtggtcacagatcagttcctctgcagcgggacccaagaagatgaatccccttgcaaaggcgttacaaccaccccctggagcctggctaggccacagggcagctgtagtttggagggtgtggagataaagggcggaagttttagactgctacaagaggggcaagctcttgaatatgtctgtccttctgggttctatccctatccggtacagacccggacatgcaggagtactggctcatggagtacccttaagacccaggaccagaagaccgtacggaaggccgagtgccgggcgatccattgtcctcgcccccacgattttgaaaatggggagtactggccaagatccccatactacaacgtgtccgacgagatatctttccactgttacgatggttacactctccgcggctccgcaaataggacctgtcaggtaaacggtaggtggtctggccaaacggccatctgtgataatggagctggatactgtagcaacccaggtatcccgatcggcactagaaaggtgggctcacagtaccggctagaagactcagtaacatatcactgctccagaggtctcaccctaaggggctctcagagaagaacctgtcaagaaggaggctcatggtccggcacagagccttcttgccaggattcctttatgtacgacactccccaggaagttgcggaggccttcctgtcaagcctcacagagaccatagagggtgtcgatgcagaagatggtcacggacccggcgaacaacagaagcggaaaattgttctggacccatccgggtccatgaacatctatttggtattagatgggtccgacagcataggcgcaagtaactttaccggcgcaaagaaatgcttggtgaatctgattgagaaagtggcgtcttacggtgtcaaacccagatacggattggtgacatacgccacataccctaagatttgggtaaaagtatctgaggccgattcctcaaacgccgattgggtgaccaagcagctaaacgagatcaattacgaggaccacaagctgaaaagcggcaccaacacgaagaaggctctgcaggccgtctattctatgatgagctggcctgatgacgtcccaccggaagggtggaaccgaaccagacacgtgattatattgatgaccgatggactgcataatatggggggtgatccaattacggttattgatgagatcagagacttactgtatattggcaaggatcgcaagaatcctagagaggattatctggatgtgtacgtgttcggggtggggcctctcgtgaaccaggtaaatattaatgcccttgcctccaaaaaggataatgaacaacatgtgttcaaagtgaaggatatggaaaaccttgaagatgtcttctaccaaatgattgatgagtcgcagtcactctcactctgtggaatggtttgggagcacagaaagggcaccgactaccataaacaaccttggcaagctaaaatttccgtcatacgtccctcgaagggccacgagagttgcatgggtgcagtggtgtcagaatatttcgtcctgaccgcagcccactgtttcaccgttgacgataaggagcatagtatcaaggtctctgtgggcggcgagaaacgcgatctagagattgaggtggtgctcttccatcccaattacaacattaacgggaagaaagaggccggcataccagagttctacgactacgacgtggcactgatcaaactcaaaaataaactgaagtacggccagacgatacggcctatttgcctcccatgtactgaaggcacaacacgcgctcttcgcctcccccctactacaacctgtcaacagcagaaggaagagttgctccccgctcaggacattaaggcactgttcgtgtctgaggaagagaagaaactgaccaggaaggaagtgtatattaagaacggggacaaaaaaggctcgtgtgagcgggacgcccagtacgcccctgggtacgacaaggtaaaggatatatcagaagttgtgacgccaaggttcctgtgcacagggggggtgagtccatacgcagatcccaacacatgccgaggagatagtggcggacctttaatagtgcacaaacggtctcgatttatccaggttggtgtgatctcatggggggtagtagacgtgtgcaagaaccagaagcggcagaaacaggttccagcacacgctcgagacttccacattaacttattccaagttcttccctggctcaaagaaaagttgcaggatgaggacttgggttttctgtag

SEQ ID NO: 183715 - DNA, 3801 bp, synthetic construct
  misc_feature 1..3801: note = Description of Artificial Sequence: Synthetic coding sequence
  source 1..3801: mol_type = other DNA
atgggccccctgatggtgctgttctgcctgctgttcctgtaccccggtttagccgactctgcaccatcctgtccccagaacgtgaatatatctggtgggaccttcactctgtcacatgggtgggctcccggctccctgctcacttattcgtgcccccagggcctttacccatcacccgccagtcggctgtgtaaaagctctgggcagtggcaaacgccaggggcgacccggtcattgtcgaaggcagtctgtaagcccggccactgcccaaaccccggtatctctctaggtgccgtacgaactggtttcagattcgggcacggggataaagtgagatataggtgctcgagtaacctcgtcttaactggatcctcagaacgcgaatgtcagggaaacggggtgtggagcgggaccgaacccatctgccgacagccctacagctacgatttccccgaggacgtcgctccggcacttgggacttcatttagtcatatgttaggcgctacaaatcctacccagaaaacaaaggaccatgaaaacggtacaggcaccaatacatacgcagctcttaattccgtgtacctaatgatgaataaccagatgcggctgctggggatggaaacaatggcatggcaggaaattcggcacgccattattctgcttaccgatgggaagagcaacatgggaggctcgccaaaaactgccgtggaccacatccgggaaatccttaatattaatcagaagcggaatgactacctggacatctacgcgatcggagtgggcaaactggacgtggactggcgggagctaaatgagctagggtctaagaaggatggagaacgacatgcattcatactgcaagataccaaagcattgcaccaggtcttcgagcacatgttggatgtttccaagctcacagataccatttgcggcgttggtaatatgagcgctaatgcgagcgaccaagagagaactccctggcatgtgactatcaagccaaagagtcaggagacctgtcggggagcactaatcagtgaccaatgggtccttaccgctgctcactgttttcgtgacggtaatgaccactcactgtggcgagtgaatgtgggtgaccctaagtcccagtggggcaaagagtttctcatcgagaaggctgtcatcagccccggctttgacgttttcgctaaaaaaaaccaggggatcttggaattttatggcgatgacattgccctgctgaagctggcccagaaagtgaagatgtccacgcacgctcgcccaatttgcctcccttgtaccatggaggccaacttagcattgcggaggccacagggatctacttgcagagatcacgagaacgaactgctaaataaacagagtgttccggctcactttgtggccctgaacggatctaaactgaatataaatctgaagatgggagtggaatggactagctgtgcggaagtggtgagccaggagaaaactatgttccccaaccttacagatgtgagagaggtggtaactgaccagtttctgtgtagtggaacacaggaggacgagtcaccatgcaagggagtcacaacgaccccgtggagcctcgcccgaccacagggcagctgctctctcgaaggcgttgaaatcaaaggcggctcctttcgcctgcttcaagaaggacaagcactcgagtacgtttgtccatcaggcttttatccttacccagttcagacccgcacttgtcggtcaacaggatcatggtcaacactcaaaacacaggatcaaaaaaccgtgaggaaggcagagtgccgggctattcattgcccccgccctcacgacttcgaaaacggcgagtactggcctaggtcgccatactacaacgtctccgatgagatttcctttcactgctatgatgggtacaccctacgaggatcagccaatcggacatgccaggttaatggccgctggtcaggccagacggccatctgtgataacggggctggatattgtagtaatcctggcataccaattggcactcggaaagtagggagccagtatcgtctcgaggactcggttacatatcattgtagtcgcggcctcactcttagaggcagtcagaggagaacctgtcaggagggaggttcttggagtggtacggagcccagttgtcaggattctttcatgtacgacacacctcaggaagtagccgaggctttcctgtccagcttgaccgagacgatagagggagttgatgctgaggacggacatggaccaggcgagcagcagaaaagaaaaattgtcctggacccatccggcagcatgaatatctatctcgtgcttgatggatcagactctataggcgccagtaatttcaccggcgccaagaagtgtctagtgaacctgattgagaaagttgcctcatacggagtgaaacctcgttacggacttgtgacatacgctacttatcccaaaatctgggtaaaggtcagcgaggccgacagcagtaatgccgactgggtgaccaagcagctcaacgagatcaattatgaggatcataagcttaagagtggcactaataccaaaaaggcacttcaggcggtctactctatgatgtcatggccagacgatgtccctcccgaaggatggaaccgtactcggcacgtgatcatcttgatgacggatggcctacacaatatggggggcgacccaattaccgtgattgatgagattagagacttgttgtacataggcaaggacaggaaaaacccccgcgaagactatcttgacgtgtacgtgtttggagtcggaccccttgttaaccaggtgaacatcaatgcactcgccagtaaaaaggataatgagcagcacgtatttaaagtgaaggatatggaaaatcttgaagacgtgttttaccagatgatcgatgagtcccagtccttatcactctgcggcatggtgtgggaacacagaaaaggcactgactaccacaagcagccctggcaagccaagatctccgtgattaggccctcaaaaggacacgaaagttgtatgggcgctgtagtgtccgagtatttcgttctgacagcggcccattgctttactgttgatgataaagagcacagcatcaaggtgtccgtgggaggggaaaaaagggacctggagatcgaggtcgtgttattccacccgaactacaacattaatggaaagaaggaggcgggaatccctgaattctacgattacgatgtggctttaatcaaactgaaaaataaactgaaatatggtcagactatcagacccatttgcctcccctgcaccgaaggaactaccagggccctgagacttcctccaaccactacttgccagcagcagaaagaagagctgctgcctgcccaagacattaaggctctcttcgtcagcgaggaggaaaagaaactgacccgaaaggaggtatatatcaagaatggcgacaaaaaaggaagctgcgagagggacgcacaatatgcacctggctacgacaaggttaaggacatctcagaggtcgtaacacctcgcttcttgtgtaccggaggggtttccccttacgccgatcctaatacctgtagaggggatagcggtggcccccttatcgtgcataaaagatctcgcttcatccaagttggggtaatatcttggggtgttgttgacgtgtgcaagaatcagaaacggcagaaacaggtgcctgctcatgctcgggattttcacattaatttgttccaagttcttccctggttgaaggagaagctacaggacgaagaccttggtttcctttag

SEQ ID NO: 183716 - DNA, 762 bp, synthetic construct
  misc_feature 1..762: note = Description of Artificial Sequence: Synthetic coding sequence
  source 1..762: mol_type = other DNA
atgcacagctgggagcggctggccgtgctggtgctgctgggcgccgccgcctgcgctgctccccccagaggtcggattttgggcgggcgtgaggctgaagcccacgcacgcccatacatggcctcggtccagcttaacggggcgcatctgtgcgggggggtcctggtggctgagcagtgggtgctgagcgccgctcactgccttgaagacgcggcagatggcaaagttcaggtactgcttggcgcacactccctgagccaacctgagccttccaagcggctatacgacgtgctcagagcagttccacaccccgattcacaacctgatactatagatcacgatctcctgttactacagctctccgaaaaggccaccctgggacctgccgtgaggccactcccttggcagcgtgtcgaccgggacgtcgccccaggtacactttgtgatgtcgccggctgggggattgttaaccacgcaggcagacgacctgatagtctgcagcatgtccttctcccagtccttgaccgcgccacctgcaaccgcagaacacatcacgacggagcaattactgagaggctgatgtgtgctgagagtaaccgcagagactcatgcaaaggtgattcagggggaccactggtgtgcggaggggtcctggagggggtggtgacatccggaagccgtgtttgtggaaacagaaaaaagccagggatatacacacgggtcgctagctatgccgcctggatcgatagcgtgctggcatag

SEQ ID NO: 183717 - DNA, 993 bp, synthetic construct
  misc_feature 1..993: note = Description of Artificial Sequence: Synthetic coding sequence
  source 1..993: mol_type = other DNA
atgtggctgctggtgagcgtgatcctgatcagccggatcagcagcgtcggaggagaagctacattctgcgattttcccaaaattaaccacgggatcctgtacgatgaagagaaatataagccgttttctcaggtcccgaccggagaagtattttactactcttgcgagtataatttcgtctccccaagcaagagcttttggacccgaatcacttgcaccgaagaaggatggagtccgacacctaaatgtctgagactgtgcttcttcccatttgtggagaatggacattccgaatcaagtgggcagacgcacctggagggggatactgttcagatcatctgcaataccggatatcgtcttcagaataatgaaaataatatttcttgcgtagagcgcggttggagcacacctcccaaatgccgaagtactgacaccagttgtgttaatcctcctacagtgcagaacgcacacattctgtcaagacagatgtccaaatacccttccggggagagagtccgctacgaatgccgctcgccctacgagatgtttggagatgaagaggtcatgtgtttgaatggcaattggacagaaccaccccagtgcaaggatagtaccggaaagtgcggccctccaccgcccattgataatggagacatcacaagcttccccctgtcagtgtatgcccctgccagcagtgtggagtaccagtgccaaaacctctaccagctggagggaaataaaagaattacatgtcgaaatggacaatggagcgaaccaccgaagtgcttgcacccttgtgtcatctctagagagatcatggaaaattataatatcgcattacgttggacagctaagcagaagctgtacttacggacaggggaatccgccgaatttgtctgcaagaggggatataggctgtccagcagatcacataccctgcgaacgacctgttgggacggcaagctggaatatcctacatgcgccaagaggtag

SEQ ID NO: 183718 - DNA, 813 bp, synthetic construct
  misc_feature 1..813: note = Description of Artificial Sequence: Synthetic coding sequence
  source 1..813: mol_type = other DNA
atgtggctgctggtgagcgtgatcctgatcagccggatcagcagcgtcggaggggaggccatgttctgcgatttccccaagataaaccacggcatactgtacgatgaagagaaatacaaacctttttcccaggtgcccaccggcgaggtcttctactactcgtgcgagtacaatttcgtgtcacctagtaaatccttttggacccgcatcacttgtgctgaagagggctggtcgccaacacccaagtgtctgagactgtgcttcttccccttcgtcgaaaacggccatagcgagtctagtggccagacacacctcgaaggcgatacggtacaaatcatctgtaacacagggtataggctccaaaataatgaaaacaacatttcctgtgtagaacggggctggagtacaccccccaagtgtaggtctactatatcagccgagaagtgtgggcccccgcccccaattgataatggcgatatcacttcgtttctcctgtctgtttacgctccgggctctagcgtcgagtaccagtgccaaaatctctatcagctcgagggcaacaatcagatcacttgccgcaacggacagtggtcagaaccaccaaaatgccttgacccgtgtgtgatcagccaagaaataatggagaagtacaatatcaagctaaaatggacaaaccaacagaaactgtatagccgcaccggtgacatcgttgagttcgtttgcaagtccggctatcatcccacaaagtcacacagctttcgagccatgtgtcagaatgggaagttggtgtatccgtcatgtgaggaaaaatag

SEQ ID NO: 183719 - DNA, 813 bp, synthetic construct
  misc_feature 1..813: note = Description of Artificial Sequence: Synthetic coding sequence
  source 1..813: mol_type = other DNA
atgtggctgctggtgagcgtgatcctgatcagccggatcagcagcgtgggaggcgaagcaatgttttgcgatttccccaagattaaccatgggatcctatacgatgaagagaagtacaaacccttctcacaggtgcccactggcgaggtgttctattatagctgcgagtacaacttcgtatcaccttccaagtccttctggactcgaatcacctgcgccgaggaagggtggagccccacacccaagtgtcttcgcttgtgcttctttccgtttgtggagaatggccattccgagtcaagcgggcaaacccaccttgaaggcgacacagtccagataatctgcaacacgggctaccgcctgcagaataatgagaacaatatcagctgcgtagagaggggctggtctacacctcccaaatgccgctcaaccatctcagccgaaaagtgcggcccgccacctcccatcgataacggggatattacaagctttttactgtctgtctacgccccgggctcatctgtggaataccagtgccagaacctctaccagctggagggaaacaaccaaataacttgcagaaacggccagtggagcgaacccccaaagtgcctcgacccctgcgttatttcacaagagatcatggagaaatataacattaagctgaaatggacaaaccaacagaaactgtacagtagaaccggcgatatcgtagagttcgtgtgtaaatcagggtaccatcccaccaagagccatagcttccgggcgatgtgtcagaatggaaagctggtttatcctagctgtgaagagaaatag

SEQ ID NO: 183720 - DNA, 993 bp, synthetic construct
  misc_feature 1..993: note = Description of Artificial Sequence: Synthetic coding sequence
  source 1..993: mol_type = other DNA
atgctgctgctgatcaacgtgatcctgaccctgtgggtgagctgcgccaatggccaggtgaagccctgcgacttccctgacatcaagcatggaggtcttttccatgagaatatgaggaggccctattttccggtcgcagtagggaagtactatagctattactgtgacgaacattttgagaccccctcggggagttactgggactatatccactgcactcagaatggttggagccctgccgtcccctgtctgcgaaaatgttacttcccgtatttagagaacggctacaaccagaattacggacgtaaattcgtgcagggcaactccacagaggtggcgtgtcaccctggatacggtttaccgaaagcgcaaactactgttacatgtaccgagaagggctggtcccctaccccccgctgcattagagtccggacatgctcaaagtccgatattgaaatcgagaacggcttcattagcgaatcaagtagcatttatatcttgaataaagagattcagtacaagtgtaagcctggctatgcaacagccgacggcaatagctccggatccattacctgccttcagaatgggtggtccgcccaacccatttgcataaactcgagtgagaaatgtggacctcccccaccaatctcaaacggtgacaccacaagcttcctgctgaaagtgtacgtcccacaaagcagagtcgagtaccagtgtcagccttactatgaactgcaagggtccaattacgtgacttgctccaacggtgaatggtccgagcctccacgctgtattcacccatgtatcattacggaagaaaacatgaacaagaacaacattaagcttaaagggagatccgacaggaaatactatgcgaaaaccggcgatactatcgagttcatgtgtaaactgggatataacgccaatactagcatcctgagtttccaggctgtgtgtcgggaggggatagtggaataccctcggtgtgagtag

SEQ ID NO: 183721 - DNA, 588 bp, synthetic construct
  misc_feature 1..588: note = Description of Artificial Sequence: Synthetic coding sequence
  source 1..588: mol_type = other DNA
atgctgctgctgatcaacgtgatcctgaccctgtgggtgagctgcgcaaacggccaagtgaaaccctgcgactttccagacatcaagcatggaggcctattccatgagaacatgaggcgaccatatttcccagtggctgtgggaaaatattacagctattactgcgatgagcatttcgagacaccctctggctcctattgggattacatccactgtacgcagaacggctggtctcctgccgtgccgtgcctgcggaagtgctatttcccctacttggagaatggctacaatcagaactacggaaggaagtttgtccaaggtaactctactgaggtggcctgtcatcccggctatggcttgcccaaagcccagaccaccgtgacttgcacagagaaaggatggtcccctacacccaggtgcatcagggttcggacatgtagcaagagtgatatcgagatcgaaaacggctttattagtgagagctcatctatctacattctcaataaggagattcaatataagtgtaagcctggatacgccacggccgacggaaactcctctgacatggtattttgcattagctactag

SEQ ID NO: 183722 - DNA, 810 bp, synthetic construct
  misc_feature 1..810: note = Description of Artificial Sequence: Synthetic coding sequence
  source 1..810: mol_type = other DNA
atgctgctgctgatcaacgtgatcctgaccctgtgggtgagctgcgccaacggtcaggttaaaccgtgcgacttccctgacatcaaacacggcggactcttccatgaaaatatgcggcgcccatacttcccagtggccgttggcaaatattactcatattactgtgacgagcacttcgaaacaccaagcgggtcatactgggactatatccattgtacacaaaatggatggtccccagctgtgccttgtctgaggaaatgttattttccatatctcgaaaacggttataaccagaactatggcaggaaatttgttcagggaaactcaactgaagtggcctgccaccccgggtatggccttcccaaagcgcaaaccacggtgacatgcacggagaagggctggagccccacccctagatgtatcagggtgaacagcagtgagaagtgcgggccaccacctccaatctccaatggtgatacaacaagcttcctgctcaaggtgtacgttccccagtccagagtagagtaccagtgtcagccctactatgagctgcagggttccaactacgtaacatgttcaaatggtgaatggtcagagccaccaagatgtatccacccctgtatcatcacagaagaaaacatgaacaagaataatatcaagctcaagggaagatctgatcgcaaatattacgccaagacaggcgacaccatcgaattcatgtgcaagctcggatataatgccaacacatccatactctctttccaggccgtatgcagagagggaatcgtggaataccccagatgcgagtag

SEQ ID NO: 183723 - DNA, 996 bp, synthetic construct
  misc_feature 1..996: note = Description of Artificial Sequence: Synthetic coding sequence
  source 1..996: mol_type = other DNA
atgctgctgctgatcaacgtgatcctgaccctgtgggtgagctgcgccaacggccaggaggtcaagccctgtgattttccggagatccagcatggcggtctgtactataagagcctgagaaggctgtatttcccggctgctgctgggcagagttatagctactattgtgaccagaatttcgtgacaccttcagggtcatactgggactacatacactgtactcaggatggctggagtcccacagtgccctgcctccggacttgctcaaaaagcgatatcgaaattgaaaacgggtttatcagcgagtcaagtagtatctacattctgaataaggagatacagtataagtgtaaacctggatacgctaccgccgatggcaactcttcagggagcatcacatgcctccagaatggctggagtgctcaaccaatctgcatcaagttctgtgatatgcccgtattcgaaaactccagggctaaatcaaatggcatgcggttcaagttacacgataccctagactacgagtgctatgatgggtatgagatttcctacgggaacacgacaggctcgatcgtgtgcggtgaagacggctggtctcatttcccgacctgctacaattccagcgagaagtgcgggccaccccctccaatctctaatggcgacaccacctcctttctcctgaaggtttacgtccctcagtcgagggtggagtaccagtgccagagctattacgagctccagggctcgaattacgtcacatgctccaacggagaatggtcagagccccctagatgcatccacccttgcattataacggaagagaacatgaacaaaaataatattcagctcaagggaaaaagcgatattaagtattatgccaagactggcgacacgattgaatttatgtgtaagctgggctacaacgctaacacctctgtactgagttttcaggcggtatgtagagaagggatcgtcgaataccccaggtgtgagtag

SEQ ID NO: 183724 - DNA, 1734 bp, synthetic construct
  misc_feature 1..1734: note = Description of Artificial Sequence: Synthetic coding sequence
  source 1..1734: mol_type = other DNA
atgctgctgctgatcaacgtgatcctgaccctgtgggtgagctgcgcaaacggccaagttaagccttgcgactttccagagattcagcatggaggcctatactacaaaagtctcagaaggctttactttccggccgccgccggacagtcttatagctattactgcgaccagaacttcgtgactccttctgggagttactgggattatatacattgcacacaagacggctggtcacccactgtaccatgcctgcgtacctgctccaagtctgatgtggaaattgagaacggctttattagcgagtcctcctcaatctacatccttaacgaggagacccagtacaattgcaaaccagggtatgccaccgcagagggcaacagtagtggttccataacttgcctgcaaaacggatggagtactcagccaatatgtatcaaattctgcgacatgccagtgttcgagaactctcgcgccaagtctaatggaatgtggttcaaacttcatgacacactggactacgagtgctacgacgggtatgaaagctcttatggtaacaccaccgattcaattgtgtgcggcgaagatggatggtcccacctgcctacttgttacaactctagcgagaactgcgggccgcccccaccaatatcaaatggagatactacatctttcccccagaaagtgtacctgccttggagtagagtggaatatcagtgccaatcttattatgagctgcaggggtcaaagtacgtgacttgttcaaacggagactggtccgaaccccctcgctgcatttcaatgaaaccctgtgagtttcctgaaatccagcatggtcacctgtattacgaaaacacccggagaccctacttccccgtcgccacagggcagtcatatagctattactgcgatcagaactttgtgactccaagtggctcctattgggactacatccactgtacccaggacgggtggctcccaacggtcccctgcctgagaacatgtagcaagagtgacatcgaaatagaaaacgggtttatcagtgagtcttcgtcaatttacatattgaataaggagatccagtacaagtgtaagccaggatatgccacagccgacggaaattcctccgggagcattacttgtctgcagaatgggtggtctgcacagcccatatgtatcaagttctgcgatatgccagtcttcgagaattcccgcgctaagtctaacggcatgcgtttcaagctgcatgacacactggactacgagtgttacgacggctacgagatttcctacggaaacaccactgggtctatagtttgtggtgaggatggctggtcccactttcctacgtgttataatagtagtgagaagtgtggaccaccgcccccaatctccaacggtgatacaacttcctttctcctgaaagtttacgtcccccagagccgtgtggagtatcaatgtcagtcttattatgagctgcagggctctaattatgtgacctgttcaaatggcgagtggagcgagcctcctcgatgtattcatccttgcataatcacagaagaaaatatgaacaaaaacaacatacaacttaaggggaaaagcgacattaagtactatgccaaaactggggacaccatcgagttcatgtgcaagctgggctacaatgcaaatacctccgttttatcttttcaggccgtctgccgcgagggcatcgttgaatatccccgctgcgaatag

SEQ ID NO: 183725 - DNA, 996 bp, synthetic construct
  misc_feature 1..996: note = Description of Artificial Sequence: Synthetic coding sequence
  source 1..996: mol_type = other DNA
atgctgctgctgatcaacgtgatcctgaccctgtgggtgagctgcgcaaacgggcaggcgatgaaaccctgcgagttcccggaaatccagcatggccatctatactatgagaatacacgccgaccatatttccccgtggctacgggacagtcttactcctactactgcgatcagaacttcgtgactccatcggggagttactgggattacattcattgtacacaggacggatggctgccaactgttccgtgtctgaggacttgctctaagtctgatatcgaaattgagaatggattcatctcggagtcgtcctccatttatatcttaaacaaggagattcaatacaagtgcaaaccaggctacgccactgctgacgggaattctagtggttccatcacttgtctgcagaatggctggagcgcacaacccatttgcattaaattctgtgacatgcccgtgtttgagaatagtcgggctaaaagcaatggcatgcggtttaagcttcacgacacccttgattatgagtgttatgacggatacgagatatcttacggtaacacaaccggctccattgtctgtggtgaggacggatggtctcacttccctacctgttataattcttctgaaaaatgcgggcctccaccgcctatttcaaacggcgataccacgtctttcctgctcaaggtctatgtgcctcagtccagggtggagtaccagtgtcagtcatactatgaactacaggggtccaattatgtgacctgcagtaacggtgagtggtccgagcctcctcgatgcatccatccctgtatcattaccgaagaaaacatgaacaagaacaacatacagctaaagggaaagagcgacataaagtattatgcaaaaacgggagatactatcgagtttatgtgcaagctcggatacaatgccaatacttccgttctatcttttcaggccgtgtgtcgcgaaggaatcgttgaatatcccaggtgtgaatag

SEQ ID NO: 183726 - DNA, 996 bp, synthetic construct
  misc_feature 1..996: note = Description of Artificial Sequence: Synthetic coding sequence
  source 1..996: mol_type = other DNA
atgctgctgctgatcaacgtgatcctgaccctgtgggtgagctgcgcaaacggacaggaagttaagccctgcgattttcccgagatccagcatggcgggctgtactataagtcactgcgtcggctctattttcccgcagccgctgggcagagctacagttactactgcgaccagaacttcgtgaccccaagcggaagctactgggattacattcactgtactcaggacggctggcttcctactgtcccctgccttcgaacctgcagtaagagcgatatagaaatcgaaaatgggttcatttccgagtcatcgtctatctatatactgaataaggaaattcaatacaagtgtaaacccggctacgctactgcagatggaaactcctccggcagcatcacctgcctgcaaaatggttggtccgcccaacccatttgcatcaagttttgtgacatgccggtgttcgaaaatagtcgcgccaagtctaatggaatgagatttaaactgcatgatacgctggactacgagtgctatgacggttacgagattagttatggaaatacaaccggaagcattgtctgcggggaggatggatggtcacactttccaacctgctataactctagcgaaaaatgtggacccccaccgcctatctctaacggagacacaaccagcttcctcctcaaggtgtacgtaccgcagagcagggtggaatatcagtgtcaatcatattacgaactgcagggcagcaattatgtgacttgtagcaacggcgaatggtctgagccgcctcggtgtatccacccttgcatcatcaccgaagagaatatgaataagaacaacattcaacttaagggtaaatccgacattaaatactatgcgaaaacaggagacaccatcgagttcatgtgcaagttggggtataatgcaaacacatctgtcctttccttccaagcggtgtgccgagagggaatagtagaatatccacggtgcgagtag

SEQ ID NO: 183727 - DNA, 1752 bp, synthetic construct
  misc_feature 1..1752: note = Description of Artificial Sequence: Synthetic coding sequence
  source 1..1752: mol_type = other DNA
atgaagctgctgcacgtgttcctgctgttcctgtgcttccacctgcgcttctgtaaggtgacgtatacgtcacaggaagatttggtagagaaaaaatgcttggcaaaaaagtatacacatctgagctgcgacaaggtattctgtcagccttggcaacggtgcatagaagggacgtgcgtttgtaaactgccataccagtgtcccaaaaatgggacggccgtctgcgccacaaatcgtagatctttccctacctactgtcagcagaagtcactggagtgtctgcacccaggaaccaaatttctgaataacggcacatgtacggccgagggtaagttttccgtctccctcaaacatggaaacaccgattccgaaggcatagtggaggtgaagttggtagatcaggacaagacgatgttcatttgtaagagtagctggagcatgcgggaggcaaatgtggcctgcctggacctcggatttcagcagggcgcagatacacagagacgcttcaagctgtcagacctgtccataaacagcaccgagtgcttgcacgtgcactgtcggggactagaaactagtctggctgaatgcacctttactaaacgacggacaatgggatatcaggacttcgcagacgtggtgtgttacacgcagaaagccgattctcctatggatgactttttccagtgtgtaaatggaaagtatatctcccagatgaaagcgtgtgacggcattaacgactgcggggaccagagtgatgaactgtgttgcaaagcatgtcagggtaaaggcttccattgtaagagtggcgtttgtattcctagccaatatcaatgtaacggggaagttgactgcataactggcgaggacgaagtgggctgtgccgggttcgccagcgtcacccaggaggaaacagaaatcttaacagccgatatggacgctgaaagaaggcgtattaagagcctgctccccaagctgtcctgcggagtcaaaaacaggatgcacattaggaggaagaggatagtaggagggaaaagggcacaacttggcgacctcccatggcaagttgccatcaaagatgcatccggtattacctgcggcggaatttacattggtggctgctggatcctgacagccgctcattgcctgagggccagcaagacgcatcgctaccagatttggactaccgttgtggactggattcatccagatttgaaacgtatcgtgatcgagtacgtggataggataatatttcatgagaactacaacgcaggtacctatcagaatgacatcgcactgatagagatgaagaaagacggaaacaagaaggactgtgaattgccacgatctattccagcgtgcgtaccctggtctccatatctgtttcagcccaacgacacctgcatagtatcaggttggggacgcgagaaggataatgagcgagtgttctcgttgcaatggggcgaagtgaaattgatttcgaattgcagcaaattctacggaaatcgtttttatgagaaggagatggagtgcgccgggacctacgatgggagcatcgatgcatgcaagggcgactctggcggccctttagtttgtatggatgctaataacgtcacatacgtgtggggggtcgtgagctggggcgagaactgtggtaaacctgagttcccaggtgtctacacaaaggtcgctaattacttcgactggataagctaccatgtagggcgccctttcatctcccagtataatgtgtag

SEQ ID NO: 183728 - DNA, 1776 bp, synthetic construct
  misc_feature 1..1776: note = Description of Artificial Sequence: Synthetic coding sequence
  source 1..1776: mol_type = other DNA
atgaagctgctgcacgtgttcctgctgttcctgtgcttccacctgagattctgcaaggtgacttacacgagccaagaggatctggttgagaagaaatgtttagctaaaaagtacactcatctgtcctgcgacaaagtattctgccagccttggcagaggtgtatcgaggggacttgcgtgtgtaagctgccttaccagtgtccaaagaatggcacggctgtgtgcgcaactaacaggcgctcattccctacatactgccagcagaagtctctcgaatgcctccaccctggtacgaaatttcttaataatggcacgtgtactgctgagggaaagttctccgtgagcttaaagcatgggaacaccgattctgaaggaattgttgaggtcaagcttgtggaccaggacaagacaatgtttatctgtaagtcaagctggtccatgcgcgaggccaacgtcgcatgtctggatctcggatttcagcagggtgccgatacccagagacgattcaagctgagcgacctctccatcaattccaccgaatgtctgcacgtgcactgcagaggcttggaaacttcgctggctgagtgcacgtttacaaagcgtcggaccatggggtatcaggatttcgcagacgttgtgtgctatacacagaaagccgatagccccatggatgacttctttcagtgtgtgaacggaaagtacatcagccagatgaaggcctgtgacggcatcaatgattgcggtgatcaatccgacgagctgtgctgtaaggcctgtcaagggaagggtttccactgtaaaagtggtgtgtgcatccctagccagtaccaatgtaatggggaagtggattgtataaccggagaggacgaggtaggatgcgctgccgcccggcaccccacaatccagggattcgctagtgtgacccaggaggagaccgaaatcctgacagccgatatggacgccgaaagaagacggatcaagagcctgctgcctaagttgagctgcggcgttaagaaccgcatgcacataaggcggaaaaggatagttggtggcaaacgcgctcaattgggtgatcttccttggcaagtagctataaaagatgcttccggaatcacatgcggcggcatatatataggcggctgttggatactgacagcagcccattgtctgcgggcctctaagacccaccgctaccagatctggaccacagtggtcgactggatccaccccgatttgaaacggatcgtcatagagtatgtggaccggataatctttcacgagaattacaacgctggcacctaccaaaacgatatcgcccttatcgagatgaaaaaagacgggaacaagaaggactgcgagctgccccggtctattccagcttgcgtaccatggagcccctatctttttcagccgaacgacacctgtatagtgtccggctggggcagggagaaggacaacgagcgcgtgttcagtctccaatggggcgaagtcaaactgatctcaaactgtagcaaattctacggcaataggttctacgagaaggaaatggagtgtgccggaacatacgacggcagtatagacgcctgtaaaggcgacagcggcggaccactggtctgtatggacgcgaacaacgtgacttatgtatggggggtagtctcttggggagagaattgcggcaagccagaattccccggcgtttacactaaggtggcaaactattttgattggatctcttatcacgttgggaggccctttataagccaatacaacgtgtag

SEQ ID NO: 183729 - DNA, 1731 bp, synthetic construct
  misc_feature 1..1731: note = Description of Artificial Sequence: Synthetic coding sequence
  source 1..1731: mol_type = other DNA
atgaagctgctgcacgtgttcctgctgttcctgtgcttccacctgcgcttctgcaaagtcacctacacgtctcaggaagatctggtggaaaaaaagtgtctggccaagaaatatactcatctgagttgtgacaaagttttctgtcagccttggcagcggtgtatagagggaacgtgtgtatgcaagctgccataccagtgtcccaagaatggtacagccgtctgtgccaccaacaggagatcatttcccacatactgtcagcaaaaaagtctggaatgcctccatcccgggaccaagttcttgaacaacggtacatgcacagcggagggtaagttctcagtgagtttgaagcacggcaacacagattccgagggtattgtcgaagtcaagctggtggatcaggacaagactatgttcatctgcaaatcttcctggtcaatgcgggaagcaaacgtggcatgcctagaccttgggttccagcagggagccgacacccaacgacgctttaaattgtctgatctttccatcaactcaacagagtgtctccatgttcattgccgcggccttgagacaagtctggccgagtgtaccttcacaaagagaagaaccatgggatatcaggacttcgccgacgtggtctgctacacccagaaggcagactcccctatggacgattttttccagtgtgtgaatggcaagtacataagccagatgaaagcatgtgacgggattaacgattgtggcgatcagtcagatgagctatgttgcaaggcatgccagggcaaaggtttccattgcaagtccggcgtgtgtattccctcacagtaccaatgcaatggagaagtagactgcataacaggtgaggacgaggtgggatgcgccgaagagaccgagattctcacggctgatatggacgccgagagacgacgtattaaatccctattgcccaagcttagttgcggagtgaagaatcgcatgcacatccgaaggaaaaggatcgttggagggaaacgagctcagctgggggacctgccatggcaagtggcaatcaaggatgccagtggtatcacctgcggcggaatatacatcggtgggtgctggatcctgaccgcagcccactgtcttcgcgcaagcaagacacacaggtatcagatatggacaacagtggtggactggatacatcctgatctgaaaaggattgttatcgagtacgtcgatcgcataattttccatgaaaactataatgctgggacctatcagaatgacatcgcccttatcgagatgaaaaaggatggcaataaaaaagattgtgagctgccccgttcaatcccagcgtgtgttccctggagcccttacctgttccagccaaacgatacttgcattgtcagcgggtggggccgggaaaaagacaatgaaagggtgttcagccttcaatggggtgaggtgaagctcatatccaactgctccaaattttatggaaaccggttttatgaaaaggaaatggagtgcgctggaacctacgatgggtcaatagacgcttgcaagggcgatagcgggggccccttagtgtgcatggacgctaacaacgttacctatgtatggggtgtcgtcagctggggagagaactgtggaaaacccgagtttcccggcgtttacaccaaggtagcaaactattttgactggatctcttatcatgtcgggaggccattcatctcacagtataacgtctag

SEQ ID NO: 183730 - DNA, 966 bp, synthetic construct
  misc_feature 1..966: note = Description of Artificial Sequence: Synthetic coding sequence
  source 1..966: mol_type = other DNA
caggtgacctacaccagccaggaggacctggtggagaagaagtgcttggcgaagaaatacacacacctaagctgtgacaaagtcttctgccaaccttggcagagatgcatcgagggcacatgtgtctgtaagctgccctaccagtgcccgaaaaacggtacagcagtgtgtgcaacaaataggcgctctttccccacttactgtcagcaaaagagcctcgagtgtctgcaccccgggaccaaattccttaataatggcacttgtaccgccgagggcaaattttccgtctctctgaaacatggcaacacagattctgaaggaatcgtggaagtcaaactcgtggaccaggacaaaacgatgttcatttgtaagagttcctggagcatgagggaggccaatgttgcctgtttggacctcggctttcagcaaggcgccgatacacagaggcgcttcaaactaagcgatctctcaatcaattccactgaatgccttcatgtgcactgcaggggcctggagaccagcctggccgaatgtacatttaccaagcgccgcaccatggggtatcaggacttcgctgatgtcgtatgttacacccagaaagccgatagtcctatggacgacttcttccagtgcgtaaacgggaagtacatcagtcagatgaaggcatgtgatggcattaatgactgtggtgatcaatctgatgagctttgctgtaaggcgtgccagggaaaaggatttcactgcaagtcaggtgtctgcatccctagtcagtaccagtgtaacggagaggtggattgtatcacgggcgaggacgaagttggctgcgcagcctttgccgagctttgcatcgaggagaccgaaatactcacagccgatatggacgccgagaggagacgaatcaagtcactcctaccaaaactgtcttgtggtgtcaagaaccgcatgcacattaggcgcaagcgctag

SEQ ID NO: 183731 - DNA, 1134 bp, synthetic construct
  misc_feature 1..1134: note = Description of Artificial Sequence: Synthetic coding sequence
  source 1..1134: mol_type = other DNA
atgaagctgctgcacgtgttcctgctgttcctgtgcttccacctgcgattttgcaaggttacatatacaagtcaagaagacttggtggaaaaaaaatgtcttgcaaagaagtacacgcatcttagctgcgataaggtcttttgccaaccgtggcagaggtgtatcgagggcacctgcgtgtgcaagctaccataccaatgcccgaagaacggcactgcggtctgcgccaccaacaggagatcctttcccacctactgccagcagaaaagtctcgagtgccttcatcccggcacaaaatttctgaacaatggcacttgtacagctgaggggaagttttctgtgtcactgaagcacggcaatactgatagtgaaggtattgttgaggtgaagctcgtggatcaggacaagaccatgtttatatgtaaatcctcctggtctatgagagaggcgaatgtagcgtgcctggatctgggctttcagcagggcgctgatacgcagaggcgtttcaaactgagcgatttatcgattaattccacagaatgcctgcatgtgcattgcagaggactggagacaagtctggctgagtgcacgtttacaaagcggcgcacaatgggctatcaggattttgctgatgtcgtatgctatacacagaaggccgattctcctatggacgatttctttcagtgtgtgaacgggaaatacatctcccagatgaaagcctgcgatggcattaacgactgtggagatcagtctgacgaactttgctgcaaggcatgccagggcaaggggttccactgcaagtctggcgtgtgcatcccgagccagtaccagtgtaacggggaagtcgactgtattactggagaggatgaagtaggttgtgctggctttgccagcgtcacccaggaagaaaccgaaattctgacggctgacatggatgctgagcgccggaggattaagtctctattacccaaacttagctgtggggtcaagaatagaatgcacatccgtagaaaacgaatcgtggggggtaagagagctcagcttgggaagatgaaacagatctcactggacatcttcaagggcctgcaccgcgtttacgcaattctggagttctgttgcatcattctgaagtag

SEQ ID NO: 183732 - DNA, 405 bp, synthetic construct
  misc_feature 1..405: note = Description of Artificial Sequence: Synthetic coding sequence
  source 1..405: mol_type = other DNA
atggagttcgtgatgaagcaggccctgggcggcgccaccaaggacatgggaaaaatgcttggaggagatgaagagaaagatccggacgcagcaaaaaaggaggaggaaaggcaagaagcgcttagacaggccgaggaagaacggaaagccaagtatgcaaagatggaagccgagcgcgaggccgtgcgccagggcatccgcgacaagtatggcataaaaaaaaaggaggaacgcgaggcagaggctcaggccgctatggaggctaattcggaaggaagcttaactcggccaaaaaaagcaatcccaccgggctgcggcgatgaggtggaggaggaggacgaatccatcctggataccgtgatcaagtacttgcctgggcctctgcaggacatgcttaaaaagtag

SEQ ID NO: 183733 - DNA, 405 bp, synthetic construct
  misc_feature 1..405: note = Description of Artificial Sequence: Synthetic coding sequence
  source 1..405: mol_type = other DNA
atggacttcgtgatgaagcaggccctgggcggcgccaccaaggacatgggtaagatgctgggcggcgaagaagaaaaggacccagatgctcaaaagaaagaagaagagagacaggaagcgttacggcaacaggaagaagagcgcaaagccaagcacgcgaggatggaagctgaaagagaaaaggtgcgacagcagattagagacaagtatggcctcaagaagaaggaggaaaaagaagccgaagaaaaggcggcccttgaacagccctgcgagggcagtctgacgcggccaaaaaaggccatacctgctgggtgtggggacgaagaagaagaagaggaggaatccatcctggatactgtgcttaaatacttacccgggccactgcaggatatgtttaagaaatag

SEQ ID NO: 183734 - DNA, 405 bp, synthetic construct
  misc_feature 1..405: note = Description of Artificial Sequence: Synthetic coding sequence
  source 1..405: mol_type = other DNA
atggacttcgtgatgaagcaggccctgggcggcgccaccaaggacatgggtaagatgctgggtggtgaggaagagaaggatcctgatgcgcaaaagaaagaggaggagcggcaggaggcactgagacaacaggaggaggaacgcaaggcaaagcacgcccggatggaggcagagcgagagaaagtgcgtcagcaaatacgagacaagtatggccttaaaaaaaaggaggagaaagaagcagaggaaaaggccgccctggaacagccatgcgagggttcccttacaaggcccaagaaggcaattcccgcagggtgtggagacgaggaagaggaagaggaagagtcaatcctggataccgtccttaaatacctcccggggccgcttcaggacatgttcaagaagtag

SEQ ID NO: 183735 - DNA, 555 bp, synthetic construct
  misc_feature 1..555: note = Description of Artificial Sequence: Synthetic coding sequence
  source 1..555: mol_type = other DNA
atggacttcgtgatgaagcaggccctgggcggcgccaccaaggacatggggaagatgctagggggcgaagaagagaaggatcccgatgcacaaaagaaagaggaggagcgtcaagaagcattgcgtcagcaggaggaagaacggaaagctaagcatgcacgcatggaggccgaacgcgagaaggtgaggcaacagatcagagacaagtatgggctcaagaagaaggaggagaaggaggccgaggagaaagctgcgttgagagggaggggtgggggaggccgaggcgagcaccctggacacggtgctcagatccctgcccgcgccgcggccggtcatgtgcaagaagtgacccggccccctgcccccgcgtattccacatgttattactttttcctagtcctgtctttcctgttcatcagattatccttgaattcagaaggcgaaaatctgtcctggccactccccctctttcccggtcaaggactgctccctctatcttccccttcccatctgccctcgtctcagggtatacatctccaccccacacctaaatag

SEQ ID NO: 183736 - DNA, 234 bp, synthetic construct
  misc_feature 1..234: note = Description of Artificial Sequence: Synthetic coding sequence
  source 1..234: mol_type = other DNA
atggacttcgtgatgaagcaggccctgggcggcgccaccaaggacatgggcaagatgctgggcggtgaggaggagaaggaccctgatgcccagaagaaggaggaggagcggcaggaggctttgagacaacaggaagaagaacggaaggctaagcatgccagaatggaagcagagagagagaaggttcggcagcagatccgcgataaatatgggcttaagaagaaggaggagtag

SEQ ID NO: 183737 - DNA, 336 bp, synthetic construct
  misc_feature 1..336: note = Description of Artificial Sequence: Synthetic coding sequence
  source 1..336: mol_type = other DNA
atggacttcgtgatgaagcaggccctgggcggcgccaccaaggacatgggcaaaatgcttggaggcgaggaggaaaaagacccagatgcgcagaaaaaagaggaggagagacaagaagctttgaggcaacaggaggaggagaggaaggccaagcatgccagaatggaggccgagagggaaaaagttcggcagcagatccgggataaatatggcctcaaaaaaaaagaagaaaaagaagcagaagagaaagcagccctcgagcagccatgcgaagggtcccttacccggccgaaaaaagctattccggccgggtgtggcgacgaagaggaggagtag

SEQ ID NO: 183738 - DNA, 360 bp, synthetic construct
  misc_feature 1..360: note = Description of Artificial Sequence: Synthetic coding sequence
  source 1..360: mol_type = other DNA
atggacttcgtgatgaagcaggccctgggcggcgccaccaaggacatgggtaagatgcttggcggggaagaagaaaaggacccagatgcccagaaaaaagaagaggaacgccaggaagcactccgccagcaggaggaagagcggaaggccaaacatgcaagaatggaggccgaaagagaaaaggtgcggcaacaaatccgggacaaatacggcctcaaaaagaaggaagagaaggaggccgaggagaaagccgctcttgaacagccatgcgaaggatcgcttacaaggcccaaaaaggccatcccggccgggtgtggggatgaggaagaagaggaggaagagtctatactcgacacctag

SEQ ID NO: 183739 - DNA, 114 bp, synthetic construct
  misc_feature 1..114: note = Description of Artificial Sequence: Synthetic coding sequence
  source 1..114: mol_type = other DNA
atggacttcgtgatgaagcaggccctgggcggcgccaccaaggacatgggtaaaatgcttggcggcgaggaggagaaagacccagatgctcaaaagaaagaagaagagcgatag

SEQ ID NO: 183740 - DNA, 405 bp, synthetic construct
  misc_feature 1..405: note = Description of Artificial Sequence: Synthetic coding sequence
  source 1..405: mol_type = other DNA
atggacttcgtgatgaagcaggccctgggcggcgccaccaaggacatggggaagatgttggggggggaggaagagaaggatccggacgctcaaaagaaggaggaggaaagacaggaagccctgcgccagcaagaggaggaacgcaaggccaagcatgcacgcatggaggccgagcgggaaaaggtgaggcagcagataagggacaaatacgggctgaagaaaaaagaagagaaagaagcagaagaaaaagccgccttggaacaaccatgcgagggctctctgaccagaccgaaaaaagccatacctgccggctgcggggatgaggaggaggaggaggaggaatccattctggatacagtgttgaaatatttacctggccctttgcaggacatgtttaaaaaatag

SEQ ID NO: 183741 - DNA, 21 bp, synthetic construct
  misc_feature 1..21: note = Description of Artificial Sequence: Synthetic coding sequence
  source 1..21: mol_type = other DNA
atggacttcgtgatgaagtag

SEQ ID NO: 183742 - DNA, 2943 bp, synthetic construct
  misc_feature 1..2943: note = Description of Artificial Sequence: Synthetic coding sequence
  source 1..2943: mol_type = other DNA
atggccaccgccgccaccagccccgccctgaagcggctggacctgagagacccagctgctcttttcgaaacccacggagccgaagagattcgaggactcgaacgacaagtacgcgctgagatcgagcacaagaaggaggagttaaggcagatggtgggtgagcgctatagggatctgattgaggccgctgacaccatcggacaaatgcggcggtgtgccgtgggccttgtggacgctgttaaggcaaccgatcagtattgtgcgcgcttgcggcaggccgggtctgccgcgccacgtcccccccgagctcagcagccccaacagcccagccaggagaagttctactctatggcagcacagataaaacttctgctagagatccctgagaagatttggtccagtatggaagcctcccaatgtttacacgcaacgcaactgtatctgctgtgctgccatttgcacagccttcttcagctggacagtagttcttctaggtacagcccagtgctttctcggtttccgattctcatcagacaggtggccgccgcctcgcactttcggtctactatcctgcacgaatctaagatgctgctaaagtgtcaaggcgttagcgaccaggccgtggctgaagctttatgctccatcatgctacttgaagagagttctcctaggcaagcgttgacggatttcttacttgccagaaaggccactatccaaaagctgctcaatcagccccatcacggcgccgggatcaaagcacagatctgctcgttggttgagctgctcgcaactaccctcaagcaggcccacgccctcttttatacactccctgaaggcctactacctgaccccgcactgccttgtgggctgctgttcagtaccctagaaaccatcactgggcagcatccagctggcaagggcactggggtcctccaagaggaaatgaaactatgctcctggttcaaacacttgccagcaagcatcgtcgagtttcagccaacacttagaactctggcgcacccaattagtcaggaatacttaaaggatacactacagaagtggatccacatgtgcaatgaagacataaaaaacggaataactaatctgctgatgtatgtgaaaagcatgaaagggcttgcgggaattagagacgcaatgtgggagctgttgacgaacgaaagtaccaatcacagttgggacgtgctgtgtcgaaggctgctcgagaagccccttcttttttgggaggacatgatgcaacagctgtttctcgacagattacagaccttgaccaaggagggatttgatagcatctcctcatcatcaaaagaactgcttgtctccgcactccaggaacttgagagttccacctctaatagccccagtaacaaacatattcacttcgagtataatatgagtttgttcctgtggagtgaaagccccaatgacctgcccagcgacgctgcttgggtaagtgtcgccaacaggggacaatttgccagctccggcctgagcatgaaagcccaggccatcagcccatgtgtccaaaacttctgtagcgccctggactctaaactcaaggtcaaacttgacgatcttctggcatacctgccatcagatgacagttctttgcccaaggatgtatctccaacccaggcaaaaagctccgcgttcgatagatacgctgatgccggaactgttcaggagatgctacgcacgcagtcggttgcgtgtatcaagcatatcgtggattgtatcagagctgaactgcagagcatcgaggagggcgtccagggacagcaggatgctcttaacagtgctaaactccacagtgttctgtttatggcacgtctctgccagagcctgggagagctgtgcccccatctgaagcagtgcatcctgggaaagtcagagtctagcgagaagccggccagggaatttcgcgctcttcggaaacagggcaaggtcaagactcaagagatcatccctacccaggccaaatggcaagaggtaaaggaggtcttacttcagcagagcgtgatgggttaccaggtgtggtcctccgccgtggtcaaagtgctcatccacggcttcacgcagtcgctgctgctcgacgacgccggctcggtgctggcgacagccacctcttgggacgaattggagatacaggaggaggcagaatcgggcagcagtgtgaccagcaaaatccgactgcctgcccagcccagttggtatgttcaaagcttcctcttcagcctgtgtcaggaaatcaaccgagttggaggccatgctcttccaaaagtgactctgcaagaaatgctgaaaagctgtatggtgcaggtcgtcgctgcttacgaaaagcttagcgaggagaagcagatcaagaaagagggggccttcccagtgacgcagaatcgggccctccaactcctctatgatttgagatacctgaacattgtgttgaccgcgaagggggatgaggtgaagagcggcaggagtaagcccgactcaaggatcgagaaagtgactgatcatctcgaagccttaatcgatccctttgatctggatgttttcacccctcatcttaacagtaaccttcaccgcctcgtgcaacggacaagtgtactgttcgggctcgttacaggcacggaaaaccagttggctccacggtctagcactttcaattcccaggaaccccataatatcctgccactggcatcctctcagattagattcggcttactcccccttagcatgacctctacccggaaggccaaaagtacgcggaatattgagaccaaagcccaagttgtgcctcccgccagatctactgcaggggacccgacagtacccggcagtctctttcggcagcttgtatccgaagaagataacactagcgctccttctctctttaaacttggatggctgtcgtcgatgaccaagtag

SEQ ID NO: 183743 - DNA, 2823 bp, synthetic construct
  misc_feature 1..2823: note = Description of Artificial Sequence: Synthetic coding sequence
  source 1..2823: mol_type = other DNA
atggccaccgccgccaccagccccgccctgaagcggctggacctgcgggacccagccgcgttattcgagacacacggggccgaagagatccgggggctcgagagacaagtccgggctgaaattgaacataaaaaggaggagctgaggcagatggtcggggagaggtatcgggatttgatcgaggcggcagacaccatcggccagatgagacgatgtgctgtcgggctggtggacgcggtcaaagcgacggatcagtactgcgcgagacttcgtcaggcgggtagcgccgctccccgaccccctcgcgcccaacagcctcagcagccctcccaggagaagttttactccatggccgcacagatcaagctactcctcgagatcccagagaagatttggagttctatggaggcttcccagtgcctccatgctacccagctttatttgctatgttgccacctacattccttacttcaactggacagtagctcttccagatactctcctgtgctctctagatttcctattttaatcagacaggttgccgccgcctctcatttccgcagtacaattttacatgagtctaaaatgttactgaaatgtcaaggcgtgagcgaccaagcagtcgcagaagccctttgcagcattatgctgctggaagagtctagcccccggcaggcacttacagacttcctgttggccaggaaagccacaattcagaagctgctcaaccaaccccatcacggggccgggattaaagcccagatctgcagtctggtggaattgttagccaccaccctaaagcaggcacatgctctgttctacactttaccggagggcctcctcccagaccccgcactcccctgcggcctgcttttttccacactcgaaactattacagggcagcatccggcaggaaagggtactggcgtcttgcaggaggaaatgaagctgtgtagctggtttaaacacttgcccgctagcatcgttgagttccagcccaccctgagaaccctggcccacccaattagccaagagtatctgaaagatactttgcaaaaatggatccacatgtgcaacgaagacattaaaaatggaatcaccaacctgctgatgtatgtgaagagtatgaaaggactagcgggcatccgggatgccatgtgggagttgcttaccaatgagtcgacaaaccacagttgggacgtgctctgccgtagattactagagaagcccctgctgttctgggaggatatgatgcaacagctctttttagacagactccagacactgaccaaagagggatttgatagcatcagctcatcttccaaggaactcctcgtgagtgcgctacaggaactggagagttccacaagcaacagcccctcaaataaacacatccacttcgagtacaacatgtctctctttctctggagtgagagtcccaatgacctgccctctgacgcagcctgggtgtcagtggctaacagagggcagttcgccagcagtggcctgtcaatgaaagctcaggctatatccccgtgtgtgcagaacttttgctccgccctcgactcaaaactaaaggtaaaactggacgatctcctcgcgtaccttccaagtgacgattccagcctgcccaaagacgtcagccctactcaggccaaatcaagcgcgtttgatagatatgccgatgccgggacggtgcaggagatgctgcgaacacagtctgtggcatgcatcaaacatatcgtagattgtattcgagcagagctccagtccatcgaggaaggggtccagggacagcaggatgcgcttaactccgcaaaactgcactctgtgctgtttatggcccgtctgtgccaatctctgggcgagctctgtcctcacctgaagcagtgtatcctaggaaagtccgagtcatccgaaaaaccagccagagaattccgcgccttgcgtaagcagggcaaagtcaagactcaggaaattatccccacacaggcaaagtggcaggaagtgaaggaggtgctgctgcagcaatctgttatgggatatcaggtgtggtccagtgccgttgtgaaagtcctcatacacggattcacacagtctctactcctggacgatgcaggatctgtccttgccacagctactagctgggacgagttggagattcaggaagaagctgaatctggctcttcagtgactagtaaaatccggttaccggcacagccatcctggtatgtgcagtccttcctgttcagcttgtgtcaggaaatcaaccgggtcggcggccatgcgctcccaaaggtgactttgcaagagatgctgaaatcatgcatggtgcaggttgtagccgcttacgaaaagctgagtgaggaaaagcaaatcaagaaggaaggcgcctttccagtaacacagaatagagccctacagttgctttacgatctccgctaccttaatatcgtgctgaccgccaaaggggacgaggtcaaaagcggaagaagtaagcctgattctcggatcgaaaaagtcacagatcacctcgaggcactgatcgaccctttcgacctggacgtgtttacacctcacctaaattcaaacctccatagactcgtgcaacgcacgagtgttctctttggcctagtgacaggcacagagaaccagctggcacctcgtagctcaacatttaattctcaggagccccataatatcctgcctcttgcatcatcacagattcggttcggactgctacccctgtccatgactagcacgcgcaaagcaaaatcaacaaggaatatagagactaaagcccagtatgacgccaattgttag

SEQ ID NO: 183744 - DNA, 2214 bp, synthetic construct
  misc_feature 1..2214: note = Description of Artificial Sequence: Synthetic coding sequence
  source 1..2214: mol_type = other DNA
atggagaagagccggatgaacctgcccaagggccccgacaccctgtgcttcgataaggacgaatttatgaaggaggactttgatgtcgaccatttcgtgtccgattgtcgcaagcgagtgcagctggaggagttgcgcgatgatctcgagctctactacaagctgctcaagactgcaatggtggagctcatcaacaaggattatgccgatttcgtaaatctaagcactaatctcgtgggaatggataaggccttaaatcagttgtctgttcctctgggtcagcttagggaagaagtgctcagtttgcgaagtagcgtcagcgaggggattcgcgctgtggatgagagaatgtccaagcaagaggatatacggaagaagaagatgtgcgtgctacgccttattcaggttattaggtccgtggaaaaaattgaaaagatactgaactctcagagctctaaagagactagtgcccttgaagcctcttctccattgttgaccggacagattctggagagaattgccaccgagttcaatcagctccaatttcatgccgttcaaagcaaaggcatgcccctgctcgataaggtcagaccaagaattgcaggtattacggctatgctgcagcagtccctagagggtctgctgctggaggggctccagacatctgacgtagacataatccgacattgccttcgtacatatgcaacgatcgacaagacaagggatgccgaagccctggttgggcaggtcctcgtgaagccttacatcgacgaggttataatcgagcagtttgtagaatcacatcccaacggactccaggttatgtataacaaattgctcgaattcgttccccatcactgtcgcctgttacgcgaagtgacaggcggcgcgatatcctctgaaaagggcaataccgtacccggttacgactttctcgtgaactctgtgtggccccagatagttcagggcctggaggaaaagctgccgagtctgttcaaccccggaaatcccgacgcgttccacgaaaagtatacgatctccatggatttcgtgcggcgattggagcgacaatgtggttcccaggcaagcgtgaagaggctgcgtgcgcatcctgcctaccattcattcaacaagaaatggaatctacctgtgtattttcagatcaggtttcgggaaattgctgggtcattagaggcggctctcactgatgttcttgaagacgccccggccgagtcgccctactgcctgctggcctctcatagaacgtggtcctccctgaggaggtgttggtccgatgaaatgttcctgcctctgctggtgcatcggctctggagactaacactgcagatccttgctagatacagtgtcttcgtcaatgaactctctctgaggcccatctctaacgaatcaccgaaagaaatcaaaaagccactggtgactgggtctaaggagcccagcattactcaagggaacactgaagatcaggggtccggaccgtctgagactaagcccgtcgtgtccatttctaggacgcaactggtgtatgtggttgccgacctggataagctccaggagcagctgcctgagcttctggagatcattaaaccaaagctcgagatgattggcttcaaaaatttctcatcaatttctgccctggaggatagccagagtagtttttctgcgtgtgtgccctcgctgtctagtaagattattcaagacctctcagatagttgttttgggttcttgaaaagcgccctggaagtgcccaggttataccgtcggaccaataaggaggtgccaactaccgccagctcctatgttgatagtgcactcaagccgctcttccagctacagtcagggcataaagacaagctgaagcaagctattattcaacaatggctggaggggacactgagtgagtcaacccataagtattacgagaccgtgtccgatgtactaaattcagtgaaaaaaatggaagagtcccttaagcggctcaaacaggccaggaaaaccaccccagctaaccctgttggcccatcaggaggcatgtcggacgacgataagatccggctgcagctggccctcgacgtggagtatctgggagaacagatccagaaactgggactgcaggcaagcgatatcaaaagcttctccgcattggccgaacttgtggccgctgccaaagaccaggccacagcggagcagccttag

SEQ ID NO: 183745 - DNA, 2217 bp, synthetic construct
  misc_feature 1..2217: note = Description of Artificial Sequence: Synthetic coding sequence
  source 1..2217: mol_type = other DNA
atggagaagagccggatgaacctgcccaagggccccgacaccctgtgctttgataaggacgaatttatgaaagaggattttgacgttgatcattttgtttcggactgtcgcaaaagggtgcagctggaagaattacgggatgacctagaattgtactacaagctgctaaagactgcaatggttgaactgattaacaaggattatgccgatttcgttaacctgagtaccaacctcgttgggatggacaaggccctcaatcagttgtctgtccctctgggacagctacgcgaagaggtgttgtccctgagaagctcagtgtctgaagggatccgcgccgtggatgaacgtatgtcaaagcaggaggacataagaaaaaaaaagatgtgtgtccttaggctcatccaggtgatccgcagcgtggagaaaattgaaaagatcctgaactctcagagttccaaagagacatctgcactggaggccagtagtcccctactcactggacagattctggagcgcattgccactgagtttaaccagctacagtttcacgcagtccaatcaaagggcatgcctctgcttgacaaagtgaggccaaggatcgccggcatcaccgccatgctgcagcagtctctcgaaggcttgttgctggagggactgcagacaagtgatgtcgatatcattcggcactgtctgcgcacttatgctacgattgataagaccagagacgcagaggcactggtggggcaagtgctagttaagccttacattgacgaagtcattatcgagcagttcgtcgagagtcaccctaatggattacaggtcatgtataacaagctgctggagttcgtgccgcaccactgtcggctgctgcgggaggtgaccggcggcgccattagctcagagaaagggaacaccgtcccaggctacgatttcctggtgaactcagtgtggccccagatcgttcaggggctcgaagagaagctgccatccctttttaaccccggcaatcccgatgcctttcatgagaagtataccatttcaatggactttgttcggaggctggagagacagtgtggctctcaagccagcgtgaaaaggctccgcgctcatcctgcctatcactccttcaataagaaatggaaccttccagtgtactttcagatccgcttccgagaaatcgctgggtctctggaggctgccctaacagacgttctcgaggacgcgcccgcagagtcaccttattgccttcttgcaagtcaccgcacatggagcagccttcggcggtgctggagcgacgaaatgttcttgcctctactagttcatagactctggcggttaactctgcagatcttggctcgctatagcgtattcgtgaatgagctctcactgaggccgataagcaatgaatcgcccaaggagataaagaagccactggtgacaggcagtaaagagccgtctatcacacagggcaacacagaggaccagggctccggaccttctgaaaccaagcctgtggtgtccatatccagaactcaactggtgtacgtcgtagccgatctggataagctgcaggagcaactgccagaactattggagatcattaaacctaaactggaaatgattggatttaagaacttttcctctatcagcgcagccctagaggactctcagtcttctttcagtgcttgcgtcccgtcgctgtcctccaagatcattcaggacctgtccgacagttgctttggctttctcaagagtgctctggaggttcccagactataccggcgaacgaacaaagaggttccgacgactgccagtagctatgtcgactcggcactgaagccactgtttcagttacagtcaggccataaggacaagttgaaacaggccataatacagcagtggcttgaaggcactctatctgaaagcactcataaatattacgaaacggtttctgacgtgctcaattctgtgaagaagatggaggaatcactcaaacggttgaagcaggcacgtaaaactacacctgcaaaccctgttggccccagcgggggcatgagcgacgatgataaaatcagactgcagctcgcccttgacgtggagtaccttggagagcagatccagaaactgggcctacaggcctcagacattaagtctttctccgctttggccgaactggttgctgccgctaaggatcaagctacagcagagcagccctag

SEQ ID NO: 183746 - DNA, 2040 bp, synthetic construct
  misc_feature 1..2040: note = Description of Artificial Sequence: Synthetic coding sequence
  source 1..2040: mol_type = other DNA
atggtggagctgatcaacaaggactacgccgacttcgtgaacctgagtaccaatttggtgggcatggacaaggcactaaatcagctgtctgtgcctctgggacaactccgggaagaggtgctgagcctgagatcttctgtatcagaggggatcagagcagtggatgaaaggatgagtaagcaagaagatattaggaagaagaaaatgtgtgtgctaagactgatacaggtgatccgtagtgtggagaaaatcgaaaagatcctgaatagtcaatcttccaaagaaacctcggccctggaagcaagcagtcccctgcttacaggtcaaattcttgaaagaattgctactgagttcaaccagctccaatttcatgctgttcagagtaaaggcatgcctttactggataaagttaggccacgcattgcaggtattacagctatgctccagcagtctctcgagggcttgctcctagaggggctgcagacctcagatgttgatataatcaggcattgcttgcggacttacgctaccatcgataaaacccgtgacgccgaggccctcgtgggacaggtactggtgaaaccttacattgacgaggtaattatcgagcagttcgtggagtcacacccaaatggcctgcaggtgatgtacaataagctcctggagttcgtcccccatcattgccgcctgctgagggaggtcaccgggggagctatcagcagcgaaaagggcaacaccgtacctggctacgacttccttgtgaattctgtgtggccgcagattgttcaaggacttgaagaaaagctgcctagtctcttcaatcctgggaatcctgatgccttccacgaaaagtatacaattagtatggatttcgtccgcagactcgagcgacagtgcgggtctcaggcctctgttaaaaggctcagagcccatcccgcctatcatagtttcaataaaaaatggaatctgccggtctacttccagatccggttccgcgagatcgcaggttccttggaagccgcgttgaccgatgtcctggaggacgcccctgcagaaagcccttactgcttactggcttctcatcgtacttggtcctctctgagacggtgttggtcagacgagatgttcttgccgctattagtacatcgattgtggcgactgactttacagattctagcccggtacagtgtgtttgtgaacgaattgtctctgagacccatctcaaatgagtcccccaaggaaatcaaaaaaccccttgtaactggatctaaggaaccgagtattacccaagggaacacagaggaccaggggtcggggcccagcgagactaaaccggtggtttccattagccgcacccagttggtgtatgtggttgctgacctcgacaagctccaagagcagctgcctgaactcctggagattatcaaacccaagctggaaatgataggatttaaaaacttctctagcatatcggccgccttagaagacagccagagttccttttcagcttgcgtaccttctctctctagcaaaatcatccaggacctgtccgactcttgtttcggattccttaagtctgcgctggaggttcctcgcttatatcgccggaccaacaaggaagtcccaacaacagcttcatcttacgttgatagcgctctgaagcccctgttccaattgcagtccggtcacaaggataaactgaaacaggccatcatccaacaatggctggagggaacactgagcgaatcaacccacaagtattacgaaactgtctctgatgtcctcaatagcgtaaagaagatggaggagagcttgaaaaggttgaaacaggccagaaaaacaactcctgcaaatcctgtgggaccgtccggtgggatgtcagatgacgataagatcaggctgcagctagccttggatgtggagtacttaggcgagcaaatccagaagctggggctgcaggccagtgatatcaaaagctttagcgccttggcagaactcgtcgccgctgctaaggatcaggctactgcagaacagccctag

SEQ ID NO: 183747 - DNA, 1869 bp, synthetic construct
  misc_feature 1..1869: note = Description of Artificial Sequence: Synthetic coding sequence
  source 1..1869: mol_type = other DNA
atgagcaagcaggaggacatccggaagaagaagatgtgcgtgctgcgcctaatccaggtcatccgatccgtcgaaaaaattgagaaaatccttaacagccagtccagcaaggaaacgtccgcactggaagcatcaagccctttgctcaccggccagatattagaacgaatcgccaccgaattcaatcaattgcagtttcacgccgtacagtcaaagggcatgccgctgctggacaaggtgcggccccgtatcgcaggcatcacagcgatgctgcagcagagcctggaaggtctgctcctggaaggtctgcagacaagcgatgtcgacattatccgccactgtctccgaacttacgcaacgatcgacaagacccgcgatgcagaggcgttggttggccaggtgctggtgaagccttacattgatgaggtcataatagaacaattcgtggaaagccatcccaacggcttgcaggtgatgtataacaagctactcgagttcgtgccgcaccactgccggcttttgagggaagtgaccggaggcgccattagctcagagaaaggcaataccgttcccggctatgacttcctggtaaacagtgtgtggccacagattgtgcagggactggaagaaaagctgccctccctctttaatccggggaaccctgacgctttccacgaaaagtatactatctccatggactttgtgaggcgcctggagcgccagtgtggctcccaggcttcagtaaagcgcctccgagcgcaccctgcatatcactcgtttaacaagaagtggaatctgccagtgtatttccagatacggttcagggagatcgcaggatctctggaggccgccctcaccgatgtacttgaggacgcccccgccgaatctccctactgtctgctcgcctcccaccggacatggagcagtttgaggagatgttggtcagacgaaatgtttctgccattattagtccaccgactgtggaggctaacgctccagatcttagctcggtatagtgtgtttgtaaacgagctgtcactccggccaatatctaatgaaagcccaaaggaaattaaaaagcctctcgttacagggtccaaggaaccttcaattactcagggaaatacagaagaccagggcagcggaccctccgaaacgaaacccgtcgtttccatttctagaacccagctggtatatgtcgtggccgacctggataaactccaggagcagcttccggaacttctggagattattaaacctaagctggaaatgattggtttcaaaaatttctcgagcatttccgccgcactcgaagactctcagagttcattttccgcctgcgtgccctcgctttcttccaagataatacaggacctgtccgactcctgtttcggcttcttgaagagcgcactggaggtaccgcgactctaccgccgcaccaacaaagaggtgccaaccacagcatctagctacgtcgactcagctttaaaacctctgttccagcttcagtccgggcataaagataaattgaagcaggcaatcatccagcaatggctggaggggacgctttcggagagcacgcataagtattatgagacggtctccgacgtcttaaacagcgtgaagaagatggaggaatccctcaaacggctgaagcaagcccggaaaacgacgcccgccaatccagtaggccctagcgggggtatgagtgatgacgataaaatacgactgcaattagccctggacgtagaatatctgggtgagcagatccaaaaacttggtctccaggctagtgacattaaaagcttcagtgcgttggctgaactcgttgccgctgccaaagaccaggccaccgcagagcagccatag

SEQ ID NO: 183748 - DNA, 1284 bp, synthetic construct
  misc_feature 1..1284: note = Description of Artificial Sequence: Synthetic coding sequence
  source 1..1284: mol_type = other DNA
atgggcttcgccatggaggacaccgaggacatcagccagaaccacttcgggcatctgtgtatatttaaatggggacattggaagaaggatctgaagtacacgatctcaatggatttcgtgagaaggctcgagaggcagtgtgggtcccaggcctctgtcaagaggctgagagcccatccagcataccactccttcaacaaaaagtggaatcttcctgtgtacttccagatccgattcagagagattgccggaagcctggaggcggcccttactgacgtcctggaagatgcgcctgccgaatctccatactgtctgctggcctctcaccgtacttggtcatcccttcgcagatgttggtcagacgaaatgtttctgcccttactggtccaccgcctgtggagattgaccttgcagattctagctcgctattcagtattcgtgaacgagctgtccctgagacccatttccaacgaatcccccaaggaaattaaaaagcctttagtgacggggtctaaggagcccagtataacacagggcaatactgaggatcaggggtccggaccctcggaaaccaagcccgtagtctccattagtaggacacagctggtatatgtggtggctgacttagacaaattacaggagcagctcccggagctgctcgaaattattaagccaaaattggagatgatcggcttcaagaatttcagctctatctcagccgcccttgaagattcacaatcctccttctctgcctgtgttccaagtctcagcagtaaaatcatccaggatctgtctgactcttgctttgggtttttaaaatcagctcttgaagttccgcggctgtataggagaaccaacaaggaggttccaacaacagccagttcctatgtggacagcgcgctgaagccactgtttcagttacagagcggccacaaagacaaactcaagcaggccattattcagcaatggctggaaggaaccctgagcgagagcacccacaagtattatgagacagtgtccgacgtcttgaactcagtaaagaaaatggaggagagcctcaagcgactgaagcaggctcggaaaacaactcctgctaatcctgtcggcccatccggcggcatgtcggatgacgataagattcgtctgcagcttgccctggacgtggaatatttgggcgaacagatccaaaagctggggttacaggcatccgacattaagtcattctccgccctggctgagctggtagcggctgccaaggatcaggctaccgccgagcagccgtag

SEQ ID NO: 183749 - DNA, 2487 bp, synthetic construct
  misc_feature 1..2487: note = Description of Artificial Sequence: Synthetic coding sequence
  source 1..2487: mol_type = other DNA
atggccgaggccgccctgctgctgctgcccgaggccgccgccgagagggacgctcgggaaaaactggccttgtgggacagaaggccagacacaactgccccgttaacggaccgccagaccgatagcgtgctggagcttaaggcagccgcagagaatcttcctgtccccgcagaactcccaatagaagatctgtgtagccttacttcacaatctctgcctattgaattaacttctgtggtgccagagtcaacagaggatatccttcttaaaggcttcaccagcctggggatggaggaagaacgcattgagacagctcagcagtttttttcatggttcgctaaactgcagacacagatggaccaggacgaaggcacgaaatatcgacaaatgcgcgactacctttcgggattccaggagcagtgcgacgctatcctgaacgatgtgaattctgctctgcagcacctggaaagcctgcagaagcagtacttattcgtttccaataaaaccggcactctgcacgaagcatgcgagcaacttttaaaggagcagagcgagcttgtcgatctagcagagaatatccagcagaagctctcgtattttaatgaattggaaaccattaacacaaaactgaactctccaaccctctccgtaaatagcgatggatttataccgatgttggccaagttagacgattgcatcacgtatattagcagccacccgaatttcaaagactaccccatctacctgcttaaattcaagcagtgtttgagcaaggcactgcatctaatgaaaacatatacagtgaatactctccagacactaactagccagttgctgaagcgtgacccctcatcagtccctaacgcggacaatgcattcacactgttctacgtaaagttccgggctgctgcgcctaaagtgcgtaccctgatagagcagattgagctgcggtccgagaagatcccagagtaccaacaactcctcaacgacattcatcaatgctatctcgaccagagggagctgctgctgggacccagcatcgcatgtactgttgcagaacttactagtcagaacaaccgtgaccactgcgccctggtgcgttcaggctgcgcgtttatggttcacgtctgtcaggatgaacaccagctatataatgagttctttacgaagccaactagtaagctggacgagctgctcgagaagttgtgtgtatctctctacgacgtcttccgacctctgattatccacgtgattcatctggaaacactttccgagctctgtgggatactgaaaaacgaggttcttgaggatcatgtccagaacaacgcggaacagctgggtgcattcgccgccggcgttaagcagatgctcgaggacgtacaagaacgactggtgtaccgcacgcacatctacatccagacggacatcacgggctacaagccggcgcctggcgacctggcttaccctgacaagctggttatgatggagcagattgctcaatcactgaaagacgaacagaaaaaagtgccctccgaggcttcatttagcgacgtgcacctggaggaaggggagtccaattctctgacaaaatccggctcaactgaaagcctgaaccctcgccctcaaaccacgatctcgcccgccgacttacatggcatgtggtacccaactgtgaggcgaactctggtgtgtttgtccaagctgtatcgttgcattgaccgcgcagtctttcagggtctgtcccaagaggctctgtctgcatgcatacagtcattactgggggcctcagagagcatctcgaaaaataaaactcagatagatggacagctcttcctgattaagcacctcctgattctcagggagcagatcgccccatttcataccgagtttaccatcaaggagatctccctagacttaaagaagactcgagacgcagctttcaagatcctgaaccctatgactgttcctcgtttcttcagattgaactccaataacgctctgatcgaattcttgctggaaggtactccagaaattcgagagcactacctggattcgaagaaagacgtagaccgccacttaaaatctgcctgtgagcagtttatccagcaacaaacaaaactgttcgtagagcagctcgaggaattcatgaccaaggtcagcgccctgaagaccatggcgagccagggtgggcccaagtataccctttctcagcagccgtgggcccaacctgctaaagtcaacgacctagccgctacagcttacaagaccattaaaactaagctacccgtcactctcagatcaatgtcattgtacttatctaataaggatacagaatttattttattcaagcccgtgagaaataacattcaacaggtttttcaaaagttccatgcgctcctgaaggaggagttttctcccgaagacattcagatcatagcttgtccctctatggagcagctgagtctactcctccttgtgtccaagtag

SEQ ID NO: 183750 - DNA, 2370 bp, synthetic construct
  misc_feature 1..2370: note = Description of Artificial Sequence: Synthetic coding sequence
  source 1..2370: mol_type = other DNA
atgggcaccaagatggccgacctggacagcccccccaagctgagcggagtacagcagccaagtgagggagtggggggcggccgctgctccgaaattagtgcggaactgattaggagcctgacagagttgcaggaattggaagctgtatacgaacgactttgcggcgaagaaaaagtcgtagagcgggagctggacgccttactggaacagcagaataccatagagagtaagatggtgaccttacaccggatgggtcccaaccttcagttaatcgaaggcgacgccaagcaactggcagggatgatcacgtttacatgcaatctggccgagaacgtgtcttctaaagtcagacagttggatcttgcaaagaacagactgtaccaggcgattcagcgcgcggatgatattttagacctgaagttctgcatggatggggttcaaactgctctgcgatcagaagactatgaacaggccgccgcacacacacaccggtatctgtgtttagataagtctgtcatcgaactgtcccggcaaggtaaagagggatccatgattgacgcaaacttgaagctcctgcaggaagcggaacagaggctgaaggccattgtggccgaaaagttcgcgattgcaacaaaggagggagatctgccacaggtcgaaagattcttcaagatctttccgttgttaggactccatgaggaaggcctcagaaagttttcggagtacttgtgcaaacaggtcgcctcaaaggcggaagagaacctcctcatggttctcgggacggatatgtctgacaggcgcgccgcagtgatcttcgccgacaccctgacactgttgtttgaagggattgctaggattgtggaaacgcatcagcccatagtggaaacatactacggccccggccgactgtacacactgattaagtacctgcaggtggaatgtgatcgccaagtagagaaagtcgtggacaagttcatcaagcagcgggattaccaccaacaattcaggcatgtgcaaaacaatctgatgcgaaacagtactaccgagaagattgaaccccgggagctcgatcctattttgactgaggtgactctaatgaacgcccgtagcgaactgtatctgcgatttctcaaaaagcgcatcagttccgactttgaggtgggcgatagcatggccagcgaagaagtcaagcaggagcatcagaagtgcctggacaagctgctcaacaattgccttctatcatgcactatgcaggagctgattggcctgtacgtgaccatggaagagtactttatgcgggaaactgtgaacaaggctgtcgctctcgacacctatgaaaaagggcagctgacatcttccatggtagacgatgtgttttatatcgtcaagaagtgcatcgggcgagccctaagtagttccagtattgactgtctttgtgcaatgattaatctcgccaccactgaactggagtcagacttccgggatgttctgtgcaataaattacgcatgggctttcccgctactactttccaggatatccagcggggtgtgacatcagcagtgaatattatgcatagttccttgcaacagggcaaatttgacacaaaaggaatagagtcaacagatgaagcgaagatgagcttcttggttaccttgaacaatgtggaagtttgctcagagaatatcagtaccttgaaaaagactctggaatccgattgcaccaaactgttttcccagggtattgggggcgaacaggctcaggccaagtttgattcgtgtttgtccgacctggccgccgtgtcaaataaatttcgagatctcctccaggagggcctgactgagctcaacagcactgccatcaagccacaagtgcaaccctggatcaacagcttcttcagcgtttcacataatattgaagaggaggagtttaacgactatgaggcgaatgatccctgggtgcagcagtttattctgaatctggaacagcagatggctgaattcaaggcttcgctgtcgcctgtcatatatgacagcctgactggcctgatgacgagcctggtggctgtcgaacttgaaaaggtcgtgttgaaatccaccttcaatcgactgggcgggctgcagttcgacaaggaactgaggtctctgattgcctacctgactaccgtgacaacatggactatccgagataagtttgcacgtctctcccaaatggccacaatcctgaacttagaaagagtcaccgaaatacttgactactggggacccaacagcggccccttgacatggcgcctcaccccagctgaagtaagacaagtgctggccctgcggattgatttcagatccgaggacattaaacggcttagactctag

SEQ ID NO: 183751 - DNA, 2295 bp, synthetic construct
  misc_feature 1..2295: note = Description of Artificial Sequence: Synthetic coding sequence
  source 1..2295: mol_type = other DNA
atggccgacctggacagcccccccaagctgagcggcgtgcagcagccatcagagggagtggggggcggacgctgctccgagatctccgcagagctcatccgatcactgactgaactccaggagctggaggctgtgtacgagcgactctgcggcgaggagaaggtggtggaaagagaattggacgccctgttggagcagcagaacacgatcgaaagtaagatggtaaccctccatcgaatgggacctaacctccagctgatcgagggcgacgcaaagcagttggcagggatgattactttcacctgtaatctagcggagaacgtatcaagcaaagttcggcagttagatttggccaagaatcgtttgtaccaggcaatccagcgcgccgatgatatcctggacctgaagttttgcatggatggggtgcagacagccctccgttctgaagattatgaacaagcagcagcccacacacatcggtatctctgtcttgacaaatcggtgatcgaactgagtaggcagggcaaagaggggtcaatgattgatgctaacctgaagttgctgcaggaggcagagcagcggcttaaggccattgtcgcggaaaaattcgcaatcgcgaccaaagagggggatctgccccaggtggagcgcttttttaagatctttccactgcttggtcttcacgaggagggactacgcaagttcagcgagtatctctgtaaacaggtagctagtaaggccgaggagaacttgctaatggtgctcggaaccgacatgtctgaccgaagagctgccgtgatttttgctgatactttaactcttctctttgaaggcattgcccgaatagtggagacccaccagcctatcgtggagacctactacgggccaggacggctctatacccttataaagtatttgcaggtggagtgcgatcggcaggtggagaaagtcgttgataagttcattaagcagagggattaccatcagcagtttcgacatgtccagaataacctcatgcgaaattctaccaccgaaaagatagaaccccgggagttggatcctattctgacggaggtaaccctgatgaatgcgcgctccgagctatacctgagatttctgaaaaagcggatctccagcgattttgaggttggggacagcatggcctccgaggaggtcaagcaagagcaccagaaatgcctcgataaactgttgaacaattgccttctcagctgtactatgcaagagctgatcgggctatacgtcactatggaggagtactttatgcgggagacagtgaataaggccgtggctcttgatacctacgaaaagggacagcttactagcagcatggtcgatgacgtgttttacatcgtgaagaagtgcatcggtcgcgcgttgagcagctcatcgattgactgtctgtgtgctatgatcaatttagcgactaccgagctggaatcagactttcgagatgtactgtgcaacaagctgaggatgggctttccggctacaacattccaggacattcagcggggagtcaccagcgccgttaacatcatgcattcctctttacaacagggtaaatttgacaccaaaggcatagagtccactgacgaggccaaaatgtcatttttgtccgactgtacgaagctctttagccaagggattggcggggagcaggcacaggccaaattcgactcctgccttagcgacctggctgcagtatccaataagttcagggatctgttacaagaggggctgaccgagctgaattctaccgctatcaaaccgcaggtccagccctggataaatagtttcttctctgtctctcataacatcgaagaggaggagtttaatgactacgaagctaacgatccatgggtgcagcaatttatcctcaatcttgagcagcaaatggccgaattcaaggccagtctcagtccagttatatatgatagtctcacgggtctcatgacctccctggttgccgttgaactggagaaagtcgtgctgaagtccacctttaaccgactgggcgggcttcagttcgacaaggagctccgatccctcattgcatacttaaccactgtcaccacgtggactatcagggataagttcgcacgactaagccagatggcgacgatactcaatctggagcgagttaccgaaatcctggactactggggacctaatagtgggcctctgacatggcgtctgactcctgcagaagtgaggcaggttctagctctcagaatcgactttcgatcagaagatatcaagcgcctccgcttgtag

SEQ ID NO: 183752 - DNA, 1014 bp, synthetic construct
  misc_feature 1..1014: note = Description of Artificial Sequence: Synthetic coding sequence
  source 1..1014: mol_type = other DNA
atggccgacctggacagcccccccaagctgagcggcgtgcagcagccaagcgaaggagtgggaggagggaggtgctctgagatcagtgctgagttgattcggagtcttacagaattgcaagaactggaggctgtgtacgagcgcctgtgtggagaagaaaaagttgtcgagagggagctagatgcacttctggaacagcagaacacgattgagtcaaagatggtgacactccatagaatgggtccaaaccttcagctgatcgagggtgatgcaaaacaactggcgggtatgatcacattcacctgcaatctggccgaaaatgtgagctccaaagtccgacaactggaccttgcaaagaatcgtctatatcaagccatccagcgcgcggacgatattctggacctgaaattctgtatggatggtgttcagacagctcttcgatccgaggactatgagcaggctgctgctcacacacatcgctacttgtgtcttgataagtccgtaattgagctgagccgccaggggaaggagggcagcatgatagatgccaatcttaagttactgcaagaggccgaacagcgcttgaaagccatcgttgccgaaaaattcgccatcgccactaaagagggcgacctaccacaggtcgaacgcttcttcaaaattttcccgctgctggggcttcatgaggaaggattgaggaaattttctgaatacctttgtaagcaagtcgcctccaaggccgaagaaaacctcttaatggttctcgggacggatatgtccgatcggcgggcagcagtcatcttcgctgacaccttgactctgctttttgaggggattgcccggatagtcgaaacccaccagcccattgtcgagacttattatggaccaggtcgtttatacaccctgattaagtacctccaagtggagtgtgacaggcaggtcgagaaagtggtggacaaatttataaagcagcgtgactaccatcaacagaattttgtgtttagttttttttag

SEQ ID NO: 183753 - DNA, 1344 bp, synthetic construct
  misc_feature 1..1344: note = Description of Artificial Sequence: Synthetic coding sequence
  source 1..1344: mol_type = other DNA
atgcggaacagcaccaccgagaagatcgagccccgggagctggaccctatcctaaccgaagtaactctcatgaacgcaagatctgaattgtacctcagatttctgaaaaaacgtatcagttccgatttcgaggtgggagacagtatggcttccgaggaagttaaacaggagcatcagaaatgccttgataagttattgaacaattgtcttctctcctgtactatgcaggagctcatcggcttgtatgtgacaatggaggagtacttcatgagggaaacagtcaacaaagcagttgccctggacacctacgagaagggacagctaacctcttccatggtggatgacgttttttatatcgtaaagaaatgcattggccgtgcactatccagctcctcgattgactgtctgtgtgctatgattaacctcgcaacgaccgaactcgaatcagattttcgtgacgttttatgtaataagcttcgaatgggtttccctgcaaccactttccaggatatccagagaggagtcacctcagccgttaacatcatgcacagcagcctgcagcagggaaagtttgatacaaaaggcatcgagtccactgatgaggctaagatgtcatttcttgtcaccctcaacaatgtcgaagtctgttccgaaaatattagtactctcaaaaagacattagaatctgattgcaccaaacttttcagtcagggcatcgggggggagcaggctcaggccaagttcgattcttgcctctcggatttagcggcagtgagtaacaaatttagggatttgttacaggagggcctaaccgaactgaacagcactgccattaagcctcaagttcaaccgtggatcaactccttttttagcgtgagccataatattgaggaggaggaattcaatgattatgaggctaatgatccttgggtgcagcaatttattctcaacctggaacagcagatggctgagttcaaagcttcactgtcacccgtaatttacgattccttgacgggactgatgacttcgctggtggcagtggaactcgaaaaagtagtgctgaagtccacatttaatcgcttgggaggtctccagtttgacaaggagctgaggtcacttattgcatacctgactacagtcaccacctggacgatccgcgataaattcgcaaggctgtcccagatggcaactatattgaatttagaacgcgttaccgagattttagactactgggggccaaactccggtcctctcacctggagattgacacctgcagaagtacggcaggtgctcgcactgcgaatagactttcgttctgaagatattaagagactgcgtctgtag

SEQ ID NO: 183754 - DNA, 2583 bp, synthetic construct
  misc_feature 1..2583: note = Description of Artificial Sequence: Synthetic coding sequence
  source 1..2583: mol_type = other DNA
atgggctgggtgggcggccggcggcgggacagcgccagcccccccggccgatctaggtccgctgccgacgacatcaatcccgcccccgccaacatggagggggggggtgggagcgtagctgtcgctggtctaggtgctcgaggctccggtgctgccgcagctaccgtgcgcgaactgctgcaggacggatgctacagtgacttcctcaacgaagactttgatgtgaaaacctatacaagccagagcattcatcaggccgtgatcgccgaacaactagccaagctcgcccaaggtatatcccagctggaccgggagctgcatctgcaagttgtggcaagacatgaggacctgctggcacaggccacgggcatagagtcgctggagggcgtgctgcagatgatgcagactcgaatcggcgctttgcaaggggctgttgataggatcaaagcaaaaatcgtcgagccttacaacaagatcgtggcacgcaccgcccaactcgctaggctccaagtcgcatgtgatctcctcaggcggataatcaggattctgaaccttagcaagaggctacaggggcagctgcaggggggatctcgagagattaccaaggcggctcagagtctcaacgaactggattatctctctcaagggattgacctgtccgggatcgaagtgatcgagaatgacctgctgttcatcgccagagccaggttggaggtggaaaaccaagcaaaaagactactcgagcaggggcttgagacccagaatcctacccaggtgggcactgcccttcaggtcttctacaacctgggaaccctcaaagatacaatcacctccgtagtcgacggctactgcgccacgctggaagagaatattaactccgctctggatataaaggtcctgacacaacctagtcagagcgctgtgcggggcggccctggacgcagcactatgccgacacccggcaacactgccgcacttcgagcttccttctggaccaatatggaaaagttaatggaccacatttacgccgtgtgtggccaggtacagcatctacagaaggtattggccaagaagagggacccggtttcacatatatgtttcatcgaagaaatcgtcaaggacggccagcccgagattttctataccttctggaatagcgtcactcaggccctgagttcccaattccatatggcgaccaactcctctatgtttttgaagcaggctttcgaaggcgaatatccaaaactcttacgactttacaatgacctgtggaaaaggctgcagcagtactctcagcatattcagggcaacttcaacgctagcggtacaacagatttatacgtggatcttcaacatatggaggacgacgcgcaggacatatttatcccaaaaaaaccagactatgaccctgagaaggccttgaaggattcactgcagccatatgaggcggcttacttatccaagtctctgagccgattgttcgaccctattaacctggtattccccccaggcgggcgcaaccccccgtcttctgatgagttggatgggataatcaagactattgcttctgagcttaacgtcgccgctgtggacactaatctcaccctggccgtttcaaagaatgttgccaaaactatccagctatactccgtgaagagcgaacagctgctttcgacacagggcgacgcctcccaggtcattggccccctaacagagggacaaaggcgcaacgtggctgtggtcaacagtctgtacaagcttcaccagagcgtaactaaagtggtctcatcccagagttcatttccgctagctgccgagcaaaccattatctctgcactgaaggcaattcacgccctcatggaaaatgcagtccaacctttactcaccagcgtcggagacgctatcgaagccatcatcattaccatgcaccaagaggacttctctggcagcctatccagcagtgggaagccagatgtgccttgtagtctgtacatgaaagagttgcaaggctttattgctcgagtgatgtcagattattttaagcactttgaatgcctagactttgtgttcgacaatactgaggcgatagcgcagagagccgtcgagttgttcatccggcacgcaagtttgattcgtcccttgggagaaggggggaaaatgcggctggcagcagacttcgcgcaaatggagttggctgtggggccattctgtcgacgagtcagcgacctgggcaagtcttacagaatgctcagaagctttagaccgcttctcttccaggcttccgaacacgtcgcttcttctccagccctgggcgatgttattcccttttctatcatcatacagtttctttttacccgtgctcctgcagagctgaagtcaccatttcaacgagccgaatggagtcacaccagattttcccaatggctcgatgaccacccctcagaaaaggaccggctactgctgattcgaggagccctcgaggcttatgtgcagagcgtgcggtccagagaggggaaagagttcgcaccagtctaccctatcatggttcagctccttcagaaggccatgtccgcgctccagtag

SEQ ID NO: 183755 - DNA, 2520 bp, synthetic construct
  misc_feature 1..2520: note = Description of Artificial Sequence: Synthetic coding sequence
  source 1..2520: mol_type = other DNA
atgggctgggtgggcggccggcggcgggacagcgccagcccccccgggaggagccggtcggcagcagatgacattaacccggcaccggccaatatggaaggcggtggagggagcgtcgccgtcgccggccttggtgcgcgaggctcaggagcagccgccgctaccgtgagagagctgctacaggacggctgttacagcgatttccttaacgaagattttgacgtgaagacttatacatctcagagcattcaccaggcggtaatcgccgagcagctggccaaactggctcagggaataagccagctagatcgagagctgcatttgcaggtggttgcgaggcatgaggaccttctcgctcaggcgaccgggattgaatccctggaaggcgttcttcagatgatgcagaccagaataggcgctcttcagggcgccgtggacagaattaaggcaaagattgtggaaccatacaacaaaattgtagccaggacagctcagctggctaggcttcaagtcgcctgcgacctcttacgccggattatccgaattttaaatctgtctaagcggttacagggtcagcttcagggcggctctagagagataaccaaggccgcacaaagcctaaatgagttagactacctcagccaaggaatcgacctcagcggtattgaagtcattgagaacgatctgctgttcattgccagagccagattggaggtagaaaaccaggccaaaagactcctcgagcaaggactggaaacccagaaccctactcaggtggggaccgctctgcaggtcttttacaacctgggaactttgaaggatacaattacaagtgtggtggatggctattgcgccacactcgaagagaatattaatagtgctctggatataaaagtcctcacccagccttcccaaagcgccgtgaggggtgggccaggcaggtccaccatgcctaccccaggcaacaccgcagccctgagagctagcttctggacaaatatggaaaagcttatggaccatatctacgctgtctgcggtcaagttcagcatttacagaaggtattggcgaaaaagcgagacccagtaagccatatatgctttatcgaggaaatcgtgaaggacggacagccagagattttttatactttctggaattccgtgacccaagcactttccagccaattccacatggccaccaatagctcgatgttcctcaagcaggcctttgagggagagtaccctaaattactcagactgtataacgatctgtggaaaaggctccaacagtacagccaacacattcagggcaatttcaacgccagcggtacaacggacctgtacgtggacctgcaacacatggaagacgacgctcaggacatattcattcctaagaaacccgattacgatccagagaaagccctcaaggattcactgcaaccctatgaagctgcatatctttctaaatctctgagccggttattcgaccccatcaaccttgtgtttccacctggaggccgcaaccctccaagctctgatgagctggacggtattatcaagaccattgcaagtgagctgaacgttgctgctgtcgataccaatctgactcttgctgtctccaaaaacgtagccaagacgatccagctttacagcgtgaaaagtgagcagttgttaagtactcagggagacgcatcgcaagtcatcggacctctgacagaggggcagaggcgcaatgtcgcggtcgtgaattctctgtataagcttcatcagagtgtgacaaaggccatacacgctttgatggagaatgcggtacaaccccttctgacctccgtcggcgacgctattgaggccatcatcataaccatgcatcaggaggatttttcaggctccctgtctagctctggaaagcccgacgttccctgcagcctctacatgaaagaactccagggcttcattgcccgtgtgatgagcgactacttcaaacattttgaatgcctggactttgtcttcgacaacacggaggctattgcccaaagggctgtcgaacttttcatccgacatgctagtctcatacggcccttaggtgaggggggcaagatgcgcctcgctgccgatttcgcccagatggaacttgcggtcggtccattctgccgccgcgtgtcagatctggggaagagctacaggatgctgagatcctttcgacctcttctctttcaggccagcgagcacgtggcaagtagcccagccctaggggacgtgattccatttagcatcattatccagtttctattcacccgggctccagccgagctcaagtcccccttccagagggcggagtggagtcatacacgattttcccagtggttggatgatcatccctcagagaaggacaggttactcctcattaggggtgccctggaggcatatgttcagtccgtcagatccagagagggaaaggagtttgcccctgtctacccaatcatggttcagcttctgcaaaaggccatgtccgcactgcaatag

SEQ ID NO: 183756 - DNA, 2472 bp, synthetic construct
  misc_feature 1..2472: note = Description of Artificial Sequence: Synthetic coding sequence
  source 1..2472: mol_type = other DNA
atgggctgggtgggcggccggcggcgggacagcgccagcccccccgggcgaagcagaagcgccgctgacgatatcaatcccgccccggctaacatggagggtggcggggggtcagttgccgtcgctggactcggagcacgcggctcgggagccgcggctgctactgtacgggagttactccaggacggctgctactccgatttcttaaacgaagacttcgatgtgaaaacttataccagtcagtccattcatcaggctgtcatagcagagcagttggctaagttggcccagggtatatcccagcttgaccgggagcttcaccttcaggtagtggcccgccacgaggacctgctggctcaagctacgggaattgagtctctcgaaggggtgctccagatgatgcagacccgtatcggcgccctgcagggagcagttgaccggattaaggctaaaatcgtcgaaccctacaacaagatcgtggcccggacagctcagctggcccggctccaagtcgcgtgtgatctgctgagacgcatcattcgaatactgaacctgagcaaaagattgcagggacagttgcagggaggcagtcgggagatcaccaaggccgctcagtctctaaatgagctagactacttgtctcagggcatcgatctcagcgggatcgaagtgatcgaaaatgacctgttgtttatcgcaagggctcgccttgaggtcgagaatcaggcaaagagattgctggaacaggggctcgagacgcaaaacccgacgcaggttggcaccgccctccaggttttctataacttagggactttgaaggatacgatcacaagcgtcgtggacggatattgtgctaccctcgaagagaatatcaacagtgccctagatattaaggttttgactcaaccttctcagagtgccgtgcgcggcggtcctggtcgatccaccatgccaacccccgggaacacagcagccctgcgagcatctttttggactaacatggagaagctgatggatcatatatatgccgtgtgcggccaggtgcaacatctccagaaggtgctcgccaaaaagcgagaccccgtaagtcacatttgttttattgaagaaattgttaaggacggccagcccgaaatcttttacactttctggaatagtgttacgcaggcactctccagccagtttcatatggccacaaatagttccatgttccttaagcaagctttcgaaggcgaatatcctaagctgctccggttatataacgacctctggaaacgtctccaacagtatagccagcatattcaggggaatttcaacgctagcgggacaacagacctgtacgtggacctccagcacatggaggacgacgcgcaggatatttttattcctaaaaagcccgactatgatcctgaaaaagcactcaaggactcacttcagccttatgaagctgcttatttatcaaaaagcctgtcaaggctcttcgatcccattaacctggtcttcccacctgggggaagaaacccaccatcaagcgacgaattggacggcattattaagaccatcgcatccgaattaaacgtggccgccgttgatacaaacctgactctggctgtgtccaagaacgtggcgaaaactatccaactctattccgtcaagtccgagcaacttctgagtacgcagggagacgcctctcaagtgatcggcccccttacagaaggtcagcggcgcaatgtggcagtggtcaactccctgtacaagttgcaccaatctgtcacaaaggtcgtaagcagccagagttccttcccattggccgctgagcagactatcatcagcgccctgaaggccatccacgcactgatggaaaatgctgtgcagcccctcctgacttccgtgggcgatgctatcgaggcaataattatcacaatgcaccaggaggacttctctggttctcttagtagcagtggcaagccagacgtcccctgtagtctttatatgaaggagttgcaggggttcatcgcccgagtgatgtccgactatttcaagcactttgagtgcctggactttgtttttgataacactgaggccatagctcaaagagccgtcgaactgttcatccgccatgcctctctgattcgccccttgggagagggcggcaaaatgcgactggccgctgactttgcccagatggagctggcggttggcccattttgccgccgcgtgtcagacctgggcaagtcctatcgcatgttgaggtcattccgccctttattattccaggcttccgagcacgtcgcatcgtccccggcattgggtgacgtgatcccattttccataattattcagtttctgttcaccagggcaccggcagagttgaagagtcccttccagcgtgcagagtggtcacacactaggttttcacagtggctggatgaccatccaagtgaaaaagacagactgttgctgatcaggtag

SEQ ID NO: 183757 - DNA, 2067 bp, synthetic construct
  misc_feature 1..2067: note = Description of Artificial Sequence: Synthetic coding sequence
  source 1..2067: mol_type = other DNA
atgcggggccggttcgcccacgcccagtacagccggtgcctgcggggcccatgcctggctgaggtggccgcgggagggggaacacggagcgccatggccgaaggatctggcgaggttgtggctgtgtcagcaacgggcgccgccaacgggcttaacaacggcgccggaggaacctctgcgactacttgcaatcctctgtctaggaagctgcataagattttggagacccgactagataacgacaaggagatgttggaagcgcttaaggcactgagcacattttttgtggagaattcactgaggacaagaagaaatctcagaggcgacatcgagcgcaaatctttggccattaacgaggaatttgtgtcaatattcaaagaagtgaaggaggagctggaatcaatctctgaggacgtgcaggctatgtccaactgctgccaggatatgacatctagattgcaggccgcgaaggagcagactcaggatttaatcgtcaaaaccaccaaacttcagtcagaaagccagaagctcgaaatacgagcccaagtggccgacgcctttctgagtaaattccagctgacatctgatgagatgtcgttgttgcggggcactcgggagggaccgattaccgaagatttcttcaaggccctgggccgggtcaaacagattcacaatgacgtcaaggtgctgctcagaaccaaccagcaaaccgcaggcttagagatcatggagcagatggccctgctgcaagagactgcttatgaacggctttatcgttgggctcagtccgaatgccgcaccctcacacaggagtcatgcgacgtgagccccgtactgacccaggccatggaggccctgcaggaccggcctgtgctctataaatacaccctagatgagttcgggacagcgcgacggtctaccgtagtgcggggattcattgatgcccttacccgaggcggacctggtggcaccccccgacctatcgagatgcactctcatgatcccctcagatatgtgggcgatatgttagcctggctgcaccaggctaccgcgagcgaaaaagagcacctggaggccctgctcaaacacgtgactacccagggggtggaggagaacatccaggaagtggttggccatatcactgaaggggtgtgtagacctctcaaggtccgaattgaacaagtgatcgtggctgagccgggcgccgtgctgctgtacaagattagcaatctcttgaaattctaccatcacacgatctctggcatcgtgggaaactccgccaccgccctgctaacgaccattgaagaaatgcacttgctaagtaagaagatattctttaattccctcagccttcatgcctccaaactcatggacaaggttgaacttccacctcctgatcttggcccaagctctgctcttaatcagactcttatgttgctgcgcgaagtgctggcatctcatgacagttccgtcgtgcccctggatgccagacaggctgattttgtccaggtgctatcatgtgttctggacccgttattgcagatgtgtaccgtgtcagcttctaacctagggaccgcagacatggcgacattcatggtgaatagcctgtatatgatgaagaccacattggcgctcttcgaatttactgacaggcggctcgaaatgctccagtttcagattgaggcacacttagacactttaattaatgagcaggcttcctatgtcctcaccagagtcgggctgtcctatatttacaatacagtccaacagcacaaaccagagcaaggaagcctggccaacatgcctaatctcgactctgtgacccttaaggctgctatggtccaattcgatcggtatctgagcgccccagacaatttgctcattccacagctgaatttccttttatccgcaacagtgaaagagcagatcgtgaaacagtcaactgaacttgtctgcagagcatacggcgaggtgtatgctgccgttatgaatccaatcaacgaatataaggatccagagaacatcctgcaccggtccccgcaacaggtgcagaccctgctcagttag

SEQ ID NO: 183758 - DNA, 1848 bp, synthetic construct
  misc_feature 1..1848: note = Description of Artificial Sequence: Synthetic coding sequence
  source 1..1848: mol_type = other DNA
atggccgagggcagcggcgaggtggtggccgtgagcgccaccggcgccgcaaatggtctgaataacggtgccggcggaacttccgctactacctgtaaccctttaagccgcaaactccacaaaatcctggaaactagattggataatgacaaagagatgcttgaagcattaaaggcactttctaccttctttgtcgagaattctctacgtacgaggcggaacctgcggggagacatcgagcgtaaatcccttgctattaacgaagagttcgtgtcaatcttcaaggaggtgaaagaggaattggagagtatctctgaggacgtacaggccatgtccaattgctgccaggacatgacgagccgcctccaagcagccaaagagcagacccaggacctgatcgtcaagactacaaaacttcagtcagaaagccagaagctagagattcgcgctcaggttgccgatgcttttctatccaaatttcagctgaccagtgacgaaatgagcctccttcgaggcacccgcgaagggcctattactgaggacttcttcaaggctctaggacgcgttaaacaaattcacaacgacgtaaaggtactgctgcggaccaaccagcagacagcggggcttgaaatcatggaacagatggccctgttacaggagactgcctatgagagactttaccggtgggcccaaagcgaatgcagaacgttgacccaggagagctgcgacgtgagccccgttctgacgcaggccatggaggcactgcaggaccgccctgtgctgtacaagtacacactggatgagtttgggaccgctcggaggagcaccgtggtccgtggattcattgatgcgcttactagaggtggaccaggaggcacacccagacctattgaaatgcattcccacgatccactccggtatgtcggcgacatgctagcgtggctgcaccaggctacggcgtctgaaaaagaacatttagaggctttgcttaagcatgtgactacacagggggtagaagagaatattcaagaggtcgttggacacatcactgagggtgtttgtcggcctctgaaggttaggattgagcaggtgattgtcgccgagcccggggcggtattgctgtacaagatatccaacctgctcaagttctaccaccatacaatcagcggtatagtgggaaactcagccacagccctgctgaccaccatcgaagagatgcatctgctctctaagaagatcttcttcaacagcctgtctttgcacgcgtccaaacttatggacaaagtggaactgcctccgcccgacctgggacccagcagtgctctgaaccaaacactgatgttgctaagggaagtgctcgcttctcatgacagttctgtggtccctctagacgctaggcaggcggattttgtgcaggtgctgagctgtgttctggacccactgctgcagatgtgtactgtgtctgcgtcaaatcttgggacagcagacatggcaacctttatggtcaatagcctgtatatgatgaaaaccacgctggcccttttcgaattcacagacaggcggctggaaatgctgcagtttcagatagaggcgcacttggacaccctgataaacgagcaagccagttatgtactgaccagagtggggctgtcatatatctataatacagttcagcagcacaaaccagagcaggggagcctggcaaatatgccgaaccttgattccgtgacactgaaggcagcaatggttcagtttgataggtacctcagtgccccagataacttgctgatccctcaactcaacttcctgctctccgcaacagtgaagcgcccaccgaatggcccgtag

SEQ ID NO: 183759 - DNA, 1974 bp, synthetic construct
  misc_feature 1..1974: note = Description of Artificial Sequence: Synthetic coding sequence
  source 1..1974: mol_type = other DNA
atggccgagggcagcggcgaggtggtggccgtgagcgccaccggcgccgctaatggactcaacaatggagcaggcggtacgtctgccactacttgtaaccctctatctcgaaagttgcataagatcctggagaccagactggataatgataaggagatgctcgaggctcttaaagccttgtccacatttttcgttgaaaatagtttgcggaccagaagaaacctaagaggagatatcgaacgaaaaagcctggccattaatgaagaatttgtgtccatcttcaaggaagtgaaagaagaactggagtccatttctgaagatgtccaggcgatgtcaaattgttgtcaggatatgacatccaggctacaggctgctaaggagcagacacaggacctcatagtgaaaaccaccaaactccagtctgagtcacagaaactggagattcgtgcacaggtggccgacgctttcctaagcaaattccagctgacgtcagacgaaatgagcttgctgcgcggcaccagagaaggccctataacagaagatttttttaaagcactcggcagggtcaaacagattcacaacgacgttaaggtacttctgcgtaccaaccagcaaaccgccggactggaaattatggaacaaatggctctgctgcaagagacagcctatgagcgcctgtaccgctgggcgcaatctgagtgcagaaccctgacccaggagtcatgcgatgtgagccctgtgttgacccaggccatggaggctcttcaggatcgtccagtattgtataaatacaccctagacgaattcggcacggctcggcgcagcaccgtcgtccggggctttatcgatgcactgacacgagggggacctggagggacccctagacccattgagatgcactctcatgaccctctgaggtatgtaggggatatgctggcttggctgcatcaggctacagcctccgaaaaggaacatctcgaggcgctgctgaagcatgttaccactcagggtgtggaagagaacattcaagaggttgttggacacatcacagagggggtgtgtcgccccttgaaggtgcgcatcgaacaagtgatcgttgctgaaccgggggcagtgctcttgtacaagatcagcaatctgctcaagttctaccatcacacaatatcagggattgttggcaacagtgcaacggctctcctaaccactatagaggaaatgcacttgcttagcaagaaaatttttttcaatagtctgagtctgcacgcaagcaagcttatggacaaagtggagctacccccgccagacctgggaccatcaagcgccctgaatcagacactgatgctattaagggaggtgctggcgagtcacgatagcagtgtcgtccccctggacgcccgacaagcagattttgtgcaagtcctctcttgcgtgttagatccactactgcagatgtgcaccgtttcagcttcaaacttgggcactgctgacatggctacttttatggtgaattcactatatatgatgaagaccacattagctctttttgagtttactgataggcgcctcgagatgctgcagtttcagatcgaagcccatctggatacgcttatcaatgagcaggcaagctacgtccttacgagggtgggattgtcctacatttataatacggtgcagcagcacaaacccgaacagggtagcctagctaacatgcccaatttggactccgtgactctgaaggccgccatggtgcaatttgatcgctatctttctgctcccgacaacctgctcataccacagctgaatttcctgctgagcgctacggtaaaggagcagatcgttaagcagtctactgagctggtgtgccgagcatatggtgaagtttatgctgccgtgatgaatcccatcaacgaatacaaagacccggaaaacatactgcatcggagcccgcagcaggtgcaaaccttgctttcttag

SEQ ID NO: 183760 - DNA, 2313 bp, synthetic construct
  misc_feature 1..2313: note = Description of Artificial Sequence: Synthetic coding sequence
  source 1..2313: mol_type = other DNA
atggacttcagcaagttcctggccgacgacttcgacgtgaaggagtggataaatgcggcctttcgggcggggagcaaagaggctgccagcggcaaagctgatggccatgctgcgactttagtaatgaagctgcagttattcatacaagaggtcaatcatgccgttgaggaaacttcccaccaggccttacagaatatgcccaaggtgctcagggacgtggaggcccttaagcaagaggccagcttcctaaaggagcagatgatcctggtgaaggaagatattaagaaattcgaacaggacaccagccagtccatgcaggtccttgtggagatagaccaagtgaagtcccgaatgcaattagccgcagagtcactgcaggaggccgacaaatggtcgacactttctgcagatattgaggagacgttcaaaacccaggacatagccgtcatctccgcaaagcttaccgggatgcagaattctttgatgatgctggtcgatactcccgactactccgagaaatgcgtgcatttagaagcccttaaaaacagactggaagccctggccagcccacagatcgtggccgcgttcacttctcaggcagtcgaccagtccaaagtcttcgtgaaggtgttcactgagatagaccggatgccccagctgctggcgtactattacaagtgtcataaagttcaactcctggctgcatggcaggagctctgccagagcgatttgtcccttgaccgccagctgaccggtctttacgatgcactgttgggcgcatggcacacacagatccagtgggctacacaagtgtttcagaaaccacatgaagtggtcatggtgctcctgatacaaacccttggggcactgatgcccagcctgcccagctgcctatctaacggggtagagcgtgcaggccccgagcaagagctgacacgcctgttggagttctatgacgccaccgctcacttcgccaaggggttagaaatggctctgctccctcacttacacgagcacaacctggtgaaggtaaccgaactagtcgatgcggtctacgatccatataagccgtatcaactgaagtacggcgatatggaggaatcaaatcttctaatccagatgagcgccgtgcccctggagcacggagaagtcattgattgtgtgcaagagctgtcacattccgtcaacaagttgttcggtcttgcatctgccgccgtggacaggtgcgttaggttcactaacggtctggggacgtgcggtctgttatcagccctgaagtccctgttcgctaaatatgtgtccgacttcacatccaccctacaaagcatccggaaaaagtgcaagctggaccacattcctccgaacagcctgtttcaagaggattggaccgcattccaaaattccattcgcataatcgccacttgtggggagctattaagacactgtggagacttcgagcagcagctcgcaaaccgcatcctctcaaccgccggaaaatacctgtcagatagctgcagccctcggtcactggccggatttcaggaatcaatactgactgacaaaaaaaactccgctaaaaacccttggcaggaatacaattatttgcagaaggacaacccggctgagtatgcttccctgatggaaatcttatatacacttaaggaaaagggaagttccaatcacaacttactcgccgcccctcgagcagcccttacccggctgaaccagcaagctcatcagctcgctttcgattcagttttcctgagaattaaacaacagctgcttctgatcagcaagatggactcatggaacactgctggtattggagagactctgacagatgaactccccgcgttctctctgacccctcttgagtatatctcaaacatcggacagtacattatgagtctgcctttgaacttggaaccatttgtgacccaggaggatagtgcactcgaacttgccctgcacgcgggaaagcttccttttcctcccgaacaaggcgatgagttaccggaattggataacatggcggacaactggttgggcagtatcgcccgggctactatgcagacttattgtgatgctatcttgcagatacctgaattgagcccacactccgcgaagcaactggctacggacatcgactatttgattaacgtgatggacgcgcttgggctgcagccctctaggaccctacaacacatcgtcactttgttgaagacaagaccagaagactatagacaggtgtctaagggcttaccccgtcggttagctacgaccgtggcaacaatgagatctgtcaattattag

SEQ ID NO: 183761 - DNA, 1839 bp, synthetic construct
  misc_feature 1..1839: note = Description of Artificial Sequence: Synthetic coding sequence
  source 1..1839: mol_type = other DNA
atggccaccgccgccaccatccccagcgtggccaccgccaccgccgccgccctaggggaggtggaggacgaaggactcctggcgagcctttttcgggaccggttcccagaggcccagtggcgggaaagacctgacgtgggccggtatcttagggagctcagtgggagtggcctagagagactgaggagggagccagagcgcctggccgaagagcgcgctcagctgctgcagcagaccagggacctcgcctttgccaactacaagacgttcatcagaggggccgagtgcacagaaaggatccaccgcctctttggcgatgtcgaggcgagcctgggcaggttactcgataggctgccctcctttcaacagagctgcaggaattttgtaaaagaagccgaggaaatatctagtaatcggcgcatgaactcactcaccctcaaccggcatactgaaatcctggaaatcttggagatacctcagctgatggacacctgtgtgaggaactcctattacgaggaagctctggaactggctgcttacgtcaggcgcctcgaacggaaatacagctctatcccagtgattcagggcatcgtgaatgaagtgcgccagtccatgcagctgatgctctcccagctcattcagcagcttaggaccaacattcagctcccagcctgccttagggtaatcggttacctcaggcgcatggacgtatttacggaagccgagttgagagtgaaatttttgcaggcgcgcgatgcatggcttcgatctatactgaccgctatacctaacgatgacccatactttcatattacaaagaccattgaagcttccagggtccacctgtttgatatcataacccagtaccgtgccattttttccgacgaggatcccctattgccacccgctatgggtgagcacaccgttaacgagagtgccatattccatggctgggtcctgcagaaagtgtctcaattcctccaggtgctggaaacagacctctacaggggtattggtggccaccttgacagcctgcttggtcagtgcatgtactttggactaagcttcagtcgcgtaggcgctgactttaggggacagcttgcccccgtctttcaacgagttgctatctccactttccagaaagcaatccaggagaccgttgagaagttccaggaagagatgaatagctacatgttaatctccgctccagccatcctgggtaccagcaacatgcctgctgcggtacccgctacccagcctggcaccttgcaacccccgatggtgttgctagactttccccccttggcctgcttcttgaacaacatactggttgcattcaatgatttgcgtctctgttgccctgtggcactggcccaagacgttactggcgccctggaagacgccctggctaaggtgacaaaaatcattctggcttttcaccgggcggaagaggccgcttttagttccggcgaacaggagttgttcgtgcaattttgcacagttttcctggaggatctcgtgccgtacctgaatcggtgccttcaggtgctgtttccccccgctcagatcgcccaaactcttgggatccctcctacgcagctgtcaaagtacggtaacctgggccacgtgaatatcggggccattcaggagcctctcgccttcattctgcccaaaagggaaactctatttaccctggatgatcaagcccttggcccagagctcactgccccagcccccgaaccccctgccgaggaacctagacttgaacctgccggacccgcatgccccgaagggggtcgggccgaaacccaggccgaacctccatccgtcggaccttag

SEQ ID NO: 183762 - DNA, 2109 bp, synthetic construct
  misc_feature 1..2109: note = Description of Artificial Sequence: Synthetic coding sequence
  source 1..2109: mol_type = other DNA
atggagagccccagcgcccccccccaccggtggtgcatcccctggcagaggttactgctcactgcgagcctgctaaccttctggaacccacctaccaccgcgaagttgacaatcgaatctacaccctttaacgttgcggagggcaaggaggtcctgctccttgtgcacaatctcccacaacatctattcggatactcctggtacaagggtgagagggttgatggcaaccgccagatcattggatacgtgatcggcacccagcaggccaccccgggtcctgcatacagtgggagagaaatcatctaccccaatgctagcctgcttatccaaaacatcattcagaatgataccggattctataccttgcacgtaattaagtcggacctggtaaatgaggaggcgaccggccagttccgtgtctatcctgagcttcctaagcccagtatctctagcaataacagtaagcccgtcgaagacaaagacgcagtggcttttacttgcgaaccagaaacccaagatgccacttacctgtggtgggtgaacaaccagtccctgcctgtctcccctagactgcagctaagcaacggaaataggaccctgacgcttttcaatgtcactaggaatgataccgcctcttataagtgtgagacccagaatcctgtctctgcacgtagatccgattccgtgatcctaaatgtcctgtacggaccagatgccccgacaataagcccccttaacaccagttatcgctcaggcgaaaatctcaacctgagttgtcacgccgcaagcaacccacctgctcagtattcctggtttgtcaacggcacatttcagcaaagcactcaagaactcttcattcctaatataaccgttaataactcagggtcctacacctgtcaggcgcacaattctgacacgggattgaacagaaccacggtgactactattacggtgtatgccgaaccacctaagccttttatcacgtcaaataatagcaaccccgtcgaggatgaggatgcagtggccctcacttgcgaacctgagattcaaaacacaacttacctgtggtgggtgaacaaccaatctcttccagtgtcacccaggttacagctctccaacgataatcgaactctcacccttcttagcgtcacccggaacgatgtcggtccctacgagtgcggcatccagaacaagctcagcgttgaccactcagaccctgtaatcctaaatgttttgtacggacctgacgacccaaccatctcaccctcctacacgtattacaggcccggagtaaatctgtcactaagctgtcacgccgcttccaatcccccagcccaatatagttggctgatcgatgggaacatacagcagcacacccaagaactgtttatatccaacattaccgaaaaaaattcagggctatacacatgccaggcaaataatagcgcatccggacattcacggaccaccgttaagactatcacagtgagtgccgaacttccgaaaccttcaatttcatctaacaactcaaagccggttgaggataaggacgctgtggccttcacatgtgagcctgaggctcagaacactacctatctgtggtgggttaacggccagtccctcccggtgagccctcggctgcaactcagcaacggtaatagaacactgaccttgttcaacgtgacccgcaacgatgctcgggcttacgtttgcggcatacagaattccgtgagtgcgaatcgcagcgatcccgttaccctcgatgtgctgtacgggccggacacaccaattatctcaccccccgattcgagctacctgtccggtgccaacttgaatttgtcatgtcattctgcgtccaacccttctccccagtattcctggaggattaatggcatcccccagcagcacacacaggtgctcttcatcgccaagatcacccccaataataacggcacttatgcatgctttgtgagtaacctagcgacaggcagaaataatagtattgtgaaatccataacagtttccgcttctggtacatcgcccggcctgagtgctggggcaaccgtaggtatcatgataggtgtgctggtgggagttgcattgatttag

SEQ ID NO: 183763 - DNA, 981 bp, synthetic construct
  misc_feature 1..981: note = Description of Artificial Sequence: Synthetic coding sequence
  source 1..981: mol_type = other DNA
atgatggcctacatgaaccccggcccccactacagcgtgaacgccttggctctatctggtccaagcgttgatctgatgcaccaggcggtaccatatccttcaccgcctttggcccttgatccacccaggcgtcagaggcaggagaggaccgtgtacactgagtctcagcagaaggtcctggagttctacttccagaaggaccagtatcccaattacgatcagcggctgaacctggctgaaatgctgtccttgcgcgaacagcagctccaggtctggtttaaaaacagacgagctaaacttgcccgcgaaagacgactgcagcagcagccacagagagtccctggccagcggggacgtggcgcaagggcagcaccgctggtaccggtcgctgctgcttcttttccaggtggcccagagttcccccagggcaggggctcttggatctctcctcagccagggccctggggtgttcttccagccgccgagcctaagatctacagtcttccaagaacttgggggggaccagagtgtggaacccaagaaggccttaaggccgtgcctgcgcctggccccgggcctatacctgctcccattccaggaccagcccagatccctggccctgtccctgggccagctccaaacttggggcctatgtctggccctctttctgtgtccataccaggaccaatccccgctccgattagctgccccgggccgatccccgaccctgtcctcggaagaacgctgatgcccggacctggtagcttgccaactcctgcgcctggcgctctatggcctcagagtccgtacgcctccaacctgtcaccagacacacaattgtaccctgacttcacaaaactattgccattgctggacaggttcgaggagtcaagcttgagcacaaccacctctcaatataaggaggaggacggttttgttgacaaaaaccatagtgtgccccggtcacttctggacctgtag

SEQ ID NO: 183764 - DNA, 900 bp, synthetic construct
  misc_feature 1..900: note = Description of Artificial Sequence: Synthetic coding sequence
  source 1..900: mol_type = other DNA
atgatggcctacatgaaccccggcccccactacagcgtgaacgccctggcgctgtcgggcccctcagtagacttgatgcatcaagctgtaccttaccccagcgcacccagaaagcaaaggcgggaacggactacatttacccggtctcaattagaggagctggaggctttatttgccaaaacccagtatcctgatgtttatgcccgggaagaggtagcactgaaaattaacctcccagaaagccgcgtgcaggtctggttcaagaacagaagagccaagtgccggcagcaacggcagcaacagaagcagcagcagcaaccccctgggggccaggccaaagcccggcccgccaagcgcaaggcagggacctctcctcggccctctaccgacgtctgtccagatcctcttgggataagtgattcctactcgccccctttacccggcccaagcggaagtccaactaccgccgtggccaccgtttccatttggagtcccgcctccgaatcaccattgcctgaggcacagcgggccgggctggttgccagcgggccaagcttgacaagcgctccctatgccatgacctacgctccagcctccgcattctgttctagcccaagtgcctacggatctccatcaagctactttagcggacttgatccttacctctcacccatggttccacagctgggaggcccagccctgtcccccctgtccgggccttcggtcggcccgtcgttggcccagtctccaacttcactgtcaggacagtcctatggggcttattctcccgtggatagcctggaatttaaagatcccactgggacctggaaattcacatacaaccccatggatcccctagactacaaggaccagtcagcctggaagttccagattctctag

SEQ ID NO: 183765 - DNA, 900 bp, synthetic construct
  misc_feature 1..900: note = Description of Artificial Sequence: Synthetic coding sequence
  source 1..900: mol_type = other DNA
atgatggcctacatgaaccccggcccccactacagcgtgaacgccctggcactctcaggaccaagcgtagacctgatgcatcaagcagtcccttatccaagcgctcctaggaaacaaaggagggaaagaactacgtttacccggagtcagctcgaggagctggaggcactgtttgcgaaaactcagtacccggatgtctacgcacgggaggaagtggctctgaaaatcaacctgccagagagtagagtgcaggtatggtttaagaacaggagagcaaaatgcagacaacagaggcagcagcaaaagcagcagcaacaaccccctggcggccaagctaaggctagaccagcaaaaaggaaggctggcacttccccacgaccatccactgatgtgtgtccagatcctctgggcatttcagactcctatagccctccactgcccggcccatctggaagtccaacaacagcagtggccaccgtatctatctggagccctgcgtcggaatctccactccccgaggctcagcgcgcaggcctggtagccagcggcccttccctgacatccgccccctacgccatgacctatgcgcctgcatctgctttttgctcctcaccctctgcctacggatctccttcatcgtacttctcagggttagacccgtatctctcgccaatggtcccccagcttggtgggccagcactttctccactctccggcccgtccgtgggtccaagtctagcccagtcaccaacctctctgtcaggccagagttatggggcctactcccctgttgactcactcgaatttaaagatcctactggcacctggaagttcacatacaaccccatggaccctctggactacaaagaccaaagcgcctggaagtttcagatcctgtag

SEQ ID NO: 183766 - DNA, 900 bp, synthetic construct
  misc_feature 1..900: note = Description of Artificial Sequence: Synthetic coding sequence
  source 1..900: mol_type = other DNA
atgatggcctacatgaaccccggcccccactacagcgtgaacgccctcgctctctccggcccttcagtggatctgatgcaccaagctgtgccataccccagcgctcctcggaagcaaaggagagagcggacaacatttacgaggagccaactggaggagttggaggccctgtttgccaagacacagtaccccgatgtttatgccagggaggaagttgctctgaagattaacctacctgaatctagagtgcaggtatggttcaaaaacagacgggctaaatgcagacagcagagacaacaacagaaacagcagcagcaaccgccgggggggcaagccaaagcccgacctgcgaaaaggaaggcggggacatctcctcgtccctctacggacgtgtgtcctgatcccctcggaatttcagattcatatagccccccactccctgggccatcaggcagtcccactactgccgtcgcaacagtttccatctggtcaccggcctcagaatcccccttgccagaggcacagcgcgctggtctcgtagcgagtggcccttcactgacgtcagccccttacgccatgacttatgccccggccagcgctttctgcagctctccatcagcatatggcagcccctccagctacttcagcggattggatccctacctctcaccgatggtcccacagttgggagggcccgccctctcacctttgtcgggaccctcggtcggtccctctctggcccagtctcctacatctctgagcgggcagtcctatggcgcctacagcccggtggatagtctggaatttaaagaccccaccgggacttggaaatttacatacaaccccatggacccgctggactacaaagatcagagcgcttggaagttccaaatcctgtag

SEQ ID NO: 183767 - DNA, 3678 bp, synthetic construct
  misc_feature 1..3678: note = Description of Artificial Sequence: Synthetic coding sequence
  source 1..3678: mol_type = other DNA
atggccgccgtgctggagagcctgctgcgggaggaggtgagcgtggctgcggttgtgagatggattgcgcggtccacccagggttctgaggataacgctggggaggccgccgctttgtccagtctccgggcactcagaaaagaatttgtccccttcctccttaactttctgagagagcagtccagccgggttttacctcaagggcctccgactccagctaagacccctggagcaagcgcagcactgcccggaaggccgggagggccgcccagaggctcacgtggcgcgaggtctcagcttttcccgccgacagaggcccagagcaccgcagcggaagctccactcgctcgaagaggagggcggcgtcgaggacctggtccagcccgcgagcgaggcggccgtggactggaggaaggcgtatcgggagaatccctgcctggcgccggtggtcgtagacttcgcggtagtggtagcccatcccggcccagtctgacgctctctgacccacctaacctatcaaaccttgaggaatttccccccgttggctccgtgccaccaggtccaactgagactcaactgagctgtcgccgctgggtgcctaggcgcctgtggggagtgagccacagcagtagcgcactgagatctggagcccccggatgtagaaccaagccctcccgccgaattaatccgactcctgtgagcgaggaaaggtcactgtcaaaaccaaaaacatgctttaccagcccccccatcagttgtgtgccatcttccaagcagcttcagcagtcccccacacctacatgtcccaccccagagctcgggtcaccgcttccgtctagaaccggatccctgaccgacgagcccgcagatccggcccgagtgagttccaggcaaaggctggaactcgtcgccctggtgtactcctcctgcatagctgagaacctcgtgccgaacctgttcttggagctttttttcgtgtttcaactcctgaccgctcggcgtatggtaaccgctaaagatagtgaccccgagctatccccagctgttctcgattcattagagagtccactgttccagtctatccatgactgcgtcttttttgccgtacaggtgctcgaatgccatttccaggtcttgtcaaatcttgataaggggactctcaaactcctggctgaaaatgagcgcctcctttgctttagccccgctctgcagggacggctgagagccgcttacgaaggttccgtggcaaaggtaagtctagtcatgcctccaagcacacaagctgtgtctttccagcctgagacggacaacagggcaaattttagctccgatagagcttttcacacattcaagaaacaaagagacgtgttttatgaagtgttgcgtgagtgggaggaccaccacgaagagcccggatgggactttgagaagggcctggggagcagaatccgcgccatgatggggcagctgagcgccgcctgctcacattctcattttgtccgattgttccagaagcagctgctgcagatgtgtcagtcacctgggggtgcaggcgggactgtgttgggggaggccccagatgttttatcaatgttgggcgccgataagctgggtagactttggcgtctccaggagcgtctcatggcaccccagagtagcggaggtccctgtccaccacccacttttccgggatgccagggattctttcgggattttatattgtcagcttccagtttccagttcaaccagcacttgatggactccctcagcttaaaaatacaggaactgaatggactggcattgccccagcacgagcccaacgatgaggatggcgaaagcgacgtggattggcagggagaacggaaacaatttgctgtggtactcttgtcactgaggcttttagccaagttcttagggttcgttgcatttctgccgtaccggggcccagagcctcctcctaccggggagttgcaggacagcattcttgccctccggtctcaggtgcccccagtgctagatgttcgcactctgctgcagcgcgggctccaggcaagacgcgctgtgctgaccgttccctggttggtcgagttcctcagtttcgcagatcacgtggtgcccttgctggagtattaccgggatattttcacacttctactacgattacataggtcactggttttgagccaagagtcggaaggcaagatgtgttttctaaataagcttcttcttctggcagtactcggatggctgtttcagattccgaccgtcccagaggacttattttttctcgaagaagggccatcttatgcctttgaggtcgatactgtggccccagagcacggcctcgataacgccccagtggtagatcaacagttgctatacacctgctgcccttacatcggggagctccggaaacttcttgcctcctgggtctccggatcctctggccgcagcggcgggttcatgcgaaagataactcctactaccacgacctctctgggagcccagccttcgcagacatcacagggcttacaggctcagcttgcccaggcattctttcataaccaacctccttccctaaggcgaaccgtcgagttcgtggccgagcgaattggctccaattgcgtgaaacacatcaaggccactctggtagctgacctcgtgcgtcaggccgagtctcttttgcaggagcagctggttacccaaggagaagaaggaggagatcccgcccagctgttggagatcttgtgtagtcagctgtgtccccacggcgcccaggctctggctctaggtcgtgaattctgccaacgtaaatcgcccggcgcagttcgagctctgctgcctgaggaaacacctgcagctgttctttcatccgcggaaaacattgccgtgggcctagccaccgagaaggcctgtgcatggcttagcgctaacatcaccgcactgatccggagagaggtgaaggcagctgtatcccgcaccctcagggcccagggtccggaacctgctgcacggggcgaacgacgagggtgttctcgggcttgcgagcaccatgctccactcccttcccacctgatctctgagatcaaagatgtcctgagcctggctgtcggtcctagagaccccgatgagggggtgtcgcccgaacacttagagcagctactgggccagttggggcagacgctgcgttgcagacagttcctgtgtccacccgcagaacaacatctcgctaagtgcagtgtggagctcgcctctttactggtggcagatcaaattcctatactcggaccaccagcccagtaccgcctggaaaggggccaggctcggcgcctcctacacatgctgttgtcactctggaaggaggacttccaaggacctgtccctctccagctgttgttatcccctaggaatgtggggctcctcgcggacacccggcctcgggagtgggatctgctcctgtttctgttgcgggaactggttgagaagggtttaatggggaggatggagattgaggcgtgcctgggctctctgcaccaagcacagtggcccggcgacttcgccgaggaactcgccacactgtcaaacttatttcttgccgaaccgcatctcccggagcctcagctgagggcatgtgaattagtgcaaccgaaccgaggcactgtgctcgcccagagctag

SEQ ID NO: 183768 - DNA, 3684 bp, synthetic construct
  misc_feature 1..3684: note = Description of Artificial Sequence: Synthetic coding sequence
  source 1..3684: mol_type = other DNA
atggccgccgtgctggagagcctgctgcgggaggaggtgagcgtggcggccgtggtaagatggatcgcccggtcaacgcagggaagtgaggataacgcaggggaggcagctgccttatcatcacttagggcactgcggaaagagtttgttccatttctgttgaattttctgcgcgagcagagcagtcgagtcctaccccaggggccccctacccccgcaaaaacacctggagcaagtgcagcgctacctggcaggccaggtggcccccccagaggcagcagaggggcacgctcccagcttttccccccaaccgaagctcagtccactgcagcagaggcccctttggccaggcgagggggccggcgtcgaggcccgggtccggcaagggaaaggggcggcagaggactagaggaaggagtctctggcgaaagcctcccaggcgctgggggccgacgcctgcgcggttctggttccccgagtcggccctcccttaccctatctgatccaccaaacctatccaatctggaagagttcccacccgttggctcagttcctcccggacccacaggtaccaagcctagccgaagaattaatccaaccccggtgagcgaggagaggtccctgtcaaaacctaagacatgcttcacctccccaccaatcagctgtgtcccatctagccaaccatcagcgctcgacacctctccctggggactgggtctcccacccggctgtaggtccctacaggaggagcgagaaatgctgcgtaaagagaggtccaagcaactacaacagtctccaactcccacctgtcctactccggagctgggctcccctctgccctccaggaccggaagtctgaccgatgagcctgctgatcccgctcgggtgagttctaggcagaggttggagctcgtggctctggtgtactctagctgcatcgcagagaatctggtacccaatctcttcctggagcttttctttgtatttcagctcctcaccgcacgcaggatggtgacagcgaaggactctgaccccgagctgagccccgcagttttagactcccttgagtcaccactatttcagtctatccacgattgtgtattctttgcggtccaggtcctggagtgccatttccaggttctttccaacctggacaaaggcaccctgaaattattggccgaaaacgagcgtctcttgtgcttctccccagcccttcaaggtcggctccgagcggcttacgaaggcagtgtagccaaggtttccctagtgatgcctcctagtactcaggctgttagctttcagcccgaaaccgacaatagggctaacttcagcagcgatagagccttccacacctttaagaagcagagagacgtgttctacgaggtgcttagagagtgggaagaccaccacgaagagcctggctgggacttcgagaagggcctggggtcccgcattagggctatgatgggacagctcagcgccgcctgttctcattcccactttgtaagactgtttcaaaaacagcttcttcagatgtgccaaagtcctggcggcgccggcggcaccgtgctcggggaggcccccgatgtattatcaatgctgggtgctgataagcttgggcgtctgtggaggctgcaggaacggttgatggcaccacagtccagtggtggtccctgcccccctccaacattcccagggtgccagggattcttcagagacttcattctgtccgcttcctcttttcagtttaatcagcaccttatggactctctttctctgaagatccaagaactgaacgggctcgccttaccccagcacgagccgaacgacgaggatggtgagagtgacgttgattggcagggcgagaggaagcagttcgccgttgtgctcctgagcttaaggttgttagcaaaatttctcggcttcgttgccttcctgccttacagagggccagagcccccgcccaccggagagctgcaggactcgattctggcattgaggtcccaggtacctcccgtgctggacgtgcgaacattgttgcaaaggggccttcaagctcgcagggcagtcctcacagtaccttggctagtggagtttctctcgtttgccgaccatgtcgttcctctgcttgaatactatagagacatatttaccttgctactgaggctgcatcggtctctagtactctcacaggagtctgaggggaaaatgtgcttcctcaacaagttactcttactcgctgtattaggctggctgttccaaatccctaccgttccagaggacttgttttttctcgaggaggggcccagctatgccttcgaagtcgacacggtagcccctgaacatggcttagacaacgcccccgtggtggaccagcagttactctatacttgctgtccctacatcggcgagctgcggaaattgctggcctcttgggtctccggatcttcgggcaggtcagggggtttcatgaggaagattactcccactacaaccactagcctcggcgcacagccctcccaaacatcccaaggcctgcaggcccagctggcgcaggccttcttccacaaccaaccccccagcctcagacgcacggtggagtttgtggcggagaggattgggagtaattgcgtcaagcacattaaggctaccttggtggccgacctggtgaggcaggccgagtcccttcttcaggagcagctagtcacacagggagaagaaggaggagaccccgcccagctcctggaaatattgtgcagccaactgtgcccacatggcgcccaggccctggcgctcggcagggaattttgccagcggaagtcccctggtgctgtacgcgctttgttaccagaagagactccagcggctgtgctttccagtgctgagaacattgcggtggggctcgcaacggaaaaagcctgtgcctggcttagcgccaacattactgccctcattagacgtgaggtcaaagctgctgtgagtcgcacgctgagagctcagggtcccgagcccgcagcccggggtgagagaaggggatgttcacgtgcttgcgagcaccacgccccactgccctcccacctgataagcgaaatcaaagatgttctgtctctggctgtggggccacgggatcctgacgagggcgtgtcacctgaacatctcgagcagttacttggacagctgggccagactctcagatgccgccagttcctctgccccccagccgaacaacatctcgccaaatgttccgtagagttagcttccctcctggtggctgatcagattcccatcctggggcctcctgctcagtaccgattggagagaggccaggctcggcgcctgctccacatgcttctgagcttgtggaaggaagacttccagggccctgttcctttacagctgctcctgagtccgagaaacgtgggccttctggcagacaccaggccacgcgaatgggacttgctgttgttcctgctcagagagcttgtggagaaagggctcatgggtaggatggaaatcgaggcatgtttgggctcactacaccaagcccagtggccaggggatttcgcggaggaattagcaaccctgtcgaacttattcctggcagaaccccacttaccagaaccacaactgagggcatgtgaacttgtccaaccaaataggggcaccgttttggcacagtcttag

SEQ ID NO: 183769 - DNA, 2697 bp, synthetic construct
  misc_feature 1..2697: note = Description of Artificial Sequence: Synthetic coding sequence
  source 1..2697: mol_type = other DNA
atggccctgatcatggagcccgtgagcaagtggagccccagccaggtcgtggactggatgaaaggcttagacgactgcctacagcagtatattaagaacttcgaaagggaaaagattagtggtgaccagcttctgcgtataactcatcaggagcttgaagacctaggggtctctcgaattggacaccaggaactcatccttgaagctgtggacctactgtgcgccctgaattacggcttggaaacagagaacctgaagaccctgagtcacaagctcaatgctagtgccaagaatcttcagaattttattactggtcggagaaggtccggccactatgacgggcgtacttccaggaagcttccgaatgacttcttaaccagcgttgtggatttgatcggcgccgctaaatctcttctagcctggttagataggtccccttttgctgcagtaaccgattattccgtgaccagaaataatgtgatccagctctgcttggagctaacaacaatcgtccagcaagactgtaccgtttacgaaacagagaataaaatcctacacgtctgcaagactctcagtggcgtgtgcgatcatattatttccctgagtagcgatcctcttgtgagtcaatccgcacaccttgaggtaattcagctggctaacatcaaaccctcagaggggctgggaatgtatataaagtccacttacgatggcctccatgtcataactggaaccactgaaaacagtcccgcagaccgctgcaaaaagattcacgctggtgatgaggttatccaggtcaatcaccagacagtggttggctggcagttgaaaaacctcgtcaacgctctgcgggaggacccaagtggcgtgatcctcaccttgaaaaaaaggccgcagagtatgctgacgtctgcgccggcactcctcaaaaacatgcgttggaaacccctggccctacagcctctgattccaagaagtcccacctcatccgtcgctacaccatccagcaccatttctacacctactaagcgcgactctagcgctctgcaggatttgtacattcccccacctccagcagagccctacattccccgcgacgaaaagggaaatttgccatgcgaggacctgcgcggacacatggtgggcaagcccgtacacaaagggtctgaaagccccaatagctttctggaccaggaatataggaagcggttcaacattgtcgaagaggatacagtcctttattgttatgaatacgaaaaggggcggtcttcctcccagggcaggagagagagtacacctacttacggtaagctgcgccctatcagtatgcccgtggaatacaattgggtgggcgactatgaggatcctaataagatgaaacgagacagcagacgtgaaaatagcctcctcagatatatgtccaatgaaaagattgcacaggaggaatatatgttccagcgaaatagtaagaaagatacaggaaagaagagtaagaaaaaaggcgacaagtctaattcacccactcactacagcctgctgccctcattacagatggatgccctgcgccaggacattatgggcactccagtccccgagacaactctctatcatacttttcagcagtcctcactccaacataagtccaagaagaaaaacaaaggtccaatagccgggaagtcaaaacgccgcatctcctgtaaggacctgggccgaggggactgcgaaggctggttgtggaagaagaaggatgcaaagagctactttagtcagaagtggaaaaaatattggtttgtgttgaaggacgcttcactctactggtacatcaacgaagaggacgaaaaagcagagggattcatcagtcttcccgagtttaaaatcgacagggcgagcgaatgcagaaaaaagtacgccttcaaagcatgtcatccaaagattaagtctttttacttcgcagcggagcatctcgacgacatgaacagatggctcaaccggataaacatgctgaccgccgggtacgctgagcgcgaacggatcaagcaagaacaggattattggtcagagagcgacaaggaagaggcagatacaccttcaacacccaaacaggactcaccacccccaccctatgatacttatccgagacccccgagcatgtcatgtgcctccccatacgtagaagccaaacactccagactgtcatccactgagacgtcccaatcacagtccagccacgaggagtttcggcaggaggttaccggatccagcgctgtttctccgatcaggaagaccgcaagccagagaagatcctggcaggatctgattgagacacctctgacctcatccggactgcactatttacagacactgccccttgaggacagtgttttctcggattccgcagccatctctcccgagcaccgacgacagtctaccctacctacccagaagtgtcatctgcaggatcactacgggccatatcccctggcggagtccgaacggatgcaggtcctcaacggcaatgggggaaaaccaaggtcttttactctgcctcgtgatagcggattcaaccactgctgtctgaatgcccctgtctccgcctgtgatccacaagacgatgttcagcctccagaggtagaggaagaagaggaagaggaagaggaagagggggaagcagcgggggagaacataggcgaaaaaagctag

SEQ ID NO: 183770 - DNA, 3105 bp, synthetic construct
  misc_feature 1..3105: note = Description of Artificial Sequence: Synthetic coding sequence
  source 1..3105: mol_type = other DNA
atggccctgatcatggagcccgtgagcaagtggagccccagccaggttgtggattggatgaagggactggatgattgtctacagcagtatattaaaaactttgagagagaaaagattagcggcgaccagctacttagaataacgcaccaggagctggaagacttgggagtttcccggattggccaccaggagctgattctcgaggctgttgacctgttatgtgcgctgaactacgggctcgagactgaaaacctgaagactctttcacataagcttaacgcgtctgcaaagaatctacagaattttatcacaggaagacgtcgttccggccactatgacggtaggacttcacgtaaattgccaaacgattttctcacctcagtcgtggatctgatcggcgctgccaaatctctgctggcatggttggatcgctctccctttgctgccgtgacggactactctgttactaggaacaacgtgatccagctctgcctcgagttaactacgatagtccagcaggattgcacagtttacgagaccgagaacaagatactgcacgtctgcaaaaccctgtcgggggtatgtgatcatatcatctccctatcttccgatccactcgtatcccagtccgctcatcttgaggtcatacaactggctaatattaaacctagcgaaggtctggggatgtacatcaagtctacatacgatggcttgcacgtgatcacgggcaccacagagaactctcccgctgataggtgtaagaaaatccacgctggcgacgaggtgattcaggtcaatcatcagacagtagtaggatggcagcttaagaatttggtcaatgctctacgagaagacccatctggggtgattctgacactgaaaaagcggccacaatctatgcttacatccgccccagcactgttaaagaatatgagatggaaaccgctggcccttcagcctttgattcctaggagtcctacaagctcggtggcaacacccagttctaccatatctacccccactaaacgggatagctctgctctgcaagatctgtacattcccccaccccctgccgagccatatattcctcgggacgagaagggaaacctgccgtgtgaggacctgcggggtcacatggttgggaagccggttcacaaaggctccgagtctcctaattcattcctggaccaggagtatcgtaaacgctttaacatcgtcgaggaagacactgttctgtactgctatgagtacgaaaaaggccggtcctctagccaaggcagaagggagtcaacgcccacatacggcaagctgcgccccattagtatgcccgtggagtataactgggttggagattatgaagatcctaacaaaatgaagagggatagtaggagagagaatagtctgctgcgctatatgtccaacgaaaaaattgcacaggaagagtatatgtttcaacgcaacagcaaaaaagatactggtaaaaagagcaagaaaaaaggtgataagtccaactccccaactcactacagcctgcttccctccctgcagatggacgcccttagacaggatattatgggcactcctgtgccagaaactaccctgtaccacactttccaacagagctcccttcagcataaatcaaaaaagaagaacaagggacccattgcaggtaaatccaagaggagaatatcctgtaaagacctggggcgcggggactgcgagggttggctgtggaagaagaaggatgcaaaatcctactttagtcaaaaatggaagaaatactggtttgtcctcaaggacgcaagcttatattggtacattaacgaagaggacgagaaagctgagggtttcatctccctgcccgagttcaagattgaccgagccagcgaatgtcgaaagaaatatgcttttaaggcttgccaccctaaaattaagagcttctatttcgccgccgagcacctggacgacatgaacagatggctcaaccgcatcaacatgcttacagcaggttacgccgagagagaacgaatcaagcaagaacaggattactggtccgaatccgacaaggaggaagcagacactccttcgacacctaaacaggactcacccccccctccgtacgacacttacccgcggcccccaagcatgtcgtgcgcttccccctacgtggaagcaaagcactctaggcttagctctacagagacatcacaatcccagtcaagccatgaggaattccggcaagaggtgacaggatcctctgcagtcagcccaattagaaaaaccgcatcacagcgacgatcatggcaagatttgattgaaacccctcttacatcaagtggactgcattacctgcaaactcttccactggaggatagtgtgtttagcgattccgcagctatctcaccagagcataggcggcagtctacactgccaactcagaaatgccacctacaggatcactacggtccctatccattggcagagtctgaacgtatgcaggttctcaatggtaacggtggcaaaccaagatccttcactttaccacgggatagcggtttcaaccactgttgtctaaacgcccctgtcagtgcctgcgacccgcaggatgatgtgcagccgcctgaagtggaggaagaggaagaagaagaggaagaagagggagaggccgccggtgagaatattggcgagaagtcggagtcccgggaggaaaagctgggggatagtttgcaagacctttaccgtgccctggaacaggcgagcttgtccccactgggtgagcaccggatatccacaaagatggagtataagcttagctttatcaagaggtgtaatgatccggtgatgaatgagaagttgcaccgactacgcattcttaagtctaccctgaaagcccgggaaggcgaagtggctattatcgacaaggtcctagacaatccagatcttacatcgaaggaatttcaacagtggaaacaaatgtacctggacctgttcttggatatctgtcagaacacaactagtaatgatcccctcagcatcagttccgaagtggatgtgatcacctcatcactcgctcatacgcactcctatatcgaaacacacgtgtag

SEQ ID NO: 183771 - DNA, 3015 bp, synthetic construct
  misc_feature 1..3015: note = Description of Artificial Sequence: Synthetic coding sequence
  source 1..3015: mol_type = other DNA
atggccctgatcatggagcccgtgagcaagtggagccccagccaggtggttgattggatgaaggggttggacgattgtctgcagcagtatatcaaaaattttgaacgggaaaagatctcgggagaccaactgctcagaattacacaccaggagcttgaggacctgggcgtgtctcggatcggccatcaggaactgatactggaggctgtagatctgctctgcgcgttaaactacggactggagacagaaaaccttaaaacactctcgcataagctcaatgcttctgcgaaaaatttgcagaactttatcactggccggcgacgttccggccattacgacggacgcactagtcgcaagctgccgaacgatttcctcacatctgttgtggaccttatcggtgctgccaagtctttgcttgcctggctggacagatctcctttcgctgccgtcactgattactcggtcaccaggaacaatgttattcagctgtgcctggagcttaccacaatcgtccaacaagactgtactgtatatgagactgaaaacaagatccttcatgtttgcaaaaccctgtccggagtctgcgatcatataatatcactgtcttccgatcccctggtgtcacagagtgcccacttggaggttatccagcttgctaacattaaaccctccgaaggcctgggcatgtacattaaatcgacctatgacggacttcatgtgattactggaacaaccgaaaactctcctgccgaccgctgcaagaagattcatgcaggtgatgaagtgatccaggtaaaccaccagaccgtcgtagggtggcagcttaagaatctggtgaatgcccttagagaagatccctctggggtcatcctaacgttgaagaagcggccccagtcgatgctaacctcagcccccgccttactgaaaaatatgcggtggaaacccctggctctgcaaccactgatcccccggtctccaacctcatcagtggctacaccttcaagcacaattagcacccctactaagcgagacagctctgccctgcaggatttgtatattccgcctccaccagcggaaccctatatcccgagagacgagaaaggcaatctgccatgtgaagacctcaggggacacatggtaggaaaaccggtacataagggttctgaatcgccaaattccttcctggaccaggagtaccgtaagcgcttcaacatcgtcgaagaggatacagtgctttactgttacgagtatgaaaaggggcggtcgtcttcccagggacgcagagagagcacgcccacgtacgagaatagtctcctccgctacatgtcaaatgaaaaaatcgcccaggaggagtatatgttccagcgaaacagcaaaaaagatacagggaaaaaatcaaagaaaaaaggagacaaatctaactcgcccacgcactacagcctgctgccctcactgcaaatggacgccttacgccaggatatcatgggcacccccgtgcccgaaacgaccctttaccatacctttcaacagtcttcactccagcataagagtaagaagaaaaacaaggggcctatcgctggcaagtcgaagcgcagaatctcatgcaaggatctcggtcgcggtgattgtgaaggctggttgtggaagaagaaagacgcaaaaagttatttttcacagaaatggaagaaatattggttcgtgctgaaggacgcatccctgtactggtatattaatgaagaagatgaaaaggccgaaggctttatctcacttcccgagttcaagatcgacagagcttcggaatgccggaagaagtacgctttcaaagcatgccacccaaaaattaagtccttctattttgcagctgagcacctcgacgacatgaacagatggttgaataggattaatatgctgacagctggctacgctgagcgagagaggattaagcaggagcaggattattggagcgaaagcgacaaggaagaagctgacacacccagcacaccaaaacaggactctccaccccccccatatgatacctaccctcgcccacccagtatgagctgtgccagtccttatgtggaggctaagcactccaggctgtctagcacggagacctcccagagtcagtcgtcacatgaggaattccgccaggaggtcaccgggagcagcgcagtttctccaatcaggaagacggcgtcccaacggcgctcgtggcaagaccttattgaaaccccactgacttctagtggactccattatctgcaaacgctgccccttgaggatagcgtattctccgatagcgccgccatttctccagagcatcgacggcaatccacccttcctacgcaaaaatgccatctgcaggaccattatggcccctatcctctggcagagagcgaaagaatgcaggtgctcaatggcaacggtggcaagccacgcagcttcacccttcccagggactctggcttcaaccattgttgtcttaatgctcccgtttctgcttgcgacccacaggacgacgtgcaaccgccagaggttgaagaggaggaggaggaagaagaggaagagggcgaggccgcaggggagaacatcggcgagaaatctgagtctcgggaagagaaattgggggacagccttcaggatttgtatcgggcccttgaacaggcatctttgtcacctttaggtgagcacaggatatctactaagatggagtataagctctccttcatcaaaaggtgcaatgatcccgtaatgaatgagaaactgcacaggctccgcatcttgaagagtacacttaaagccagggaaggggaggtggccattatcgataaagtgcttgacaaccctgacctaaccagcaaagagttccagcagtggaaacagatgtatctcgacctgtttctggacatttgccagaataccacaagtaacgatccactctctatcagctcggaagtcgacgttatcacatctagcctggcccacacccacagttatatcgaaacgcatgtgtag

SEQ ID NO: 183772 - DNA, 2550 bp, synthetic construct
  misc_feature 1..2550: note = Description of Artificial Sequence: Synthetic coding sequence
  source 1..2550: mol_type = other DNA
atggccctgatcatggagcccgtgagcaagtggagccccagccaggttgtcgactggatgaaaggactggacgattgcttgcagcagtatattaagaactttgaacgtgaaaagataagcggagaccagctgctacgaattacacaccaggagctggaagatcttggcgtgagtcggatcggccaccaggagctgatccttgaagctgtggacctcctgtgtgccctgaactacggcctggaaaccgagaatctgaaaactctgtctcacaagctcaacgccagtgctaaaaacctgcagaatttcatcactggtcggcggaggagtggccactacgatggtaggaccagtcggaagctgccaaacgattttctaacgagtgtcgtggatctgattggtgctgccaagagtcttttggcctggctcgacaggtctccattcgctgccgttaccgattacagcgtgacacgcaataatgtgattcaactctgcctggagctaacgacaatcgtacagcaagactgcacggtctatgaaactgagaataaaatattacatgtgtgcaagactctgagcggagtttgcgatcacattatcagcctctcgtctgatccccttgtctcacagagcgcgcacctggaagtcattcagctggcaaacattaagccctccgaaggcttaggcatgtatataaagagcacttatgatgggctccatgttattaccgggacgacagagaactcacccgcagaccgctgcaagaagattcacgcgggggatgaagtgatccaagtgaatcatcaaactgtcccactgatcccgcggtccccaacaagttccgtggcaaccccctcttccaccatctcaacccccacaaaacgcgactcctcggcgctccaggatctatatattccacctcctcctgccgagccgtatattccgcgcgatgagaaaggcaacttaccttgcgaagatctccggggccacatggttggaaagcctgtgcacaaaggatcagagtctcccaatagcttcctcgaccaagaataccgcaagcggttcaatattgtggaagaagataccgtattgtactgctatgagtacgagaagggccggtccagtagccaaggacggagagaatcaactccaacgtacggtaagctgcgcccgatctctatgcctgttgaatacaattgggtcggagactacgaggaccctaacaaaatgaagagggactctaggcgtgagaactctttgctccgctacatgtccaatgaaaaaatcgcccaggaagagtatatgttccaaagaaacagtaaaaaagatactggcaaaaagtccaagaagaaaggagataagtctaactcacccacacattattccctcctcccttcgctgcaaatggacgcactgaggcaagatatcatggggactccagtacctgagaccacactttaccatacattccaacagtcttcgctgcagcacaagtcgaagaaaaagaacaaagggcccattgcaggcaagagcaaaaggagaatcagctgcaaggacttgggtaggggtgattgtgaaggctggctgtggaagaagaaggacgccaaatcctacttttcccaaaagtggaaaaagtattggttcgttctgaaagatgctagcctttattggtatataaatgaggaggatgagaaggctgaagggtttatttccctccccgagttcaagatcgaccgcgcatctgagtgtagaaagaagtatgcatttaaggcttgtcaccctaagatcaagtccttttattttgccgccgaacatctggacgacatgaatcggtggctgaacaggattaacatgctgactgccgggtacgctgaacgtgaaagaataaagcaggaacaggattactggtctgaatcagataaggaggaagctgataccccttctactcccaagcaggattcccctccgccaccctacgacacctatccacggcccccttcaatgagttgcgcttctccctatgtggaggccaagcactcccgcctcagttcaaccgagacatcccagtcacagagctcacacgaggagtttaggcaggaggtaacagggagtagcgctgtgagtccaattaggaaaacagcttcccagagaagatcttggcaggacctcattgagactcccctgacaagctccggcctgcattatcttcagactcttcccctcgaagacagcgtgttttccgatagtgctgccattagcccagaacaccggagacagagcaccttacctactcagaaatgccacctgcaggatcattatggcccatatccactggcggagagtgagaggatgcaagtgctaaatggaaacgggggcaagccccggtctttcacactaccccgggactctggtttcaatcactgctgcctaaacgcccccgtgagcgcttgcgacccccaggacgatgtgcagccacccgaagtggaagaggaagaggaggaggaggaggaggaaggagaagcagcaggagaaaatataggtgagaagtcttag

SEQ ID NO: 183773 - DNA, 414 bp, synthetic construct
  misc_feature 1..414: note = Description of Artificial Sequence: Synthetic coding sequence
  source 1..414: mol_type = other DNA
atggacgacagcgacacccccacctactacctgcagatcgagccccaggatggttgccatcccggcgattctgtcgaacgaagcgtgacctgtctaccttctgctagcgacgaaaatgagaatcaactggatggtgacgggcacgagcatctcacatccagcgacagcgccatggggaagccacaggtttcagaacaggactccctcaacaacaatgagtcttgtaccttgagctgtgaggtcgctgctggtgaaaacctgcagaacaccctgtgcgaagctagtagggacgagcaggccttcctgggcaaggacaaaaaaatacctggaaaaagatcccctcgttccaaaaagggaacagccaagaaaattcctcctgactctcgcatcttatttcctggggggggcctgtag

SEQ ID NO: 183774 - DNA, 1851 bp, synthetic construct
  misc_feature 1..1851: note = Description of Artificial Sequence: Synthetic coding sequence
  source 1..1851: mol_type = other DNA
atggacgacagcgacacccccacctactacctgcagatcgagccccaggacgggtgccaccccggcgactcagtggagcgcagtgttacctgcctcccttcagcttcggacgagaacgagaaccagttagacggagatggacacgagcacctaactagcagcgactcggcgatggggaagccccaggttagtgagcaggattccctgaacaataacgaaagttgtactctttcatgcgaggtcgctgccggtgaaaatctgcaaaacactctttgcgaagcctcacgggacgagcaggccttcctcgggaaggataagaagatacctggcaagagatctccgcgaagcaagaagggtaccgctaagaagattcctcccgggctgttttcaggcgatatcgctcctctcatgcaggaaaaggtcctctccgcagtcacctacgccgtggatgacgaggaggccgcggaagtcaacgccaacgaacaacctgaagcccctaagttagttctacagtctctgttcagcctgattcgtggcgaagtcgaacagttggactccagagctcttcccttgtgcctgcaccaaatcgctgagagttattttcaggaggaggactatgaaaaggccatgaaatttatacagctagagcggctgtatcacgaacagctcctggcgaacctgtcagccatccaagagcagtgggagacaaagtggaaaaccgtccaacctcataccgtgacggcgttgaggaactctgaaaagggcttcaatggggaagactttgagaggctgactaagatctgtgccacacatcaggatccgttactttctaagcacaaaatcgcggcagtggaaaagagccaggagcgaaaatgctccactcagctgctggtttccgaagaccccaaagaagggggggccactaccaaagaatctgaatcaaagacttgtctcggcactgaatcttccaaagagtcccagcatacagtcgaaccgctgggcagctccccttgttgccatcagatggacgttcagactgactccccctctctcagcgtgacagctggcaaagatcacatggaggaacttctctgttcagccgaggccacgctagccctgcacacccagtcgtcagagacagcagggtcccccagtggccccgattcctcagaagatgcctgcgaagatgactcacggctgcaactcgcgcagacggaagcctgccaggatgtcgctagaatcgagggcattgccgaagatccaaaggtctttctgagcagtaagtctaagacggagcctcttatctcccccggctgcgatagaattccccctgctcttatttccgaagggaagtattctcaggctcagagaaaggaattgcggctccctctgagagacgcctcagaggccttgcccactgaccaactggagaataacgagctcaatgagctgcagcagcccgacctcacggattctgacggaaagtcccctcaagcccaggcggactctgatggcagcgagaacgtgctctgtggtaacaatcagattagcgatctaggcatcctgttacccgaggtctgtatggccccagaggagaagggtgataaagacgaccagctcaataaagagactgaggactacctgaactcactgctcgagggatgcctgaaggatacagaggactctctctcctatgaggataatcaggacgatgacagcgacctgctgcaggatcttagccccgaggaggcttcctactctctgcaggaaaatcttccatcagacgaatcttgcctgagcctcgatgacctcgccaagagaatagagatcgcagaggtgaatcagcgctag

SEQ ID NO: 183775 - DNA, 2178 bp, synthetic construct
  misc_feature 1..2178: note = Description of Artificial Sequence: Synthetic coding sequence
  source 1..2178: mol_type = other DNA
atggacgacagcgacacccccacctactacctgcagatcgagccccaagatggctgtcacccaggtgattccgtggaacgaagcgtaacatgccttccttctgcgtccgacgaaaacgaaaatcagcttgatggtgatgggcatgaacacttgacttcgagtgattcagccatgggcaagccccaagtttcagagcaagacagtcttaacaataacgagtcttgtacgttaagttgtgaagtagccgcaggcgagaatttacagaacaccctgtgcgaggcgtctagggacgaacaggccttcctgggtaaagataaaaagatccccggtaaaagaagtccacgcagcaagaaaggtaccgctaagaagattccaccaggtcttttctctggagatattgcaccgctgatgcaagagaaggtgctgagcgctgtgacatatgccgttgatgacgaggaggctgctgaggtgaacgccaacgaacagcctgaagctcccaaactcgtactacaaagcctgttctctctgatcaggggtgaagtagagcagctggacagtcgggctttgcccctttgcctacaccagatagctgagagctattttcaggaagaagattatgagaaggccatgaagttcattcagctcgagaggttatatcacgagcaactattagccaacctgtcagctatacaggaacagtgggaaacaaagtggaaaactgtccagcctcatactgtgaccgcactgaggaattcagaaaagggattcaacggtgaggattttgaacggcttactaaaatttgcgccacccatcaagatccactgttgtctaaacacaagattgcggccgtggagaagagccaggagagaaagtgttctacacagctgctggtctctgaagatccgaaagaggggggagccacgaccaaggaaagcgagtccaagacctgtttaggcacagagtcctctaaagagagtcaacacactgtggaaccgttaggttcctcgccttgttgtcaccagatggacgtgcaaacagacagtccaagtcttagcgtgacagctgggaaggaccacatggaggaactgctatgctccgcagaagcgacactcgcccttcatacacagtcatctgaaacagccggctcccccagcggccccgactcaagcgaagacgcatgtgaggatgatagccggttgcagctggcccaaacggaagcctgccaggacgtggcaagaatcgaaggtatcgccgaagaccctaaggtgtttctgtctagtaaatccaaaacagaaccattaatctcccctggttgcgacagaattccccccgctcttataagcgaaggaaaatacagtcaggcccaaagaaaggaactcagactgccgctacgggatgcctccgaagccctgccgacagaccagctggagaacaatgagttaaacgaactgcagcagcccgatttgactgacagtgatggtaagtctccacaggcccaggcagacagtgatggctctgagaatgtcctctgcggcaataatcagatctccgacttagggatcctcttgcccgaagtctgcatggcccccgaggagaagggagacaaggatgaccagctgaacaaggagaccgaggactacctgaatagcctgctcgaagggtgcttaaaggacaccgaggatagcctgtcgtatgaagacaaccaggatgacgactcagatctgcttcaggacctttcacctgaagaagcctcatactcccttcaagagaatctcccatcagatgagtcctgtcttagcctggacgaccttgctaaacgaatcgagatagccgaggttgtgccaaccgaaggcctggtgtctatactcaagaagcgcaatgatacagtgggagaccaccccgctcagatgcaacacaaaccctccaagcgacgcgttaggtttcaggagatcgacgactcactggaccaagatgaagtggggggaggctcttgcattctgctagtgttgctttgtatcgccaccgtgttcctgtctgtggggggtacagctctgtattgcaccttcggcgacatggaatcacctgtgtgtactgatttcgcagacaatatggatttctactacacgaagcttcttcaaggagtggccgagttaaaacattggatctatctgtcatag

SEQ ID NO: 183776 - DNA, 3057 bp, synthetic construct
  misc_feature 1..3057: note = Description of Artificial Sequence: Synthetic coding sequence
  source 1..3057: mol_type = other DNA
atgaagatgtggctgctggtgagccacctggtgatcatcagcatcaccacctgccttgctgaattcacctggtaccgccgctacggtcatggggtttcagaagaggacaaggggttcgggccaatctttgaggagcaacccataaatacgatatatccagaagaaagtcttgagggtaaggtctctctgaattgccgcgctagagcttccccattccccgtctacaaatggagaatgaataatggagatgtggatcttacatccgatcgatacagtatggtaggtggcaacctggtcatcaataaccctgacaagcaaaaggatgcaggtatttattactgtctggcatcgaacaactacggtatggtgaggtctactgaggcaaccctttcatttgggtaccttgatccatttcctcccgaggaaaggccagaagtaagagtgaaggaaggtaaaggcatggtgctgttgtgtgacccaccttatcattttccagacgatctctcttatcgatggctcctgaatgagttcccagtcttcatcaccatggacaaaaggcgatttgtttctcagacgaatggcaatctgtatatcgctaatgtggaagcatctgacaaagggaattactcctgtttcgtcagttctccatcaatcactaagtccgtgttctccaagtttattcccctgatccccataccagaacggaccacgaagccctaccctgctgatatcgtggttcagttcaaagatgtgtacgccctcatgggccagaacgtgaccctggagtgcttcgcgctcggaaatcctgttccggatattaggtggcggaaggtccttgagcctatgccttctaccgctgagatttccacaagtggagccgtcctgaaaatcttcaacatacaactggaggacgaaggaatctacgagtgcgaggccgaaaatatcagaggtaaagataaacatcaggcacgcatctatgttcaagcttttccggaatgggtggaacacatcaatgataccgaggtggatattggcagcgacttatattggccatgcgtggctaccgggaagccaatcccaaccatccgctggttgaagaatggctacgcctatcataaaggagagttgagactgtacgatgtgacatttgagaacgctgggatgtaccagtgcatcgcggagaatacatatggggcaatttatgcaaatgccgagctgaaaattcttgcccttgcacccactttcgagatgaaccccatgaagaagaaaatcctagccgctaagggcggcagagtaatcattgaatgcaaacccaaagctgccccaaagccaaagttttcttggagtaaaggtaccgagtggctggtgaattcatcaagaatcctcatctgggaggatgggagtttagagataaacaatataacacggaacgacgggggcatctacacctgcttcgcggaaaataacagagggaaagccaactccaccggcacacttgtcatcactgatcctacaaggatcatactcgcccccattaatgccgatattactgtaggtgaaaacgcgaccatgcaatgcgccgcctcttttgacccagctttggatttgacttttgtgtggtcattcaacgggtatgtcatagacttcaacaaagagaacatccactatcagcggaatttcatgttagactcgaatggagagctgttaattagaaacgctcagctgaagcatgccggcaggtacacctgtacagcccagacgatagttgataactcttctgctagcgccgacctggtggtgagaggccccccaggcccccctggcggcctacgcatcgaagacataagggcaacctctgttgcactgacctggagcagaggtagcgataaccacagccctatctccaagtacacaatccagacaaagacgattctgtcagatgattggaaagatgcaaaaaccgatccaccaattatcgagggcaacatggaggccgcccgagcagtggacctgatcccatggatggaatacgagtttagagttgtcgccaccaacactctaggacggggcgaaccttcaattccaagcaaccgcatcaaaaccgacggggccgcacccaatgtcgccccatccgatgtgggggggggcgggggccgaaatcgggagctgaccatcacgtgggcaccgctgtcccgggagtatcactacgggaataactttggctatatcgtcgcatttaaacccttcgatggagaagagtggaaaaaggtcactgttaccaatccagataccggccggtacgtccataaggacgaaacgatgagtccctcaaccgcctttcaggttaaagtgaaggcctttaataataagggagacggtccctattcactggtggccgtgatcaattccgctcaggatgcaccgagcgaggccccaaccgaggtcggcgtaaaagtgctctctagctcagaaatttcggtgcattgggagcatgtactcgaaaagattgtcgaaagctaccagattcggtattgggcggcacatgataaggaagaggctgcaaaccgagtgcaggtcacttcccaggagtactctgctaggttggagaacctgttgccggatacccagtattttatcgaggtcggtgcctgtaactctgccggatgtgggcctcctagtgatatgattgaagcctttacaaaaaaggcacccccctcacaacccccacgaattatctctagcgtccggagcggctcacgttatatcatcacttgggatcacgtcgtggctctatcaaacgaaagtacggtcaccgggtacaaggtactctatcgccccgacggacagcatgacggaaaactgtacagcacacataaacattccatagaagtccccattccaagggatggcgagtacgtggttgaggtgcgagcacactctgatggtggggacggggtggtgagccaggtgaagatctcaggcgcacccactctgtcacctagcctgctggggttactgctcccggcattcggaattctggtctacctggaattttag

SEQ ID NO: 183777 - DNA, 3024 bp, synthetic construct
  misc_feature 1..3024: note = Description of Artificial Sequence: Synthetic coding sequence
  source 1..3024: mol_type = other DNA
atgaagatgtggctgctggtgagccacctggtgatcatcagcatcaccacctgtctggctgtgtctgaggaggacaaaggcttcggacccattttcgaggagcaacctatcaatacaatctacccagaggaatcactcgaaggcaaggtcagcctgaattgcagagcgcgggcctccccttttcccgtctacaaatggagaatgaacaacggggatgttgatctcactagcgacaggtatagcatggtgggaggcaacttggttatcaataaccctgataagcagaaggacgccggcatttattactgcctggcgagtaacaattacggaatggtgaggagcaccgaggctaccctatcatttgggtacctcgaccctttcccgcctgaggagagacccgaagtccgcgtcaaagaagggaagggcatggtcctcctatgcgacccaccgtaccactttccggacgatctgtcatatcggtggctcctgaacgagttcccagttttcatcacaatggacaagcgtagatttgtatctcagactaacgggaacctgtacattgctaacgtcgaggcaagtgacaaaggcaactattcatgtttcgtttctagcccttcaattactaagagcgtgttctcaaaatttataccattaattcccatccccgagaggacgactaaaccatatcccgccgatatcgtcgttcagtttaaagacgtgtatgctttaatgggacagaatgtcactctcgaatgttttgccctgggaaatcccgtccctgacataagatggaggaaagttttggagcctatgccctctaccgccgagattagcacctctggcgctgttctcaaaatcttcaatattcaactcgaggatgaaggaatttacgaatgcgaggccgagaatatccgcgggaaagataagcaccaggcaaggatttatgtgcaggcctttccagagtgggtcgaacatatcaatgacaccgaagttgacattggatccgacctttactggccatgtgtggcgacaggcaagcccatacctactatcagatggctcaaaaatggttacgcctatcacaaaggcgagttgagattatacgatgtaaccttcgagaatgcaggaatgtatcagtgtattgctgagaatacctacggtgcaatatacgccaacgccgaactaaagattctggccttggcccctacatttgagatgaatccaatgaaaaagaaaatcctcgccgcgaaagggggacgagtcattatcgagtgcaagcccaaggccgctccgaaaccgaagttttcttggtcaaagggcactgagtggctcgtcaacagcagcagaatcctaatatgggaagacgggtctctggaaatcaataacatcacccgaaatgatggagggatctatacatgctttgctgaaaacaatcgtggcaaagctaatagtaccgggactctcgtgatcactgaccctacacgcatcatcctagcacccattaacgctgacattactgtcggagagaacgctaccatgcagtgtgccgcctctttcgacccagcactggaccttacgtttgtttggtcctttaatggttatgtgattgactttaataaagaaaacattcactatcagagaaattttatgctcgacagcaacggggagctgctcatcaggaatgcccaattaaaacacgctggacggtacacttgcaccgcccagaccatcgttgacaatagcagtgcatctgccgacctggtggtcaggggaccaccagggcctcctggtgggctgaggatcgaagatattcgggctacaagcgtggcactgacatggtcacgcgggagcgataaccacagcccaattagtaaatatacaattcagacgaagacaatcctcagcgatgactggaaagatgctaaaacggatccccctatcatcgaggggaatatggaggccgctagggcagtggacctaattccttggatggagtacgagtttcgtgttgttgcaaccaacaccctggggagaggcgaaccatcaatcccaagcaacaggatcaaaacagacggcgccgcccctaatgttgcaccttccgacgtgggaggcggcgggggcaggaatagggagcttaccataacctgggctcctttgagtcgggaataccactatggcaacaactttggctatatagttgcgtttaagccctttgatggtgaggagtggaagaaagttactgtcaccaatcccgatactgggcggtacgtccacaaagacgaaaccatgagcccgtccacagcctttcaggtgaaagtgaaggctttcaataacaagggagacggcccctatagccttgtagcagtaatcaactcagctcaagatgcaccgtctgaggccccaaccgaagtcggtgtgaaagtgctcagctcatctgaaatcagcgtgcactgggagcacgtgctggagaagattgttgagagttatcagatcagatactgggcagcgcacgataaagaggaggctgctaatcgtgtgcaggttacctcgcaggaatacagcgccagactcgagaatctgctgcccgacacccagtacttcatagaggtcggagcctgcaattccgctggatgtgggcccccttccgacatgatcgaggcctttacgaaaaaggccccacccagtcaacctccacgcattatcagctccgtgagatcagggagcaggtacattatcacctgggaccacgttgttgcgctgagcaatgagagcacagtaaccgggtacaaggtgttgtaccgcccagacgggcagcacgacggtaagctgtactcaacccataagcattcaatcgaggtgccaattccacgcgacggggagtacgtggtcgaggtaagggcacactccgatggcggcgacggcgttgtgtcacaggtgaaaatatctggggcacctaccctatcacccagtctgttaggcctgcttttgcccgcgttcgggatccttgtgtatcttgagttctag

SEQ ID NO: 183778 - DNA, 1884 bp, synthetic construct
  misc_feature 1..1884: note = Description of Artificial Sequence: Synthetic coding sequence
  source 1..1884: mol_type = other DNA
atgaagatgtggctgctggtgagccacctggtgatcatcagcatcacaacttgcctggctgagtttacttggtaccgccgatatgggcatggtgtcagcgaggaggataaaggctttggaccgatttttgaagaacagccgattaatactatttatccagaggaatctttggagggtaaggttagtctaaactgtcgggcccgagcctcaccctttcccgtgtacaagtggcggatgaacaacggggatgttgacctcactagtgaccgttacagcatggtgggcggtaacctagtcatcaataaccccgacaagcagaaagatgctggcatttactactgcttagcctctaataactacgggatggtgcgttctaccgaagccaccctgtctttcggatacctggatcctttcccacctgaggagcgcccggaggtgcgcgtcaaggaaggtaaaggcatggtgctactatgcgatccaccataccattttccagacgacctgagctaccgttggctgctaaacgaatttcctgtgttcattacaatggataagcgacggttcgtctcccagaccaatggcaatttgtatatagctaatgtggaagcctccgacaaagggaactactcctgcttcgtgagttccccctcaattaccaagagcgtgtttagcaaattcattccattgatccccatacccgagaggacaacgaaaccttaccctgccgacatcgtagtgcagttcaaggacgtatacgccctaatgggacagaacgtgactctggaatgctttgctctggggaatcctgtccctgacattaggtggcgtaaagtgcttgagccaatgcccagcaccgcagagatttctacctccggggccgtcttaaagatctttaatattcaattagaagatgaggggatctacgagtgtgaggctgaaaacatccgcggaaaggataagcaccaggccagaatttacgtacaagccttcccagaatgggtggagcatatcaacgacacagaggtagatatcggaagtgacctgtactggccctgcgtggcaaccggtaagcccatccccacaattcgctggttaaagaatggctacgcttatcacaaaggagagctcaggctgtatgatgtcacatttgagaacgcgggaatgtaccaatgtattgctgaaaatacgtatggcgccatttacgccaatgctgaattaaagatactcgccttagcacccacattcgagatgaaccccatgaagaaaaagatactggctgcgaaagggggtcgtgttatcatcgagtgtaaacccaaggcagcgccaaaacccaagttcagctggtccaaagggaccgaatggttagtgaacagctctaggatcttgatatgggaagacggttctctagaaatcaacaatataacacggaatgacgggggaatctacacctgcttcgccgagaataatcgcgggaaggccaacagtacaggtactttggttatcaccgatccaactagaataatcctggcaccaattaatgcagacatcacagtcggggagaatgctaccatgcagtgcgccgctagcttcgaccccgctctcgacctcacatttgtttggtccttcaatgggtacgtcattgattttaataaagagaacatccattaccagcgcaactttatgctggactctaacggagagctgctgatccggaacgcgcaattaaaacatgctggacggtacacctgtaccgcgcagactatagtggacaacagctctgcctccgcagatcttgttgtgcgtggaaagaatcggaaaggcggagagaagaacatggtggattccttcctcccggtctgcgctagtctgccccctacctggtag

SEQ ID NO: 183779 - DNA, 1884 bp, synthetic construct
  misc_feature 1..1884: note = Description of Artificial Sequence: Synthetic coding sequence
  source 1..1884: mol_type = other DNA
atgaagatgtggctgctggtgagccacctggtgatcatcagcatcacaacctgtctggcggagttcacctggtacaggaggtatggccatggagtgagcgaggaggacaaggggttcggccctattttcgaggagcagccaattaataccatctacccagaggaaagcttagaaggcaaagtgtctctgaactgcagggcgagggcctctccttttcccgtctataagtggagaatgaataatggggacgtggatctgacctctgataggtatagcatggtcggcggcaatctcgtgatcaacaatcctgataagcaaaaagatgccggcatctactattgtctggccagtaacaactacggcatggttagatctaccgaggccacactgagcttcgggtacctggacccattcccacccgaggaaagacccgaagtccgagtgaaggaagggaaaggcatggtgctgctttgcgaccccccttaccacttccctgacgatctatcgtatagatggctgctgaacgagttccccgtgtttatcacaatggacaagagacgatttgtctcccagactaacggcaacctgtacatagctaacgttgaagcctcggataaagggaattatagttgctttgtgtccagcccatctatcaccaaatctgtgttctctaagttcataccactcatcccaatacccgagagaaccactaaaccctacccagccgacattgttgtccagtttaaggatgtgtacgccctcatgggccaaaatgtgaccctcgagtgctttgccctcggaaatccggttcccgacatcagatggaggaaggtgcttgagcccatgccctcaaccgctgagatctccacttcaggggctgtactgaaaatcttcaatattcagttggaagacgaaggcatctacgagtgcgaggctgagaatattaggggcaaggacaagcatcaggctcgcatatatgtacaggcattccccgagtgggttgaacacatcaatgacacagaggtggatatagggtccgacctctactggccttgcgtcgcgaccggcaaacccatcccgactatccgatggctgaaaaacggctacgcctaccataaaggggagctgcgcctctatgatgttacatttgagaacgccgggatgtaccagtgtattgctgagaatacttatggggctatctacgccaacgccgagctgaagatactggctctggcccctacattcgagatgaatcccatgaaaaagaagatactcgccgcaaaagggggccgtgtgatcatcgaatgtaaaccgaaagcagcgcccaagccaaaattcagctggagtaaaggcaccgagtggttggtgaactcatccagaatactgatttgggaggatggttctctcgaaattaacaatataacacgcaacgatggcggtatctacacatgttttgctgagaacaatcgcggtaaagcaaactccactgggactctggtcattaccgatccaacacggatcatcctcgcacctatcaacgccgatatcacagtcggagagaacgccactatgcagtgcgctgccagctttgaccccgccctcgatctcacattcgtgtggagtttcaatggttatgtgattgattttaataaagagaatatacactaccagcgaaatttcatgctggactccaatggcgagcttttgatcaggaatgctcagctcaaacatgcagggagatatacctgtaccgcccaaactattgtggacaattcctctgccagtgctgacttggtggtcaggggcaagaaccgcaagggaggtgagaaaaatatggtggattcctttctgccggtatgtgctagcctgcctccaacgtggtag

SEQ ID NO: 183780 - DNA, 1884 bp, synthetic construct
  misc_feature 1..1884: note = Description of Artificial Sequence: Synthetic coding sequence
  source 1..1884: mol_type = other DNA
atgaagatgtggctgctggtgagccacctggtgatcatcagcatcacaacctgcctggccgagtttacgtggtatagacggtacggacacggagtttctgaggaggacaagggctttggtcccattttcgaggagcagcctataaacaccatctatcccgaagaaagcctggagggaaaggtgagcctcaactgccgggctcgagcctccccctttcccgtttataaatggagaatgaataatggcgacgtagacttaaccagcgacagatacagtatggttgggggtaatttagttatcaacaaccccgataagcagaaagacgcaggaatctactactgcttagcatctaacaattacggcatggtgagaagtaccgaagctactctgtcgtttggatatctggacccttttcctccggaagagaggccggaagtgagagtgaaggagggcaaaggaatggtcctgctttgtgaccccccatatcatttcccggacgacttgagttaccgatggctgctgaacgagttccctgtattcataacaatggacaagaggagattcgtcagtcagacaaatgggaacctatatatcgccaacgttgaagcgagcgacaaaggaaactactcatgttttgtgagctctccctcaatcactaaatctgttttctcaaagttcattcccttgatccccatcccagagcgtacgaccaaaccataccctgcggacattgttgtgcagttcaaggacgtgtatgcattaatgggccagaatgtcactttggagtgctttgccctgggtaaccctgtacctgacattaggtggcggaaggtgttagaacccatgccttctacggcggaaataagtactagtggtgccgtgttaaagatattcaacatccagcttgaggatgagggcatatacgagtgcgaggcggaaaacattagagggaaggacaaacaccaggcgaggatttatgttcaggcgttccccgaatgggtggagcacatcaacgacactgaggttgacattggcagtgacttgtactggccctgcgtggctacgggaaaacctattccaaccattagatggctgaagaacggctacgcatatcacaagggggaattgagactctacgatgtgactttcgagaacgccggcatgtatcagtgcattgccgagaatacctacggcgccatctatgcgaacgccgagctgaaaatcttggctctcgcgccaaccttcgaaatgaacccaatgaagaaaaaaattttagccgcgaaagggggacgtgtgattatcgaatgcaagcctaaagcagcgcccaagcccaagtttagttggtcaaaagggaccgagtggttggtgaactctagtcgcattcttatttgggaggatggcagcctggagatcaacaacatcacccggaatgacggcggaatctacacgtgctttgccgagaacaaccggggtaaggctaattctacagggaccctggttattaccgaccctacacgcattatactggccccaatcaacgccgatattaccgttggcgaaaacgccacaatgcagtgtgctgccagttttgatcctgccttagacttgacattcgtatggagctttaacggatatgtgattgactttaacaaggaaaatatccattaccagcggaactttatgctggacagcaatggcgagctactgatacgcaacgcccagctgaaacatgccggcagatacacctgtacggctcaaactatagtcgacaatagttctgcctcggctgatttggtggtgaggggtaagaataggaaggggggcgagaagaacatggtggactccttcctgcccgtgtgtgcaagcctgcctcctacttggtag

SEQ ID NO: 183781 - DNA, 258 bp, synthetic construct
  misc_feature 1..258: note = Description of Artificial Sequence: Synthetic coding sequence
  source 1..258: mol_type = other DNA
atgaagatgtggctgctggtgagccacctggtgatcatcagcatcaccacctgcctagcagagttcacgtggtaccgccgatacgggcatggagtgagtgaagaggataagggctttggtcctattttcgaagagcagccgattaatacgatttatccagaagaatcactcgagggaaaagtctcactgaattgtcgcgcccgggcctctccatttcctgtgtacaagtggaggatgaacaacggcgacgtcgactag

SEQ ID NO: 183782 - DNA, 3057 bp, synthetic construct
  misc_feature 1..3057: note = Description of Artificial Sequence: Synthetic coding sequence
  source 1..3057: mol_type = other DNA
atgaagatgtggctgctggtgagccacctggtgatcatcagcatcaccacctgtctcgctgaatttacttggtatcggagatacggtcatggcgtgtcagaggaggataagggattcggtcctattttcgaggagcagcccatcaacaccatctaccctgaggaatctctcgaggggaaggtctcacttaactgcagggccagggccagccccttccctgtgtataagtggcgtatgaacaatggcgatgttgacttaacatccgatcggtacagcatggtaggagggaacctggtcataaacaacccagataaacagaaggatgccggcatatactactgcctcgcctccaataattacggcatggttagatcgacagaagccactctctctttcggctacctcgacccctttccaccagaagagagacccgaagtacgcgttaaagaaggcaagggcatggttctcctgtgcgatcccccctatcactttcccgacgacctatcttaccgatggctgttgaatgagttccctgttttcatcaccatggacaagaggcgatttgttagtcaaaccaacggtaacctttacatcgcaaacgtggaggccagtgacaagggcaactactcctgtttcgtgtcctctccaagcatcactaaaagcgtgttctctaagtttatccccctgatacccattccggagagaaccacaaaaccatacccggccgatatagtcgtccagtttaaagatgtgtacgcgctcatggggcagaacgttacgcttgagtgcttcgccctaggcaatcctgttcccgatatccgctggcgcaaggtgctggagccaatgccctcaacagctgaaatttcaaccagcggggctgtcctgaaaatctttaacatccagctggaggatgaaggcatctacgagtgcgaggctgaaaacatccgaggcaaggacaagcaccaggcgcgcatttacgtccaggcttttccggagtgggtcgagcacattaacgacacagaggttgacatcggcagtgatttatattggccatgcgtcgcaactggaaaacccatccctaccatccggtggttaaaaaacgggtacgcttatcacaaaggagagctgcggctgtacgacgtcaccttcgagaacgccggtatgtatcagtgtatcgcagaaaatacatacggggctatttatgctaacgccgaattaaaaatcctcgcactggctccaacgtttgagatgaaccccatgaagaagaagattcttgccgccaagggtgggcgggtgatcatcgagtgtaagcctaaggccgcgccaaaacctaagttctcttggtctaagggcacagagtggttggttaattcttcccgtattcttatctgggaagatgggtcactcgagatcaataacatcactcggaatgacggtggaatctacacttgtttcgccgagaataacagaggtaaggctaactcgactggcacgctcgtcatcactgatcctaccagaattatacttgccccaatcaatgccgatatcacagtcggggagaatgcgacaatgcagtgcgcggcctcttttgacccagcgctggatttgacattcgtctggagctttaacgggtacgtgattgactttaacaaggagaatattcattaccagcgaaattttatgttggattccaacggagaattactcatcagaaatgcgcagttgaagcacgccggtcgatacacatgtaccgcacagactatcgttgacaactctagcgcgtccgccgacctggtcgttaggggccctcctggaccccccggcggactccgtattgaagacatacgcgcaacaagcgttgccctgacatggagccgtggctctgataaccactcacccatctctaaatacactatccagacgaaaactatactttccgacgactggaaagatgcaaagaccgacccccccatcattgaggggaacatggaggcagccagagccgttgacctgatcccctggatggagtatgaatttagggtggtcgctacaaataccctggggaggggggagccgagtatcccttcaaaccggataaagacagacggtgccgccccaaacgtcgctccatcggacgttggcggcggaggcgggcgcaatcgtgagctaacaatcacttgggctcccctcagcagggagtatcactacggtaataactttggctatattgtggctttcaagccctttgatggcgaggagtggaaaaaggtgacagttaccaaccctgacaccggccgatatgttcataaggacgaaactatgtccccctcaacagcgttccaggtgaaggtaaaagctttcaacaataaaggggatggaccatattcacttgtcgccgtgataaatagcgctcaggacgccccatcagaagccccaacagaggttggagttaaggtgctttcctcaagcgagatatcggtgcactgggagcatgtgctagaaaaaatcgtggagagctaccagattaggtattgggcggctcacgacaaggaggaggcggccaaccgggtgcaggtgaccagccaggaatactccgccagactcgagaacctactccctgatactcaatatttcattgaggtcggagcctgcaactctgctggctgtggtccaccttctgatatgattgaagcctttaccaaaaaagcccccccaagccagcccccgcgcattatctcctctgtgcgctctggttcccgctacatcatcacatgggaccatgtagtagccctgagtaatgagtctaccgttacagggtacaaggtcctatataggcctgatggacaacacgatggcaaactctattccacccacaaacatagcattgaggtgcccatcccgcgcgatggggaatacgtagtagaagtccgcgctcactctgatggcggcgacggcgtcgtttctcaggtgaagatcagcggagctcccacattgtctccatctctactcggccttctactgccagcctttggaattcttgtgtacttggagttttag

SEQ ID NO: 183783 - DNA, 192 bp, synthetic construct
  misc_feature 1..192: note = Description of Artificial Sequence: Synthetic coding sequence
  source 1..192: mol_type = other DNA
atgaagatgtggctgctggtgagccacctggtgatcatcagcatcaccacgtgcctagctgagttcacatggtatcgccgctacggtcacggcgtgtctgaagaagataaaggatttggccctatcttcgaggaacagccgattaacacaatatatccagaggaatctcttgaaggcaaggtgtctttatag

SEQ ID NO: 183784 - DNA, 273 bp, synthetic construct
  misc_feature 1..273: note = Description of Artificial Sequence: Synthetic coding sequence
  source 1..273: mol_type = other DNA
atgaagatgtggctgctggtgagccacctggtgatcatcagcatcaccacatgtctcgccgagttcacttggtaccggcggtatgggcatggcgtttccgaggaagacaaaggcttcggacctatatttgaagagcagcccattaatactatttaccctgaagaatccttggaagggaaagtttctcttaactgtcgtgccagagcttcaccttttcctgtttacaaatggcggatgaacaacggggacgtggatttgacgagcgaccggtag

SEQ ID NO: 183785 - DNA, 222 bp, synthetic construct
  misc_feature 1..222: note = Description of Artificial Sequence: Synthetic coding sequence
  source 1..222: mol_type = other DNA
atgaagatgtggctgctggtgagccacctggtgatcatcagcatcacgacttgtctggcggagttcacgtggtatagacgctatggtcacggggtgagtgaagaggataagggctttgggccgatcttcgaggaacaaccaattaacacaatttaccctgaagagtctcttgagggtaaggtgtctctaaattgccgcgctcgggcatcccctttcccatag

SEQ ID NO: 183786 - DNA, 3123 bp, synthetic construct
  misc_feature 1..3123: note = Description of Artificial Sequence: Synthetic coding sequence
  source 1..3123: mol_type = other DNA
atgggcaccgccacccggcggaagccccacctgctgctggtggccgcagtggcgcttgtgtccagtagtgcatggagctctgcactcgggagtcagacaacgtttggcccagtattcgaggaccagcccctttccgtgctcttccctgaagagtctactgaagagcaggtgctgctggcctgccgcgctagagcatccccccccgccacataccggtggaaaatgaatggaaccgagatgaagctggaacccgggtcccggcaccagttggtggggggcaacctggtcattatgaatcccaccaaggcccaggatgctggggtctatcagtgtctcgcaagcaaccctgtgggaacagtcgtgtcacgcgaagctatcttgagatttggctttctgcaggagttttccaaggaggagcgcgaccctgtcaaagctcatgaaggttggggagtgatgctgccatgtaatccccccgcacattaccctggcctgagttatagatggttgttgaatgagttcccaaatttcatccccacagatggtcgccactttgtgtcacagaccactgggaacctctacattgccagaaccaacgccagcgacctcgggaattattcttgccttgcgacatcccatatggacttcagtacaaaaagcgtgttcagcaaatttgcacaattgaacctagcagctgaggacaccaggcttttcgctccttcaatcaaagccaggttccccgccgagacctacgccctagttggacaacaggtgaccttggaatgttttgccttcggtaaccctgtgccgcgcatcaaatggcggaaggtggacggctcactgtctccccagtggaccaccgctgaaccgaccttgcagatccctagcgtttcttttgaggacgagggcacctatgaatgtgaagcagaaaacagcaaaggtcgagacactgtccaaggccgaattatcgttcaggcacagccagaatggctgaaggtgatcagcgatactgaagccgacattggttctaatttgcgctggggctgtgctgctgccggcaaaccgcgtcctacggtgcgatggcttagaaacggcgagccactagcatcccagaacagggttgaagtactggccggggacctgcgcttttctaagctcagtctggaggattccggcatgtaccagtgcgtggctgagaacaagcacggtactatctatgcctcggcggaactagctgtccaggccctggcaccagactttaggctgaatccggttagacgacttatccctgcagcaaggggaggggagatcttaattccatgccaaccaagggctgccccaaaagccgtcgtgctgtggtctaaagggaccgagatcctagtgaattctagtcgagtgaccgtgacccctgatggaaccctgatcataaggaacattagtcgatctgacgaggggaaatatacatgctttgctgaaaattttatgggaaaagctaatagtaccggtatcctgtcagtccgcgacgccactaagatcacactggcaccaagcagtgcagatattaacttgggggataatttgactcttcagtgccatgctagccatgatcccactatggatctgacctttacttggaccctcgatgacttccccatcgacttcgataagccaggcgggcactatcggcgtactaacgtcaaagagaccatcggcgatctgaccatcctgaacgcacagctcaggcatggtgggaaatatacatgcatggctcaaacagtcgtggactctgcctccaaagaggccactgtactggttcggggaccaccagggccaccagggggagtcgttgttagagacattggggataccaccatccaactctcatggtcccgtggcttcgataaccatagtccaatcgccaagtacacactgcaggcccgcacccctccggccgggaagtggaagcaggtgcgaaccaatccagccaacatagaaggcaatgccgaaaccgcccaggtcttaggtctgactccatggatggactatgagttcagagttattgctagcaacattcttggaacaggggaacctagcggcccaagttctaaaatccgtacgcgtgaagcggccccatctgtcgccccatcgggtctgtcaggcggcgggggagcccctggagagttgattgttaactggacgcccatgagtcgcgaatatcagaacggggatgggttcggctatctgttatcttttaggaggcagggcagcacgcactggcagactgcccgcgtccccggagctgatgcccaatactttgtttacagcaacgagagcgtccggccatatactccgttcgaggtgaagatcagatcctacaaccgcagaggtgacggccccgagagtctcactgctttggtctactcagccgaggaggaaccacgagtcgctcccactaaggtttgggccaagggcgtctccagcagcgaaatgaacgtcacttgggagccagtgcagcaggatatgaacgggatcttgttggggtatgagatcagatattggaaggccggcgataaagaggccgccgctgatcgcgtgcgcactgctggcttggatacatcagcaagggtcagtggactccacccgaatacaaagtaccacgtgactgttcgcgcgtacaacagagccggaactggacccgcctcaccttccgcgaatgcaaccacaatgaaacctccgcctcgcaggccgcccggaaatatcagttggaccttctcatcgtcgagcctgtctatcaagtgggaccccgtagtcccctttagaaacgagtccgctgtgactgggtataagatgctgtaccaaaatgatctccatcttactcccaccttgcaccttactggaaaaaactggatcgaaattcctgtgcctgaggatatcggccacgctctggtgcaaatcagaacaacaggaccgggaggcgacggcattcccgcagaggtgcatatagtgaggaatggaggtaccagtatgatggttgagaacatggctgtccggcctgctccccatcccggcactgtaatttcccactctgtggctatgcttatcttgataggatcattggagctttag

SEQ ID NO: 183787 - DNA, 3087 bp, synthetic construct
  misc_feature 1..3087: note = Description of Artificial Sequence: Synthetic coding sequence
  source 1..3087: mol_type = other DNA
atgatgttcccctggaagcagctgatcctgctgagcttcatcggctgcctgggaggtgagctgctgctccaaggtcctgtgttcatcaaagagcctagcaacagcatctttcccgtgggatccgaggacaaaaagattaccctgcactgcgaggcacgcggtaacccttcgccccactacagatggcaactaaatggatctgatatcgatatgtcaatggagcatagatataagctgaatggaggaaatctggtagtgatcaatcccaatcgtaactgggataccggtacctatcagtgctttgccacgaactctctgggaaccattgtgagtcgggaagccaaactgcagttcgcttacctggagaactttaagacgaaaatgcgcagcaccgtctctgtacgggaaggccaaggtgtcgtgctgctgtgcggaccgccaccacatagcggggagttgtcttacgcatggattttcaacgagtacccaagcttcgtagaggaagacagtaggcggttcgtgtcgcaggagaccggccacctgtatatttcaaaggttgagccttctgacgtgggaaactacacatgtgtggtcacctccatggtgacaaatgcaagagtcctcgggtcaccgacccccctagtcctgcggagcgatggcgtgatgggcgagtacgagcccaagatcgaagtccagttccccgagaccctgccagctgctaaaggttcaacggtcaaactcgagtgcttcgccctgggaaatcccatcccacagatcaactggaggcggagcgacgggctgcctttttctagcaagataaaattgaggaagttcagtggcgtgctcgaaatcccaaatttccagcaggaggatgccggaagttatgaatgcattgctgaaaatagcagaggcaagaatgttgcgcgtggccggctgacttactacgctaagccacactgggttcagttgataaaggacgtggagatcgctgtggaggacagcctgtactgggaatgtcgggcaagtggtaaaccaaagccctcataccgatggctcaagaacggggccgctctggtgttggaggaaaggactcagatcgagaacggtgctctcaccataagcaatctatcagtgaccgatagcggcatgttccagtgcatcgctgaaaataagcacggactcgtctatagcagtgccgagcttaaggtcgtcgcaagtgcaccggatttctctaaaaaccccatgaagaaactggtccaagtacaggttggttctttagttagtctcgattgcaaaccacgagcgtctccaagagctctgtcatcatggaaaaagggagatgtgtccgtgcaagagcacgagcggattagcttactgaatgacggcggactgaagatcgctaatgtaaccaaggcagatgccggcacttatacctgtatggcagaaaatcagttcgggaaggcaaatggcacgacccacctcgtggtcactgagccaacacggatcacactggccccttcaaatatggacgtctctgtgggggagtccgtgatcctcccctgccaggttcagcacgacccgttgttggacatcatttttacctggtacttcaacggcgccctcgcagatttcaagaaagatggctctcactttgagaaggtgggcggttcttccagcggggacctgatgattcggaacatccagctaaagcactctggcaagtacgtttgtatggtccagacaggggttgacagcgtctcgtcagcagccgacttgatcgtgagagggagcccaggaccccccgaaaacgtgaaagtggatgaaatcacagacaccactgcccaactgtcgtggaaagagggcaaagataaccattcaccagtaatcagctacagtatccaggctcgaacgccattctctgtgggatggcaaaccgtcactactgtgcctgaagtcattgacggaaagacacatacagctaccgtggtcgaactcaatccctgggtcgagtacgaatttcgggtggtggcctcaaacaagatcggcggaggtgagcctagcctgccttctgaaaaggtccggactgaggaagccgtgcctgaggtgcctccctccgaagtgaatgggggtgggggatctcgttctgagcttgtcattacgtgggaccccgtacccgaggagcttcagaacggggaaggattcggctacgtggttgcattccgccccttgggcgtcaccacctggattcagaccgtggtcacatctcccgacacacctaggtacgttttccggaacgaatcaatagtgccttactccccatatgaggtaaaggttggagtgtacaacaataagggggagggccccttttcccccgttacaacagtatttagcgccgaagaagaaccaaccgttgctcccagtcaggtctccgctaattccctgagcagttctgagatcgaagtgtcatggaacactattccctggaaactcagtaacggtcatctactgggttatgaggtgcggtactggaacggcggaggaaaagaagaatcatcctctaagatgaaggtggctggcaacgagacaagcgctaggttacgaggtctgaagagtaacctcgcttactatacagcagtaagagcctacaactcagctggagcaggccctttcagtgccactgttaatgtcaccaccaagaaaacccctccatcccagccacctggaaacgtggtctggaacgccaccgatacaaaggttttactcaactgggaacaggtgaaagccatggagaatgagtccgaagttacagggtataaggtgttttaccgcacatcctcccagaacaatgtacaggtactgaataccaataagacaagcgccgagctggtactcccaatcaaagaggattatattatagaagtaaaagctaccactgacgggggggacggaacttcgtcggaacagatcagaattccgcggatcacttccatggatgctcgcggatctacttcagctatctccaacgtacatccgatgtcgtcatatatgcctattgtcttatttctgatcgtttatgtgttgtggtag

SEQ ID NO: 183788 - DNA, 2424 bp, synthetic construct
  misc_feature 1..2424: note = Description of Artificial Sequence: Synthetic coding sequence
  source 1..2424: mol_type = other DNA
atgggcgagtacgagcccaagatcgaggtgcagttccccgagaccgtgccgaccgcgaaaggcgccaccgtgaaactggaatgtttcgctcttggaaaccccgtgcctactataatctggcgcagggccgatggaaagccaattgcccgcaaagccaggcggcataaatcaaacggcatcctggagatcccgaatttccagcaagaggatgcaggcctgtatgagtgcgtggccgagaactcacgcggcaaaaacgtagccagggggcagttaacattctatgcacagccaaattggatccagaagatcaacgacattcacgtggcgatggaagagaatgtattctgggagtgtaaggcaaacgggcgccccaagcctacctacaaatggctgaagaatggagaacctctcctcaccagggaccgcatacaaatcgagcagggtactctaaatatcactatcgtaaacctctccgatgcgggcatgtaccagtgtctggcagagaacaagcatggagtcatcttcagtaacgcagagctgagcgtgattgccgtgggaccggatttcagtcgcaccctgcttaagcgcgtgaccctggtgaaggttggcggggaagtggtgatcgagtgtaagccaaaagcctccccgaagcccgtgtacacttggaagaaaggtagggacattcttaaggagaacgaaagaatcactatttcagaagatgggaatctgcggatcataaatgttaccaagagcgacgccggctcttacacatgtatcgccacgaatcattttggcacagcctcttcgactggtaacctggtggtcaaggatccaacgcgcgttatggttccaccatctagcatggatgtgactgtaggtgagtcaattgtgttaccctgtcaggtgacccacgaccattcactggatatcgtctttacatggtcttttaacggtcacttgattgattttgaccgcgacggagaccatttcgagcgagtgggcggacaggacagcgcgggcgatctgatgatccgtaatattcagttgaaacacgccggaaaatacgtgtgcatggtgcagacaagcgtcgatcgccttagtgccgcagctgacttgattgtcagaggtcctcccggaccacctgaggcagttactattgatgaaatcacagacaccaccgctcagctgtcatggaggccgggaccagacaaccactcccctattaccatgtatgtcatccaggccaggacaccttttagtgtcggatggcaagctgtgagcactgtgccagagctgatcgatggaaaaaccttcactgccactgttgtgggcctcaacccatgggtcgaatacgaattccgaaccgttgctgctaacgtgatcggtatcggagagccttcccggccaagcgagaagcgtaggacagaggaagctttacccgaagtcacacctgccaatgtgtctggtggcggaggcagcaaaagtgagctcgtgattacctgggagacagttcctgaagagctgcaaaatgggcgaggtttcggatacgtcgttgctttccggccatatggcaagatgatatggatgctgacagtcctcgcctccgccgacgcttctcggtatgttttcaggaacgagtcggtacatcctttctctccttttgaagtgaaggtcggcgtgttcaataataagggcgaggggcccttttctcctacgacagttgtctatagtgccgaggaggagcctaccaaacctcccgcctctatttttgcccggtcactgtctgccaccgatattgaagtcttttgggcaagccccctagagaaaaatcgtggtcgtattcagggctacgaggtcaagtactggagacatgaggacaaagaggagaatgcccgcaaaattagaactgttggcaatcaaacgagtactaagattactaatctgaagggaagtgtcttataccacttggcagtcaaggcgtacaacagcgcaggaaccgggccatcttctgccactgtaaacgtgaccactcgcaaacctcctcctagccagcctccaggcaatatcatatggaactctagtgactccaaaatcattcttaattgggaccaagtgaaggccttggacaatgaaagtgaggtcaagggctataaggtgctttacagatggaaccggcaatcaagcacctcagtgatcgaaactaacaagacatctgtggaattgagtctgccgtttgatgaggattatattattgagatcaaaccgttctctgacggaggcgatggctctagctcagagcaaatacgcatacccaaaatctcgaacgcctacgctcgcggctctggggcatccacatctaatgcttgcacgctgtcagccatctccactatcatgatctccctgaccgcgcggtcatcattgtag

SEQ ID NO: 183789 - DNA, 2097 bp, synthetic construct
  misc_feature 1..2097: note = Description of Artificial Sequence: Synthetic coding sequence
  source 1..2097: mol_type = other DNA
atggaggagaacgtgttctgggagtgcaaggccaacggccggcccaaacctacgtataagtggctgaagaatggcgagcccttattaacaagggaccgcatccaaatcgagcaaggaacactgaatatcaccattgttaacctgagcgacgccggcatgtaccaatgcctggcagaaaacaagcacggcgttattttcagtaacgccgagctctccgtcattgccgtgggaccagacttttctagaactcttctgaaaagagtgacattagttaaagtgggaggtgaagttgtgatcgagtgcaagccaaaggccagccctaagccagtatatacatggaagaaagggagagacatcctgaaagagaacgagagaatcactatcagtgaggatggaaacctgagaatcattaacgttacgaaaagcgacgcgggatcatatacatgtattgctaccaaccactttggtactgctagttctaccggtaatctcgtggttaaggatcccacccgggtcatggtccctccttcgtctatggacgtcaccgttggcgaaagcatagtgctgccatgccaggtcactcatgatcacagtttagacatcgtgttcacctggagtttcaatggccacctaattgacttcgatagggatggagaccacttcgagcgcgtgggcggacaggattcagcgggggaccttatgattaggaatatccaactgaagcacgctgggaagtatgtatgcatggttcagacatcggtcgaccggctgtccgcggctgctgacctgatagtaaggggacctcccggcccaccggaggccgtgactattgatgaaatcaccgacacaactgcacaactgtcctggcggcctgggccggataaccatagccccatcactatgtatgttatccaagctcgcacccccttttctgtcggctggcaagcggtttctacagtacctgagctgatcgacggcaaaaccttcaccgccactgtagtggggctcaacccatgggtggagtatgagttccgtacagtcgccgctaatgtaatagggatcggagagccatcacgcccatctgaaaagcggaggacagaagaagcactgccggaggtcacccccgctaatgtcagcggaggggggggtagcaaaagtgagctagtgatcacatgggaaactgtgcccgaggaactgcagaacggtcgcggcttcgggtatgtcgtcgcattccggccttatggcaagatgatctggatgctgaccgtgcttgccagcgctgatgcttcacgttacgtgttccggaatgagtccgtccatccctttagtccctttgaagtgaaagtgggagtatttaataacaagggtgaggggccattcagtccgacgaccgtggtgtacagcgctgaagaggagccaacgaagcctcccgcttccatattcgccaggtctctctccgctactgacatcgaggttttctgggcatcccccttggaaaagaatcgcggtcgcatacaaggctacgaggtgaagtactggaggcatgaggataaagaggagaatgcccggaaaataagaactgtggggaaccaaactagcaccaagataacaaaccttaagggctccgtcctgtaccatctggccgttaaagcctataacagcgccggtacgggaccttccagtgcgactgtgaatgtgaccacgcggaaaccccctccatcccaaccccccggaaacatcatctggaatagttccgacagcaaaattatattgaattgggaccaggttaaggcactggacaacgagagcgaggtcaaaggatataaggtgctttaccggtggaatcggcagagtagtacttctgtgatcgaaaccaataaaacgagcgtggaattaagtcttccattcgacgaggactacattatcgagatcaagcccttctcggatggcggcgacggatcatcctcagagcagatccgcatccctaagattagcaacgcgtatgctcgcggatctggcgcaagcacaagtaacgcatgcaccctgagcgcgatatcaacaattatgatctccctgaccgctagatcatccttatag

SEQ ID NO: 183790 - DNA, 3081 bp, synthetic construct
  misc_feature 1..3081: note = Description of Artificial Sequence: Synthetic coding sequence
  source 1..3081: mol_type = other DNA
atgcggctgccctgggagctgctggtgctgcagagcttcatcctgtgcctggccgacgactctactctccacggaccgattttcattcaggaacctagtccagttatgtttcccctcgattctgaggagaagaaggtgaaacttaattgtgaggtcaaagggaacccaaaaccccacatccggtggaaactcaatggcacagacgtcgataccggcatggactttaggtatagtgtggtcgagggctcgctcctgattaataatcccaacaaaacgcaggatgctggcacgtatcagtgtaccgctactaacagcttcggaacaatcgttagtagagaagccaaattgcagtttgcttatttggataattttaaaacacgcacacgctcaaccgtatccgtcagaagaggacaagggatggtgctgctgtgcggcccaccaccacacagcggggagctgtcctacgcttggatctttaacgaatacccaagttaccaagataatcgccggtttgtctctcaggaaaccggtaacctctacatcgcaaaggtggaaaaatcagacgttggcaactatacttgtgtagtgaccaatacagtcactaatcacaaagtgctaggcccgccgacaccactgattctgagaaacgacggagtaatgggcgagtacgaaccaaagattgaggtgcaattcccagagacggtgccaacagctaagggtgccacagttaagctggagtgttttgcactcggcaatcctgtgccaacgataatctggagacgcgccgatggcaaaccaatagctcggaaggcccgcagacacaaatccaacggaatactagaaattcccaattttcaacaggaagacgccggattgtacgaatgtgtggctgaaaacagccggggcaaaaatgtcgcacggggccagctgaccttctatgcacaacccaattggatccagaagataaacgacatacatgtagcaatggaggagaatgttttctgggaatgtaaggcaaatgggagacccaagcctacctacaaatggctcaagaacggggagccactgctgacccgtgacaggatccagattgaacaaggcacgctgaacattactattgtcaatctgtcagatgccggcatgtaccagtgcctcgctgaaaacaaacacggcgttattttcagcaacgctgaactcagtgttatcgccgtgggacctgatttcagcaggactctgctaaaaagggtcacacttgtcaaggtgggtggagaggtagtcattgaatgcaaacctaaagctagtccaaaaccagtgtacacatggaaaaagggtcgggatatattgaaagaaaacgagcggatcaccatctccgaagatgggaacctgaggatcatcaatgtcactaagtccgacgccggaagttatacttgcattgctaccaatcactttggaacagccagctctaccggcaaccttgtcgtcaaagacccaaccagagtaatggtgccacccagctccatggacgttacagtaggtgagtctattgtcctgccgtgtcaggtgactcacgaccacagccttgatatcgtgttcacatggagcttcaatgggcatctgatcgacttcgacagggatggtgaccattttgagagggtaggtgggcaggatagcgcaggtgacctgatgatccgtaacatacagctgaagcatgccgggaagtacgtttgtatggtgcaaacctctgtggatcggttgtccgcggccgctgaccttatagttcgcggccccccaggaccccctgaggccgtaaccattgatgagatcaccgatactacagcccagctgtcatggagaccaggacccgacaatcacagccctatcacgatgtacgtgattcaggctcggaccccatttagtgtcgggtggcaagctgtgtctacagttccagaactaattgatgggaagacgtttaccgctaccgtggtcggcctcaatccttgggttgaatacgagtttagaactgtggccgctaacgtgataggcataggtgagccaagtcggccttccgaaaaacgacgtaccgaggaggcactccccgaggtgactcccgcaaacgtctctggaggcggaggctcaaaatccgagctggtcattacttgggaaactgtgcctgaggaattacagaatggtaggggctttggctatgtggtggctttcagaccttatggtaagatgatttggatgttgaccgtcctggcctcagcagatgcaagccggtatgtattcagaaatgagagcgtacaccccttttcaccttttgaggtgaaggtgggtgtattcaataataaaggggaaggtccattctccccaaccactgtggtctatagcgcagaggaagagcccacaaagccacccgctagtatatttgcgagatcattgagtgccaccgacattgaagtgttctgggcgagtccactggaaaagaatcgtggacggattcagggttacgaggttaagtactggcgacacgaggacaaggaggaaaatgctcgcaagatacggactgtggggaatcagacttccactaagatcacaaatctaaaggggtctgtgctttaccatctggccgtcaaagcatataattctgccggcactgggccgtcctccgccacggtgaatgtcaccactaggaaacctcccccatcacagccaccaggcaatatcatttggaacagcagtgacagcaaaattatacttaattgggatcaggtgaaagcactcgacaatgaaagcgaggttaaggggtataaagtcctatatcgttggaaccggcagagcagcaccagcgtaattgaaaccaataaaacttccgtggagctgagcctcccatttgatgaggattacattatcgaaatcaaacccttttccgatgggggtgacgggtccagcagcgagcagattagaatcccgaagatctccaatgcctatgctagggggagcggggcatcaacatccaacgcatgtactttgagtgctatttctacaattatgatctctctcactgctcgctcctccctgtag

SEQ ID NO: 183791 - DNA, 3081 bp, synthetic construct
  misc_feature 1..3081: note = Description of Artificial Sequence: Synthetic coding sequence
  source 1..3081: mol_type = other DNA
atgcggctgccctgggagctgctggtgctgcagagcttcatcctgtgcctcgctgacgactctactctgcacgggcctatctttatccaagaacctagtccggtcatgtttccattagacagcgaagaaaaaaaggtcaagctaaattgcgaagtgaagggtaaccctaagccccatattcggtggaagctgaacgggactgacgtggacacagggatggattttaggtatagtgtagtggagggatccctgctgatcaataacccaaataaaacccaggatgcgggcacctaccagtgcactgcaacaaactcattcggaaccattgtgtccagggaagctaaacttcagttcgcctaccttgacaacttcaagacgcgtacccgctctaccgtttccgtgcggaggggacaagggatggttcttttgtgtggccccccaccacacagcggagaactcagttacgcctggatcttcaacgaatatccatcatatcaggacaaccgaaggtttgtgagccaggagacgggaaacctgtatatcgctaaggtggaaaagagcgacgttggcaactacacctgcgttgtaaccaacacagtcactaatcacaaagtactgggacccccaacacctctgattttgcgcaacgacggtgtcatgggcgagtatgaacctaagatcgaggttcagttccccgagacagtaccaactgctaaaggcgccactgtgaagctggaatgctttgccctgggaaacccagtcccgaccatcatctggagacgggccgatggcaaaccaatcgcccgcaaggctaggagacacaagtcgaacggaattctcgagatcccaaactttcagcaagaagatgcagggctgtacgagtgcgttgcagaaaattccagaggaaaaaatgtggccagaggccagcttacattctacgcccagcccaattggatccagaagataaatgacatacacgttgcaatggaggagaatgttttttgggagtgcaaagctaacggacggccgaaacccacctacaaatggctgaagaacggcgagccactgctcacccgtgatcggattcagatcgagcaggggacgctgaacataaccatcgtgaatttgtccgatgcaggaatgtatcagtgtctggccgagaacaagcacggagtgattttctctaacgccgagctatccgttatcgccgtgggacccgatttctccagaaccctccttaagagggtaaccctggtgaaagtgggaggtgaggttgtgatcgaatgcaagccaaaagcctcccccaaaccagtgtacacatggaagaagggcagagacattctgaaggaaaacgaaaggatcaccatttctgaggacggcaacctgcggattatcaatgtcactaagtcagacgccgggagttacacctgcatagcaacgaatcacttcgggactgcgagcagtaccggcaaccttgtggtgaaggatcccacccgcgtgatggtgccacctagctcaatggatgtgactgtgggcgaaagtatagtcctgccgtgtcaggtgactcacgaccactcccttgatatcgtgttcacatggagttttaatggacacttaattgactttgatagagacggagatcactttgagcgggtgggtggccaggattccgcaggagaccttatgattcgcaatatccagttaaaacacgctggaaaatacgtttgcatggtacagacctccgtcgatagactgtccgctgctgccgatctgattgttcggggcccccctggtccccccgaggcggtcacaatagacgagatcactgacactacagctcagctcagctggagacccggccccgacaatcacagcccaatcaccatgtacgtgatacaggcccgtacacccttctctgttggatggcaagctgtgagcacggtgcctgaattgattgatgggaagacctttacggcgactgtggtgggtctgaacccgtgggtagagtatgagttcagaaccgtggcagccaatgtgatagggattggggaaccttcccgtccctcagagaagcgccgcacagaagaagctttacccgaggtgacacccgccaacgtatcaggcgggggggggtccaagtccgagctcgtgattacctgggaaactgtacccgaggagctacaaaatggacggggtttcggctatgttgtcgctttcagaccatacgggaaaatgatatggatgctgactgttctcgctagcgccgatgctagccggtatgtgttccgtaacgagagtgtgcacccattcagtccctttgaggttaaagtcggagtatttaataataagggggaaggaccattctcccctacaactgtggtatactccgccgaggaagagcccaccaagccacccgcttccatttttgcccggagtctctctgctactgacatcgaggtcttctgggcctcaccgctcgagaagaaccggggacgaattcagggttacgaagtgaagtactggcgacatgaggacaaagaagaaaatgcgcgcaaaataagaacagtaggcaatcagactagtaccaagatcacaaatctgaaaggctctgtgctgtaccatctggctgtgaaggcttacaacagcgcagggacaggcccttcttctgccactgtcaacgtaaccacccgcaagccacctccgtctcagcccccaggcaatattatttggaactcaagtgattctaaaattatcctgaattgggaccaggttaaggctctcgacaatgaaagcgaagtcaagggctacaaggtgctataccgctggaataggcagtcatcgacttccgtaattgaaacaaataaaacaagtgtggagctgtccctgccatttgatgaggactatattatcgagatcaagccgttctcggatggcggggacgggtcttccagcgagcaaatcagaataccaaagatcagcaatgcgtacgcccggggcagtggcgcctcaacgtccaatgcctgtactcttagtgccatcagtaccattatgatctccctaaccgctcgaagctccctgtag

SEQ ID NO: 183792 - DNA, 351 bp, synthetic construct
  misc_feature 1..351: note = Description of Artificial Sequence: Synthetic coding sequence
  source 1..351: mol_type = other DNA
atgcggctgccctgggagctgctggtgctgcagagcttcatcctgtgcctggctgatgactcaaccctgcacgggccaatcttcattcaggagccttcaccagtgatgtttccactagactcagaggagaagaaagtgaaacttaattgcgaggtgaaggggaatccaaagcctcacatcagatggaagctgaacggtaccgacgtggacactggcatggacttccggtacagcgtggtagaggggtccctcttgataaacaatccaaacaaaacccaggatgcaggcacgtaccaatgcacagctaccaatagtttcggaacaatcgtgagtagagaggccaagttatag

SEQ ID NO: 183793 - DNA, 3081 bp, synthetic construct
  misc_feature 1..3081: note = Description of Artificial Sequence: Synthetic coding sequence
  source 1..3081: mol_type = other DNA
atgcggctgccctgggagctgctggtgctgcagagcttcatcctgtgtttggcagatgattccacccttcacggtcctatatttatccaggagccctccccagtgatgtttccactggactctgaggaaaagaaagtgaagcttaactgcgaagtgaagggaaacccaaagcctcacattagatggaagttaaatggaacagacgttgacaccggcatggacttcagatacagcgtagtggagggaagcctgcttattaacaatccgaacaagacacaggacgcagggacgtaccagtgtacggccaccaattcgttcggcacgatcgttagtcgcgaggccaagctgcaattcgcttacttggacaattttaaaacccgaactcggtccaccgtctctgttagaaggggccaaggaatggtgctactgtgtggtccacccccccattctggggaactgtcatatgcttggatatttaacgagtacccctcctaccaggataaccgacggtttgtctctcaggagaccggaaatttgtacattgctaaggtcgaaaagtctgatgtgggcaattacacatgcgttgtaaccaataccgttacgaatcataaagtgctgggtccgcccacacctcttatcctgcgcaatgacggcgtgatgggggagtacgaacccaaaatcgaagtccagtttcctgagacagtccctaccgccaagggagccaccgttaaattagagtgctttgccctgggaaatcccgtcccgaccattatctggcgaagggccgacggcaaacctatcgcacgcaaggccaggcgtcacaagtcaaacggcatccttgagatccccaacttccaacaggaagacgctggcttgtacgaatgcgttgccgagaactctcgaggaaaaaacgtggcgaggggacaattgaccttttacgctcagccgaactggatccagaaaatcaatgatattcacgtcgccatggaggagaatgtcttctgggagtgcaaggctaacgggcgccccaaacctacatacaagtggcttaaaaatggggagccgctcctgacaagggacaggatccaaatcgagcaagggacgcttaatatcacaatagtgaacttgtcggacgccggaatgtatcagtgcctggccgagaataagcatggggtgattttctccaatgccgagcttagtgtgattgccgtggggcctgacttctcgcgcaccttgctcaagcgcgttaccctggtgaaggtagggggcgaggtcgtgattgagtgcaagccaaaggcttccccaaagccggtctatacttggaaaaaggggagggacattttgaaggagaacgagcgaatcactatatccgaggatggcaatctaaggatcatcaatgtaaccaaaagcgatgcagggagttacacgtgtatcgcaactaaccattttggtaccgcctcctccacaggcaatttagtagtgaaggacccgacgagggtaatggtgccgccatcaagtatggacgttactgtcggcgagagtatcgtactgccctgccaggttacacacgatcactcccttgatatcgtctttacctggagtttcaatggccacctcatcgattttgatcgagacggggatcactttgagcgggtaggcggtcaggacagtgctggcgatttaatgatacgaaacattcagcttaagcatgctgggaagtacgtgtgcatggtacaaacaagcgtcgacagattatccgcggcggctgacctcattgtgagggggccaccagggccaccagaagcggtgacaattgatgagatcaccgatacaaccgcccagctgtcatggcgccccggaccggacaaccacagcccaattacaatgtacgtcattcaggctagaactcctttctccgttggctggcaggctgtttctaccgttccggaactcattgatggtaagacgtttacagccacagtcgtgggactcaacccttgggtggaatacgaattccggacagttgccgccaacgtgattggcatcggcgagccttcccggcccagcgagaagaggcggaccgaggaggccctacccgaggttacacccgccaacgtgtcaggcggtggaggatcaaaaagcgagttggttatcacctgggaaacagtgccagaggaactccagaatgggagagggttcggttacgtcgtcgctttcaggccttacgggaaaatgatttggatgctcaccgtcctggccagcgcagatgcctctcgttatgtctttagaaacgaatctgtgcatccctttagccctttcgaggttaaagtcggtgttttcaacaacaaaggagaaggtcccttctccccaacgacagtagtttacagtgcggaggaggagccaacaaagccaccagctagtatttttgctaggagtcttagcgcaacagatatcgaggttttttgggcgtctccactggagaagaatcgtggcaggatccaaggctacgaggtcaaatattggagacatgaagacaaggaggagaatgcaagaaaaataaggacagtgggcaaccagacctcaacaaaaataacgaatctcaagggctctgtgttgtatcatctggccgtcaaggcttataactcggcgggtacaggaccaagctctgctaccgtgaatgtgactacccggaaacccccaccctcccaacccccggggaatattatctggaactccagtgattccaagatcattctgaattgggaccaggtgaaggcacttgacaacgaatccgaggtaaaaggttataaggtgctctaccgttggaatcgacaaagcagcacgtcggtgattgaaacaaataagacaagtgttgagcttagtctgcctttcgatgaggactacatcattgaaattaagccattttcagatgggggggatggctccagctccgaacagattcggattcccaaaatctctaatgcttacgctagaggttcaggcgcctctacctctaatgcctgcactctatctgcaatcagcaccataatgatttctctcaccgcccgttcaagtctgtag

SEQ ID NO: 183794 - DNA, 2097 bp, synthetic construct
  misc_feature 1..2097: note = Description of Artificial Sequence: Synthetic coding sequence
  source 1..2097: mol_type = other DNA
atggaggagaacgtgttctgggagtgcaaggccaacggccggcccaaacctacctataagtggttaaagaatggcgaacccctactaaccagagacaggatacagatcgaacagggaactttgaatattaccattgtcaacctatccgatgcaggtatgtaccagtgtctcgccgagaataagcatggagtcatcttttccaacgctgagttgagcgttattgcggtgggtcctgacttttctagaaccctgctgaagagggtgacactcgtcaaggtcggcggcgaggtcgtgattgaatgtaagcccaaggcaagtcctaaacccgtctacacatggaagaaggggcgagatattctgaaagagaatgagcggatcacaatttctgaggacggcaatctgcgtatcataaatgtcactaagtccgatgccggctcctacacttgtatagcaacaaaccactttggaacagcaagtagcaccggtaatctcgtcgtcaaggacccgactagggttatggtccctcccagctctatggacgtgaccgtgggggagtcaatcgtgctgccctgtcaggtgacccacgatcactctctggatattgtctttacctggtcgttcaatggccatttaatcgattttgaccgcgatggtgatcattttgagagagtgggaggccaggatagtgctggcgacctcatgattcgcaatatccagctgaaacacgccggcaagtacgtctgcatggtccagacttcggtggatcgcctgagcgccgctgccgacctgatagtacgaggtccacctggaccccctgaggccgtgacaatcgacgagataaccgacactaccgcacagctgagctggaggccgggtcctgacaaccatagtcccattacgatgtatgtcatacaagcccgcacccccttttccgtagggtggcaagcggtgagcacggtccctgagctgattgatggcaagacatttactgccactgttgtcggactcaatccttgggttgaatacgaattccggacagtggcagcaaatgtgattgggataggtgagcccagtcggccctctgagaagaggcgcacggaggaagcgttacccgaggtaacaccggctaacgtgtctggtggtggcgggtcaaagtctgagctcgtgatcacatgggagaccgtgcctgaggaactacaaaatggcagaggttttggttacgtagtagccttccggccgtatgggaagatgatctggatgctcaccgtgttggcatcagccgatgcatctcggtatgtatttagaaacgaatccgtccatccattctccccatttgaggttaaagtgggcgtgttcaacaacaagggtgaagggccattcagccccaccacagtagtctattctgccgaagaagaaccaaccaaacctcccgcgtctatctttgctaggtctctgagtgctaccgacatcgaggtgttctgggcttccccactggagaaaaataggggacgtatacaaggttacgaagttaaatactggaggcatgaggataaggaagagaacgcccggaaaattcgcactgtcggtaatcagacttcgaccaaaatcacaaatttgaaaggaagtgtcctgtaccacctggccgtgaaagcctataactcagctggcaccggaccctcatccgctacagtgaatgttacaacaagaaagccccctccatctcagcctccaggcaatattatatggaacagttccgactctaaaatcatccttaattgggatcaggtcaaagctcttgataatgaatctgaagttaagggctataaggtactttacaggtggaatcgccagtcaagtacctccgtcattgagactaacaagacatccgttgaactctcccttccatttgatgaggattatataatcgagatcaaacccttcagcgacggaggggatggaagcagttcagagcagatcaggatccctaaaattagcaacgcctacgcacggggatccggagcatccacctctaacgcatgcaccttaagtgccattagcactattatgatctcattgaccgcccgcagtagcctctag

SEQ ID NO: 183795 - DNA, 165 bp, synthetic construct
  misc_feature 1..165: note = Description of Artificial Sequence: Synthetic coding sequence
  source 1..165: mol_type = other DNA
atgcggctgccctgggagctgctggtgctgcagagcttcatcctgtgtctggccgacgactcaacactacacggacccatcttcatccaggagcccagtcccgttatgtttcccttggattctgaagagaagaaagtaaaacttaactgcgaggttaaaggttag

SEQ ID NO: 183796 - DNA, 3303 bp, synthetic construct
  misc_feature 1..3303: note = Description of Artificial Sequence: Synthetic coding sequence
  source 1..3303: mol_type = other DNA
atggccagcagctggaagctgatgctgttcctgagcgtgaccatgtgtctttcggagtattctaagagcttaccagggttgtcaacatcgtacgccgctctcctgaggatcaaaaagagcagtagctcttctctatttggctctaagacccgaccgcggtatagcagccctagtttaggcacgctgagcgcgtcttctccctcttggcttggagcggctcaaaattactacagcccgatcaatctgtaccactcctctgatgcgtttaagcaggatgaatcagtcgactacggacccgtgttcgttcaggagcccgatgatatcatctttccgaccgattccgatgaaaaaaaggtggcacttaactgcgaggttcgcggcaacccagtgcccagttacaggtggctcagaaatggcacggagatagatctcgagagcgactatcgatatagcttaatagatggaacttttatcatctctaacccctcagaggctaaggatagcggccactaccagtgcctggctacgaacacagtcggtagcattttatcaagagaggctaccctccaatttgcatatctggggaacttctctggcagaacgagatccgctgtgtccgtgcgcgaaggacagggggttgttttgatgtgctcacctccacctcactcccctgagattatctactcttgggtgtttaatgaatttccttcattcgtggcagaggatagtcggaggttcattagccaggagacaggcaatctgtacatcagtaaggtgcagacaagtgatgtgggctcctatatctgtctggtgaagaataccgtaaccaacgcccgcgtcctgagcccacctaccccactgaccctaaggaacgatggcgtcatgggcgaatatgaaccgaaaatcgaggtccatttcccctttacagttaccgcagccaaaggcactactgttaaaatggagtgtttcgctttgggtaatccggtgcccaccattacatggatgaaagttaacgggtatattccctcaaaagcacgtctgagaaagagccaggctgtacttgagattcctaatgtacagctggacgatgctgggatatatgagtgcagggccgagaattcacgggggaaaaactcgtttcgaggacagctacaggtctacacctaccctcattgggtggagaagctgaacgacactcagctcgacagcggctcccccctgcgttgggagtgcaaagccacaggtaagcctagaccgacatacagatggctgaaaaatggcgtcccactgtccccccaatcccgcgttgagatggtgaacggggtgctcatgatccacaacgtcaaccagtcagatgccggtatgtaccagtgcctcgccgagaacaaatatggagccatctacgcatctgctgaactgaagattctcgcgagtgctcccaccttcgccctgaaccaactcaagaaaactattattgtaactaaggatcaagaggtggtgattgagtgtaaacctcaaggttccccaaagccaaccatttcctggaaaaagggagatagggccgtgcgggaaaataagcgaatcgcaatactgcccgatggatccctcaggatactgaatgcatcgaagagcgacgaggggaagtatgtatgtaggggcgagaatgtcttcggcagtgccgagataattgctagtttgtcagttaaggaacccacgcggatcgagcttacaccaaagaggacggagctgaccgtgggcgaaagcattgtgttgaattgcaaagcgattcatgacgcgtctctggacgttaccttctactggacgctcaagggccagcctatcgacttcgaggaagaaggcgggcactttgagagtatcagagctcaggcctcgagcgctgatctcatgatccgtaacatcctgctgatgcacgcagggcggtacggttgcagggtgcagactaccgccgattcagtgtccgacgaagcagaattgctggtcagggggccacctggtcctccaggcatcgtgattgtggaagagattacggagtcaacagcgaccctaagctggtcaccagcagcggacaaccacagccccatcagctcctataacctccaggccaggagccctttttcactcggctggcagactgtgaaaacagttccggaaataataaccggcgatatggagtccgctatggcggtggacctgaatccctgggtcgaatacgaattcagggtcgtggcgaccaatcctatcgggacaggggacccttctactccctcccgcatgatcaggacaaatgaagccgtgcctaagacagctcccacaaatgtctccggaaggtcagggaggcgccatgagctagtcattgcttgggagccggtgagtgaggaattccagaatggcgaagggttcggttacattgtggcgtttcggcccaacgggacccgcgggtggaaggaaaaaatggtgacgtcctcggaggcaagcaagttcatttatagggatgaatccgtcccccctctgaccccatttgaggtcaaggtcggagtgtataacaacaaaggcgacggacccttttcgcaaatagtggtcatctgcagtgccgaaggcgaaccatctgccgcccctactgacgtgaaagcaacctccgtcagtgtgagtgagattctggtagcttggaagcatatcaaagagagccttggcagacctcaaggattcgaggtgggttactggaaggatatggagcaggaagacacagcggaaaccgttaaaacacgtggaaacgagtcattcgtgatactaacaggtctagaaggaaataccctgtaccacttcactgtcagggcctacaacggcgcaggatacggtcctcccagttctgaagtctctgcgaccacaaagaaatcccccccctcccaggcaccctcaaatctgcgctgggagcagcagggtagtcaggtctcactgggctgggaacccgttataccccttgcgaatgaatctgaggttgtgggatataaggtgttctacaggcaggagggccacagcaattctcaggtcatcgaaacacagaaactacaagcagtggtaccactccctgacgcaggggtgtatattatagaagtcagggcttatagtgagggcggcgacggaacagcaagtagccagattcgggttccctcctactcaggtggaaaaatcacatccgcacaatctacactccactccctaagcacctcgtcaagctctgtcacactgcttctggccttgatgatcccgtccacttcatggtag

SEQ ID NO: 183797 - DNA, 3081 bp, synthetic construct
  misc_feature 1..3081: note = Description of Artificial Sequence: Synthetic coding sequence
  source 1..3081: mol_type = other DNA
atggccagcagctggaagctgatgctgttcctgagcgtgaccatgtgcctgagcgaatctgtcgattatggccctgtattcgtgcaggaaccggatgatatcatctttcctaccgacagtgatgagaagaaggtggcactgaactgcgaggttcggggtaatccggtgccaagctataggtggttgagaaacggtaccgagatcgatctggagagtgattatcggtattccttaatcgacggaaccttcattatatccaatcctagcgaagcgaaggattccgggcactaccaatgtctcgctactaacactgtggggagcatcttaagcagggaagcgacgctgcagtttgcctacctcggcaatttctctggaaggactagatccgccgtgtctgtgcgcgagggccagggcgtcgtattgatgtgtagccctccacctcactcacccgaaataatttatagctgggtgttcaacgaattcccgtcatttgtggccgaggattcccggaggtttattagccaggagaccggaaacctgtatattagcaaagtgcaaacatccgacgtgggttcctatatatgtctcgtgaagaatacagtcacaaacgccagagtgctgtcaccccccaccccattgaccttgaggaacgacggggtaatgggtgagtacgagcctaagattgaggtgcatttcccgttcactgtgaccgccgccaagggcactactgtgaaaatggagtgctttgctctgggcaatcctgttcccacaattacatggatgaaagtaaatggttacataccttcgaaagcccggttaaggaagagtcaggcagttttagaaataccaaatgtgcaacttgacgacgccggtatttatgaatgcagggctgagaatagccgcggtaaaaattcatttcgtggacagttgcaggtttatacctatccacactgggtcgaaaaactgaatgacacacagcttgattccgggagtccgctccggtgggaatgtaaggccacaggaaagccccggccaacttacagatggttgaagaatggggtgcccttgagcccacaatcacgggtcgaaatggtgaatggcgttcttatgatacataatgtaaatcagtcagacgctggaatgtatcagtgtctggcagagaacaagtatggagccatatacgcaagtgccgaactaaaaatcctggcaagtgctcctactttcgccttgaaccagctgaagaaaactatcatagtgacaaaggatcaggaagttgtcatcgaatgcaaaccccagggtagtcctaaacctactatctcatggaaaaaaggcgatcgggccgtgcgcgaaaacaaacgcatcgccatactgccggacggcagccttcggattctgaacgcttctaaatcagatgagggcaagtacgtgtgccggggggagaacgtgttcgggtcagctgaaatcattgccagcctgagtgtgaaagagcctaccaggattgaactgaccccaaaaagaaccgagctgaccgttggcgaatcaatcgtgctgaactgtaaggccatccacgacgccagcctcgatgtgacattttactggaccctgaagggtcaaccaatagattttgaagaagaaggaggacattttgaaagcattagggcccaggcctcttctgcggatctgatgatccgcaacattctgctcatgcatgccggtaggtacggatgcagggttcagaccactgcagacagtgtgtccgacgaagcagaacttctcgtgcggggcccaccgggaccacccggaatcgtcatcgtagaggagatcactgaatcaaccgctaccctaagctggtctcccgccgctgacaaccacagccctatatctagctacaatcttcaagccaggagtcctttctctctgggctggcagaccgttaaaactgttccagaaattatcacaggggacatggaatctgcgatggccgttgatctgaatccctgggtcgaatatgagtttagagtggtcgctacaaacccgattgggacaggagacccgtcaaccccttcacgaatgatcagaacaaatgaggcagtaccaaagactgcgcccacgaacgtgagtggtcgcagcggcaggagacatgagctcgtcatcgcctgggagcccgtgtcagaggagtttcagaacggggagggttttggatacattgtagccttcaggcctaacggaactagggggtggaaagagaaaatggtgaccagcagcgaagcctctaaatttatctacagagacgagagcgtgcctccactgacgccattcgaggttaaggtgggggtgtataacaacaagggtgacggacccttctcccagatcgtggtgatttgcagcgctgagggcgagccctctgctgcacccacagatgtgaaggccacgagcgtgagcgtgtccgagatcctggtggcttggaagcacattaaagaatccctgggcaggccccaaggcttcgaagttgggtactggaaggacatggaacaagaggacacagccgagacggtcaaaacacgcggaaacgagtcattcgttatactcaccggactggaaggaaacactctgtaccattttacagtcagggcatataacggggccggctacggcccgccatcatctgaggtctctgctaccaccaaaaaatctcccccttcgcaggcaccgagcaatctcagatgggagcagcagggatcacaggtgtccctcggctgggagcctgtgatcccactggcgaacgagtccgaggtggtgggatataaggtattttatcggcaggaggggcactccaacagtcaggtgatcgaaacccagaagcttcaggccgtcgttcctcttccagatgcgggtgtgtacatcattgaggtgagggcttacagtgagggtggagacggcaccgcctcctcacagatcagggtgccaagttactctggcgggaagataacgagtgctcaatcgacactgcactccctttccacctcttcctccagtgttaccctgctcctagccctaatgatcccttcgactagttggtag

SEQ ID NO: 183798 - DNA, 3303 bp, synthetic construct
  misc_feature 1..3303: note = Description of Artificial Sequence: Synthetic coding sequence
  source 1..3303: mol_type = other DNA
atggccagcagctggaagctgatgctgttcctgagcgtgaccatgtgcctgtcagagtatagtaagtctctgccaggcctgtccacttcttacgctgctttgctgcggattaagaagtcctcgtcctcctccctttttggcagcaagacacgtccaaggtacagcagccccagcctaggcacacttagcgctagctctccgtcatggttgggcgctgcgcagaattattattcaccaatcaatctataccattcctccgacgcctttaagcaggacgagtcagtggattacgggccggtgttcgttcaggagcctgacgatatcatatttcccacagactcagacgagaaaaaggtggcactgaactgcgaggtgcgcggaaacccggtcccatcatatcgttggctaaggaacgggaccgaaattgacctggagagtgactaccgttatagtttgatcgacggaacttttatcatcagtaatcccagcgaggctaaggactctgggcattaccaatgtcttgccacgaataccgtaggaagcatcctgagccgtgaagccacactgcagttcgcgtacctagggaatttttccggcagaacgaggagcgccgtcagcgtaagggagggccagggcgtagtgctaatgtgctctcctcccccgcattcccctgaaatcatatatagttgggtgttcaatgagttcccctcctttgtggctgaagatagtaggcggtttatcagccaagagaccgggaatctgtatatttcaaaagtgcagacctctgatgttggcagttatatttgcctcgtgaagaacaccgtgaccaacgctcgggttctctctcctccaactcctctgaccctccggaatgacggggtcatgggcgagtacgagcctaaaatagaggtccactttccattcaccgtgacagctgcgaagggaaccaccgtgaagatggaatgctttgcgctgggaaacccagtgccaaccattacatggatgaaagttaatgggtatataccttcgaaggcaaggttgcggaaatcacaagccgtgctagagattccaaatgtacagctggatgacgcgggcatctacgaatgccgggctgaaaattctcgaggcaagaattcgtttagaggacaactgcaagtgtacacgtatccacactgggtggaaaagctgaatgacacacagcttgatagtggttctccgctgaggtgggagtgtaaggcaacaggcaagccaagaccgacgtacagatggctgaaaaatggagtgcctctctctccccagagccgggtggagatggtgaatggagtgctgatgatccacaacgtaaatcagtcagacgctggtatgtaccagtgtctggcagagaacaagtacggtgccatctatgcatctgcagagttgaagatccttgcctccgcaccaacatttgccctgaatcagttgaagaagacaatcatcgtcaccaaagatcaggaggtggttattgagtgtaaacctcaggggtccccaaaaccaacgattagctggaaaaagggcgatagggctgtgcgcgagaacaagagaatagccattctgcccgacggttccctgagaatcctgaatgcttcaaaaagcgacgagggaaagtacgtgtgtcggggagaaaatgtgtttggatctgctgaaattatcgctagtctgtccgtcaaagaacctacaagaattgagctgacgccaaagaggaccgaactcactgttggagaatccatcgtcctgaattgcaaggcaattcatgatgcttctctggacgtgacattttattggacactgaagggacagcctatcgatttcgaggaggaaggcgggcacttcgagtctatcagagcacaggcttcatctgccgatcttatgattcgcaatattctgctgatgcatgcaggtagatatgggtgtcgtgtgcaaacaacagccgattcagtgtctgacgaggcggagctcttggtgaggggacctcctggccctccaggcatagtaatcgtcgaggagatcacagagtcaaccgccaccttatcttggagccctgcagccgacaatcacagccccatcagcagctataacctgcaggccagaagccccttctccctgggttggcaaaccgtgaagaccgtgcccgagatcattaccggggacatggaatccgcgatggctgttgacttaaacccatgggtcgaatatgagtttagggttgtggccacgaaccctattggcaccggggatcctagcacaccttctcgtatgatacgcacaaacgaagcagtgcctaaaacagctcccaccaacgtgtccggacgcagcggtcggcgccacgaactcgtgattgcctgggagccggtgagcgaggagtttcaaaatggggagggcttcggctacatcgtagcgttccgaccaaacgggacacggggatggaaagagaagatggtgactagcagcgaagccagtaagtttatttaccgtgacgaaagcgtccctccgctgacgccctttgaagtgaaagtcggggtgtacaacaataagggagacggacccttctctcagatcgtggttatctgttccgctgaaggcgaaccctcagccgcacctaccgacgtcaaggctacctctgtgagcgtcagcgagatattggtcgcttggaagcatattaaggagtcactggggcgtccacaggggttcgaagtcgggtactggaaggacatggagcaggaggatacagccgagacagtgaaaacccgggggaatgagagctttgtgattctgacagggctggaagggaacaccctgtaccatttcaccgtgcgggcctacaacggtgccggctatggtcctccttcttccgaagtgtccgccaccaccaaaaagagccccccttcccaagctccttcaaaccttcgctgggagcagcaaggctcgcaggtctctctcggatgggagcctgtgatacctctcgctaacgagtctgaagttgtgggctataaagtattttataggcaggagggtcacagcaacagccaagtgattgaaacacagaaactgcaggcagtcgtgccgcttcctgacgctggtgtctacattatcgaagtgcgcgcatatagcgaaggtggggacggaacagcttcttcccagattcgcgtgcccagttactctggggggaaaataacatcagcgcagtcgactcttcactctttaagcacctctagcagctcagtgacactgcttttggccctgatgatcccaagcaccagctggtag

SEQ ID NO: 183799 - DNA, 3303 bp, synthetic construct
  misc_feature 1..3303: note = Description of Artificial Sequence: Synthetic coding sequence
  source 1..3303: mol_type = other DNA
atggccagcagctggaagctgatgctgttcctgagcgtgaccatgtgtctctccgaatacagtaagtccctgcccggattgtctacctcctacgccgctctgctccgcatcaagaagtcttcaagcagcagtctcttcggatccaagactaggcccaggtatagctcaccctccctgggtaccctgtctgcgtcttccccatcctggctgggcgcagcccagaattactactcccctatcaatctctaccatagcagcgatgcctttaagcaagacgagtcagtggattacggtcctgtatttgtgcaggaaccagacgacattattttccccaccgattcagacgaaaagaaggttgcccttaattgtgaggttagaggaaaccccgtgcccagttacaggtggctgcgaaacgggacagaaatcgacctggagagtgattatcgttattcactgatagacggcacgtttatcatctcaaatccgtccgaggcaaaagattcaggacattatcagtgccttgccaccaacacagtgggaagcattttaagccgcgaggccacactccagtttgcatatctggggaactttagcgggcggactcgtagcgccgtatcagttcgtgagggacagggcgtggttttgatgtgcagcccccctccccattccccagagattatctactcctgggtattcaacgagttcccctcatttgtcgcagaagactcccgaaggttcatctctcaggagactggaaacctgtacatctccaaggtgcagacaagtgacgtggggtcctatatttgtctagttaaaaatactgttacaaacgctcgcgttcttagcccccccacgccactcaccctgagaaacgacggagtgatgggcgagtatgagcctaaaatcgaggtgcatttcccgtttactgtgactgctgccaaaggaactactgtcaagatggaatgtttcgctctcggaaatcccgtgcctaccattacatggatgaaggtcaacgggtacattccatcaaaagcccgcttgcgcaaatcacaggctgtcctggaaatccccaacgttcagctggatgatgccgggatttacgagtgcagggccgagaactcccggggaaaaaacagcttcagaggtcaactccaggtctacacctatcctcattgggtggaaaaactcaacgacacacagcttgacagtggcagtcccttgcgctgggagtgcaaggctactgggaaacccagaccgacgtaccggtggctgaagaatggggtaccattgtctccgcagtctcgcgtggagatggtgaatggcgtgctcatgattcataatgtgaatcagtcggatgcgggcatgtatcaatgcctggctgaaaacaaatacggcgcaatctatgcatctgccgagctgaagatcctagcttccgctccaaccttcgccttgaaccagctgaagaaaacgattatagtcacgaaggaccaggaggtggtaattgaatgcaagccacagggaagcccgaagccaaccatttcatggaagaagggcgaccgtgccgtgagagagaacaaaagaatcgccatactacccgatggcagcctgcgcattttaaacgcctctaagtccgacgaaggcaagtacgtttgcagaggggagaacgtgtttggatccgcagagattatcgcatctctcagtgtcaaagagccaacccgcatcgaactaacaccaaagcggactgagctgacagtgggagagtccattgtgctgaattgtaaggcaatccatgacgcaagcctcgacgtgactttttattggacgcttaaaggccagcctatcgactttgaggaagaggggggtcacttcgagtctatccgggcccaagcatctagtgcagacctgatgatcaggaacatacttttgatgcacgccggccgctacggttgccgcgttcagacaacagctgactccgtaagcgacgaagctgaactgctggtgcgagggccccccggcccacctggcatcgtgatagttgaggaaatcaccgaatctacagctacactcagctggtcgcctgccgctgataatcactccccaataagtagctataaccttcaggccagatccccattctcattaggttggcagaccgtgaagaccgtgcctgaaattatcacaggagatatggagtctgctatggccgtggacctaaatccttgggtggagtacgagtttagagtggtcgccactaacccaattggcaccggcgaccctagcaccccaagtagaatgattcgaacgaacgaagctgtccctaagactgccccgacgaacgtgtctggccggtctggccggaggcatgaactggtgatcgcctgggagcccgtctccgaggagttccagaatggcgagggctttggctatattgtggccttccggcctaatggcaccagaggctggaaggaaaaaatggtgactagctcagaggccagtaagttcatctatcgcgacgagtccgtgcccccactgacaccgttcgaggtcaaggttggcgtgtacaataacaagggagatggcccattctcccaaatcgtcgttatctgctctgcagaaggagaaccatctgccgccccgactgacgtaaaggcaacctcagtttctgtctccgagattctcgtggcctggaaacatataaaagagagcctcggacgaccccaggggttcgaggtgggctactggaaggacatggagcaggaagataccgccgagacagtaaagactcgggggaacgagagtttcgtgatcctaacagggctggaaggcaatactctctatcacttcaccgtgagggcttacaacggagccggctatgggccgccctctagcgaggtttcggctaccaccaagaagagtccccccagtcaagcaccgtcaaacctcagatgggaacagcaggggagtcaggtcagtcttggatgggagcctgtgatcccgctggctaacgagtctgaagtcgtgggttacaaagtattctaccggcaagaaggccatagcaactcccaagtcatagagacacagaagctccaggccgtggtgccactccccgacgccggcgtgtacatcatcgaagtccgggcttactcagaggggggggacggtactgctagttcccagataagggtgccgtcttacagcggaggcaaaattactagtgcccagtccaccttacactccctgtccacctcaagttcttccgtcaccctgctccttgcactgatgatcccatccacctcatggtag

SEQ ID NO: 183800 - DNA, 2736 bp, synthetic construct
  misc_feature 1..2736: note = Description of Artificial Sequence: Synthetic coding sequence
  source 1..2736: mol_type = other DNA
atggccagcagctggaagctgatgctgttcctgagcgtgaccatgtgtctgtccgaatactctaagagtctccctggcctcagtacatcctatgcagcgcttctgcgcatcaagaaatcctcgtcgagctcacttttcggtagtaaaactcggccgcgctattcaagcccctctctcggtacattatcagcttcgagcccatcatggttgggcgctgcccagaactattatagcccaatcaatctttaccactccagtgatgctttcaagcaggacgagtcagttgattacgggcccgtatttgttcaggagccagatgacatcatctttcccacggactccgacgagaagaaagtggctcttaactgcgaagtgaggggcaacccggtcccgtcgtacagatggctgcgaaacggcactgagattgatctggaaagtgactatagatactctcttattgacggcacattcatcatttctaaccccagcgaggccaaagattccggccactaccagtgcttggccactaatactgtcgggagtattctaagcagggaggccaccctacagtttgcctacctgggcaattttagcgggcgaacacgcagcgccgtctctgtgcgcgagggtcagggcgtagtgcttatgtgcagtcctcctccacatagccctgagattatctattcttgggtcttcaacgagttcccctcattcgttgccgaggactccaggcgcttcatttcccaggaaactgggaatttatatattagcaaagtgcagacctcggatgttgggtcctacatctgtttggtgaaaaacaccgtgaccaacgcccgcgtactgtctcctccaaccccgcttacccttcgtaatgacggcgtaatgggcgagtacgaaccaaaaattgaagtacatttcccctttacggttacggctgccaagggaacgaccgtgaaaatggagtgttttgctcttggaaaccccgtgcctacgattacctggatgaaggtgaatggatacataccctctaaggcaaggctgcgaaagtcccaggctgttctggaaattcctaatgtccagctcgacgatgcaggcatatacgaatgccgcgcagaaaactctcggggcaaaaattcatttaggggccaactgcaagtttatacctaccctcactgggtagagaaactcaacgacactcaactagactcaggaagcccactcaggtgggaatgtaaagccaccggtaaaccaaggcccacatatagatggctcaagaacggggtgcctctcagcccccagtctagagtggagatggtaaacggcgtcctgatgattcataacgtaaaccagagtgatgccggcatgtatcagtgcctggctgaaaacaagtacggtgcaatttatgcgtccgcagagctaaagatactggcgagcgcaccaacattcgcgctgaatcagctgaagaaaaccatcattgttaccaaagaccaggaggtggtgatcgagtgtaagcctcagggctcccctaagcccactatcagctggaaaaaaggcgatcgggctgttcgggagaacaagcggatagccatactgccagacggctctctgcgcattctgaacgcttccaagagcgacgagggaaaatatgtgtgccgcggagaaaacgtctttggcagcgccgaaatcattgcctcactgtccgtgaaagagcccacacgcattgaactgacccccaaaaggactgaactcacggtgggcgagtccatcgtcctgaactgcaaggcaatccatgatgcttcgctggacgtgactttctattggactctgaaagggcagcccattgattttgaggaagaaggaggccattttgagagcattcgcgctcaggccagctccgctgatctgatgattcgcaatatcctgctcatgcacgcgggccgctatggctgccgcgtgcagacaaccgccgactctgttagcgacgaggccgagttgctggtgcggggcccaccaggacctcccggcatcgttatagttgaggagattacagagagcaccgctaccttgagctggagccctgcggctgataaccattcacccatttcttcttacaacctgcaggctcgctcacctttctcactcggctggcaaactgttaaaacagtacccgaaattatcaccggtgacatggagtccgccatggcagttgatcttaacccatgggtcgaatatgagtttagggtcgtcgcaacaaatccgattgggacgggtgacccctcaacccccagccgcatgatacgtacaaatgaggccgtaccgaagacagcgcctacaaatgtatccggaaggagcgggcgccggcacgagctggtgatagcctgggaaccagtttctgaagaatttcaaaacggagaagggtttggctatatcgtggctttcaggccaaatggaactcgcgggtggaaagaaaagatggtgacgtcatcagaagcttcgaagttcatttatcgcgatgagagtgtccctccactgaccccgtttgaggtgaaagttggagtgtataacaacaagggggacggtccatttagccaaatcgtagtcatctgctcagccgaaggggaaccgtccgcagcccccacagatgttaaggctacttcagttagtgtcagcgagatcttagtggcctggaaacacatcaaagagagtctgggtcggccacaagggttcgaagtgtag

SEQ ID NO: 183801 - DNA, 3087 bp, synthetic construct
  misc_feature 1..3087: note = Description of Artificial Sequence: Synthetic coding sequence
  source 1..3087: mol_type = other DNA
atgcggctgctgtggaagctggtgatcctgctgcccctgatcaactcaagcgctggggacggcctgttgtctcggccaatatttacacaggagccccatgatgtcatctttcccttggatctgagcaagagtgaagtgatcctgaactgcgcagcgaatggctacccttccccacattatcgctggaaacaaaatggaaccgatatcgattttacaatgtcctatcactacaggctggacggaggttccctggccatcaactccccccacactgaccaggacatcggcatgtatcagtgtctcgcaacaaacttactcggtactatcctgagtaggaaagcgaagctgcagttcgcttacattgaggacttcgaaacaaagacccggagcacggttagtgtgcgtgagggacaaggagtcgtgctgctgtgtgggcccccacctcactttggcgacctgagttacgcctggaccttcaacgataatccactttacgtacaggaagacaaccggcggtttgtgagccaagaaactgggaacctttatatagctaaggtggagcctagcgatgtgggaaattatacttgttttattacaaataaagaggcccaacgcagtgtgcagggccccccaacaccattggttcagagaacggatggcgtgatgggggagtacgagccaaaaatcgaagttcgtttccctgagaccatccaggccgctaaagattcctcagtgaaacttgagtgcttcgccttaggaaatcccgtgccagacatctcttggaggcgcctggatgggagccctttacctggcaaggtcaaatattcgaaaagtcaggctattctcgagattcccaacttccagcaggaagacgaagggttttacgagtgcattgcgtccaacctccgagggcgcaacttggccaaaggccagctgattttctatgcaccccctgagtgggagcagaagatacagaacactcatctctcaatctacgataatctactttgggaatgcaaggcatccggtaagcctaatccatggtacacttggttgaagaatggggagagactaaaccctgaagagaggatccagatcgagaatggcacactgataatcactatgctgaacgtctcagatagtggagtctaccagtgcgcagccgaaaataaatatcagatcatttatgctaatgccgaattaagggtgttagccagtgcccccgatttcagcaaatcaccggttaagaagaaatcttttgtgcaggtgggaggggatattgtaattggatgcaaaccgaatgcctttcctcgtgctgccatctcctggaaacggggtacagagaccttaagacagtccaagcgcattttcctgttagaggatgggtctcttaaaatttacaatattactcgctccgatgcgggaagctacacctgcattgctactaaccagttcgggaccgcaaagaataccgggtctctcattgttaaggagaggacagtgatcacagtgcctccaagcaaaatggacgtaactgtcggagaatccattgtcctgccatgtcaggtgtctcatgacccctccatagaggtggtttttgtttggttctttaacggagacgtgatcgacctgaagaaaggtgtcgcccactttgagagaatcggaggagagtcggttggggacttgatgatcaggaacatacagttgcaccactcaggaaagtacctgtgcacagtgcaaacaaccttggaaagcctgagtgccgtagccgacataatcgttaggggcccccccggcccccccgaggatgtgcaggtagaagatataagctctaccacaagtcagttgtcttggagggctgggccggataacaattcccctattcaaatattcactatccagacgaggacccctttctccgttggctggcaggccgtagccacagttcccgaaattctgaatggaaagacttacaatgctactgtcgtcggactgtccccctgggtggagtacgagttcagagtagtggccggcaactcaatcggcattggtgaaccatccgaacccagcgaactgcttagaaccaaggcctccgtgcctgtcgtggcccctgttaatatccacgggggcgggggtagtcgctccgagctcgtgataacttgggaatctatacccgaggagctgcagaacggagagggattcggctacatcatcatgttccggcctgttgggtctaccacctggagtaaagaaaaagtgagtagcgtggagagcagcaggttcgtttatcgtaacgaatctatcatccccctgtcaccttttgaagtgaaagtgggggtatataacaacgagggagagggtagcctgtccacagtgaccatcgtctattctggagaggacgagcctcagcttgctcctagaggtacctccttacagagttttagcgcttccgaaatggaagttagttggaatgcgattgcctggaaccgaaatacggggcgggtcctgggatacgaagtcttatattggactgatgattccaaggagagcatgattggcaagataagggttagcggcaacgtgactactaagaacatcaccggactgaaggccaatacaatctactttgcaagcgttcgggcgtataatactgccggaaccgggccaagtagtcctccagtcaacgtaacgactaaaaagtccccaccgtctcagccgcctgccaatatcgcttggaagctgaccaactcaaaactctgtctgaattgggagcatgtgaagacaatggaaaacgaatccgaggtcttagggtacaagattctctatcgccagaacaggcagtcaaagactcatattctagaaacaaacaacacctccgccgagctgctggttccattcgaagaggattatcttatagagatccggacagtttctgacggcggagacggaagcagtagcgaagaaatccgcataccaaagatgtccagcctgtcctccagggggatccagtttcttgagccctcaacccacttcttgtcgatcgtgattgtgatcttccactgttttgcgatacagcctctgatatag

SEQ ID NO: 183802 - DNA, 3087 bp, synthetic construct
  misc_feature 1..3087: note = Description of Artificial Sequence: Synthetic coding sequence
  source 1..3087: mol_type = other DNA
atgcggctgctgtggaagctggtgatcctgctgcccctgatcaactcgtccgcgggcgacggtttactctcgcgaccaattttcacgcaggaaccccatgacgtgatttttcccctggatctgagtaagtctgaagttatattaaattgtgctgcgaatggttaccccagtcctcattaccggtggaaacagaatggcaccgatattgacttcacaatgtcataccattatcgacttgatggcggttctcttgcaattaatagccctcacaccgatcaggatatcggtatgtatcagtgcctagccaccaacctcttgggaaccatactgtctaggaaagccaaattacagttcgcttatatcgaggactttgagactaagacacgcagcacagtcagtgtaagggagggccaaggtgtggtcttactgtgtggcccgcccccccattttggcgatctttcctacgcatggaccttcaacgacaatcctctttacgtgcaggaagacaacaggcgttttgtgagccaggaaactggtaatctctacatcgctaaggtagaacccagcgacgtcggcaactatacgtgtttcattactaataaggaagcccagaggtctgtgcaaggtccaccaacccccctggtccaaagaacagatggggttatgggggagtatgaacctaagattgaggtgcggttccctgaaaccattcaggcagccaaagatagctccgtcaaactcgaatgcttcgctctggggaaccctgttccagacatctcttggcgccgcctcgacggatccccacttccagggaaggtgaaatactctaaatcacaggccatactggaaatccccaattttcaacaggaagatgaagggttttatgagtgtatcgccagcaatctgagggggcggaacctggccaaaggtcagctgatattttatgccccccctgagtgggaacagaagatccagaacacgcatctctcgatttacgataacctgctctgggagtgtaaagcctctgggaaacccaatccctggtatacttggcttaagaatggagagcggttaaacccggaggaacggatccagatcgagaacggaaccctcatcattactatgctcaacgtgtctgactccggcgtctaccagtgcgccgcagagaataagtaccagatcatatatgcgaacgcagaattaagagtgctagcgtccgcaccggatttttcgaagagtcctgtgaagaagaaaagcttcgtacaggtcgggggcgacattgtgatagggtgtaagcctaatgctttccccagggcggccattagctggaagcgcgggaccgagacacttagacagagtaaaaggatatttttgctggaagatgggtccctgaaaatttataacattactagaagcgacgccgggtcctacacttgcattgctacaaatcagttcggcacagccaagaatacgggaagcctgattgtaaaagaaaggacagtcatcaccgtgccaccctctaagatggatgtgacggtgggggagtctatcgtccttccctgccaggtgtcccatgacccaagtattgaggtcgtgtttgtatggtttttcaatggagatgttattgacctcaaaaaaggcgtcgcacacttcgagagaatcgggggagagagtgtaggggatcttatgatccgaaatatccaactgcaccactccggaaagtacttgtgtactgtccagaccacactggaatccctttcagccgtggccgacatcattgtaaggggtccacccgggccgcccgaggatgtacaagttgaggacattagcagcacaacaagtcaacttagttggcgcgccggcccagacaacaactcgcctattcaaatcttcacgatccagacccgcactccgttttccgttggctggcaggccgtcgccactgtgcctgagatactcaacggaaagacatacaatgccaccgtagtcggtctgagcccatgggtggaatacgaatttcgcgtggtggctggcaacagcattggtatcggggaacccagcgaaccgtctgaacttctgaggaccaaggcttctgtcccggtggtggctccggtcaatatccacgggggcggtggcagccggagcgagctcgtaatcacctgggaaagcatacctgaggagctccagaacggggaaggatttggctacataattatgtttagaccggttgggagtactacctggtccaaagagaaggtgtccagcgtggaatcctcccgctttgtgtatagaaatgagtctatcatccccctttcgccattcgaggtcaaggtgggcgtctacaacaacgagggggaggggtcactcagcacagtaacaatcgtctattcaggagaggatgagccgcagctagccccgcgaggcacatctctgcagagcttctctgcgagcgagatggaagtgagctggaacgccatcgcatggaataggaacacggggcgcgtgcttgggtatgaagtgctgtattggaccgacgactctaaggagtccatgattggtaagatcagggtgagcggcaacgtcaccactaaaaacattaccggtctgaaggcaaatacaatctattttgctagtgttcgggcctacaatactgccgggacggggccaagttcaccgcctgtgaacgtaactacaaagaaatcacccccgtcgcagcctccagctaacattgcttggaagctgaccaatagcaaactctgtctcaactgggagcacgtgaaaactatggaaaacgagtccgaagtgctaggctacaagatcctgtaccgacaaaatagacagagcaaaactcacatactggagacaaacaatacatcagccgaactgttggtccccttcgaagaagattatctgattgaaatccggaccgtgtccgatggcggcgacgggagcagctccgaggaaataaggatcccgaagatgagcagtctgagttctagagggatccagtttctcgagccatcaacgcacttcctttctatcgttatcgtaatcttccactgttttgccatccaacccctcatctag

SEQ ID NO: 183803 - DNA, 2871 bp, synthetic construct
  misc_feature 1..2871: note = Description of Artificial Sequence: Synthetic coding sequence
  source 1..2871: mol_type = other DNA
atgagctaccactaccggctggacggcggcagcctggccatcaactcaccacatacggatcaggatatcgggatgtatcagtgtctggccaccaacctgctggggaccattttaagccgtaaagctaagctgcagtttgcatacatcgaggatttcgagacgaaaaccaggtctacagtttcagttcgcgagggacagggagtggtgttgctctgtggcccaccccctcacttcggagaccttagctacgcctggacatttaacgataaccccctctatgttcaagaagacaacagacgcttcgtgtctcaagagactggcaatttatatatcgccaaggtagagccgagtgatgtggggaattatacatgtttcattactaataaggaagctcagaggagcgtccagggaccccctacccctctggtgcagcgcactgatggggtgatgggggagtacgagcccaagatagaagtgcggttcccagagactatccaggcagctaaggattcatctgtgaagctagaatgctttgcattgggaaatcctgttcctgatatctcttggcgaaggttggacggctcacccctgccgggcaaggtcaaatattcaaaatcccaggccattctggaaatacctaactttcagcaagaggatgaagggttctacgaatgcattgcatcgaacctcagaggccgcaatctcgcaaagggccaacttatcttttatgccccacctgaatgggaacagaaaatacaaaacacccacctttctatttacgacaatctgctttgggagtgcaaggcatctggcaagcctaatccttggtatacctggctgaagaatggggaacggctgaaccctgaggaacggatccaaattgaaaacggtaccttaataattacaatgttaaacgtttctgactccggcgtttatcaatgtgctgcggagaataagtaccaaatcatttatgctaacgcggaactgagggtgcttgccagcgcacctgacttttctaaaagtccagtgaaaaaaaagtccttcgtccaagtggggggagatatcgtgatagggtgtaagccgaacgccttcccacgcgccgctatctcctggaaacggggaactgagactctgaggcagtccaaacgaatcttcctcttagaagatggctcactgaaaatttacaatatcactcgctcagacgctggctcctacacctgcatcgctacaaaccagttcggcaccgccaaaaataccgggagcttgattgtgaaagaaaggaccgtcattactgtccctccttccaaaatggacgtgactgtgggcgaatctatcgtcttgccatgccaggtcagtcacgacccaagcatcgaggtggtttttgtttggtttttcaatggagacgtcatcgatttgaaaaagggcgtcgcccacttcgaaagaataggtggggagagcgtgggagatctcatgattagaaatattcagctgcatcatagcggcaaatatctgtgtaccgtgcagaccacactagaaagcttatccgccgtcgcagatataatcgtacggggtccacctggccctcccgaagacgtgcaggtagaggacataagctctaccaccagtcagctctcttggcgtgcaggccccgataataatagccccattcagatatttacgatccagacgagaactccgtttagcgtcggctggcaggccgtcgccacggttcctgaaatcctcaatggtaagacgtataatgcaacggtcgtggggctatcaccttgggtagagtacgagttcagggtggtcgccggtaattccatcggcattggagaaccgtcagagccttcagaactgttgcgcaccaaggccagcgtgccagtggttgctcctgtcaacatccacggaggcggggggagccgctctgaattggttatcacttgggaatctattcccgaagagctccaaaatggtgaggggttcggatacatcataatgtttaggcccgttggatcaactacctggagcaaagagaaagtgtcttccgtcgagagttccaggtttgtttacagaaatgaatctattatcccactctcgccatttgaagttaaggttggagtttataataatgagggcgaggggtccctgagtacggttactatagtctattcaggcgaggacgaaccccaactggcccctcgtggcaccagcctgcaaagcttctccgctagcgagatggaggtctcctggaacgctatcgcatggaatcgcaacaccggacgagtacttgggtatgaggtcttgtattggactgacgactcaaaggagtccatgatcgggaagatcagggtgagcggaaatgtcacaaccaagaatattaccggcttaaaggccaataccatatacttcgcctccgttagagcttacaataccgccggcactggaccctcatctccccccgtgaatgtaaccaccaaaaaatcgcccccttcacagccacccgccaacatcgcttggaagcttacaaactccaagctttgtttgaactgggagcacgtgaagacgatggagaatgaaagcgaggtccttggatataagattctgtatagacagaatcgacagagcaagacacatatactagagactaacaatacatccgccgaactgttggtcccatttgaagaagattatctgattgagattaggacagtaagtgacgggggcgatggaagtagcagcgaagagatcaggatcccaaagatgtcctcactgtcctcccgtggaattcaattcctggagccttccacccactttcttagtattgtgatcgtgatcttccactgctttgccatccaacctctgatctag

SEQ ID NO: 183804 - DNA, 3996 bp, synthetic construct
  misc_feature 1..3996: note = Description of Artificial Sequence: Synthetic coding sequence
  source 1..3996: mol_type = other DNA
atgcaggccgccccccgggccggctgcggcgccgccctgctgctgtggatcgtctcaagttgtctgtgcagagcctggacggcgccttccacgtctcagaaatgtgacgagccgcttgtaagcggcttaccacacgtcgcgttcagcagcagcagtagtatcagtggaagctattcccccgggtatgccaaaatcaacaagaggggcggggcgggggggtggtctccttcagacagcgaccactatcagtggctccaggtagactttggaaataggaagcagatcagcgccattgccactcagggaaggtactcttcctccgactgggttacccaatataggatgctctacagtgacacgggccgaaattggaagccttatcaccaggacggaaatatctgggcctttccaggcaacatcaattccgatggagttgttcggcatgagctgcagcaccccatcatagcccgctatgtgaggattgtgcccctcgactggaacggcgagggcagaataggtctgagaatcgaggtctatggttgcagctactgggcagatgtaattaatttcgatggccatgtcgtgctcccgtaccgattccgcaacaaaaagatgaagactttaaaagacgtgattgccttgaatttcaaaacttcggagagtgagggcgttattcttcacggagagggacagcaaggtgattatatcactctcgagctgaagaaggctaagctcgtgctctctcttaaccttgggtccaatcagctgggacccatttacggccacacctcagtgatgactgggtcgctcctggacgaccaccactggcattcagtggtgattgaaaggcagggtaggtccatcaaccttacactcgaccgctctatgcagcatttccggaccaatggcgaattcgactatctggacctcgattatgagatcacttttggtggtatacctttctctggaaagccttcatcctcttcaagaaaaaattttaaaggctgcatggaatcaataaactataacggtgtgaacatcactgaccttgccaggcgcaagaagcttgaaccttctaatgtgggcaatttgtcattttcatgcgtggagccttacactgtaccagtcttcttcaatgctactagctatctggaagtccccggaagattaaaccaggacctgttctccgtgtcctttcagttccgcacttggaatcccaatgggttgcttgtgttttcccacttcgccgataacctggggaatgtggagattgacctcacagagtccaaggtgggtgttcacattaatatcactcaaactaaaatgagccagattgacatcagttccggaagcgggctgaacgacggacagtggcacgaagtgaggtttcttgcaaaggagaacttcgctatcctgactatcgatggtgatgaggcttcagcagttcggacaaattccccactccaggtaaaaaccggggaaaaatactttttcggcggattcctcaatcagatgaacaactcctcccactcagttctgcaaccaagctttcagggctgcatgcagctcatccaggtggacgatcagcttgtgaatctctatgaggtcgcccagcggaaacccggaagctttgccaacgtgtccatcgatatgtgtgcgattattgatagatgtgtgcccaaccactgtgaacacggcggtaagtgctcacagacatgggattccttcaaatgtacttgtgatgagaccggctactcgggtgcgacgtgtcataacagcatctacgagccgtcttgcgaagcctacaagcacttggggcagactagtaactattattggatcgatcccgatggaagtggtccactggggcctctgaaggtctactgcaacatgaccgaagataaagtgtggacaatcgtgagtcacgatttacagatgcagacccccgtggttggctacaatccggaaaagtactccgtcactcagctcgtgtatagcgcctctatggaccagattagcgctatcactgattctgcagagtattgcgaacagtacgtgtcctacttctgcaaaatgtctcggctgctgaatacccccgatgggtccccctacacctggtgggtagggaaagcaaatgagaaacattattactggggtggctctggccccggaatccagaagtgcgcctgtggcattgaacgcaactgtaccgatccaaagtattattgcaactgcgatgccgactataagcaatggcggaaagatgcgggtttcctaagctataaagaccacctccccgtgtcacaggtggttgtaggagacacagaccgtcaggggtctgaagccaaactctctgtcgggcctcttcgatgtcaaggcgatcggaattattggaatgccgctagttttccgaatccatccagctatctgcatttcagcactttccagggggagacgagcgctgatattagtttctacttcaagaccctcactccctggggtgtattcctcgagaacatgggcaaagaggacttcatcaaactggagttgaaaagcgctacagaagtcagcttctctttcgacgtcggcaacggtcctgtcgaaatcgtggtccgcagcccaaccccgttgaatgatgatcagtggcatcgggtgactgctgagagaaacgtaaaacaggctagccttcaggtggatcgcctgccacagcaaattaggaaagcccccactgagggacacacccggctggagctgtattctcaactgttcgttggaggagcagggggccagcagggctttctaggctgcattagatctctgaggatgaatggagtgactcttgatctcgaggagcgagctaaggtgacttctggcttcatcagtggctgttcggggcactgcacatcttacggaactaactgtgaaaacggtggcaagtgcctggaacgctaccacggctacagctgtgactgttcgaatacagcctacgatggaacattctgtaataaggacgtgggcgctttttttgaagaggggatgtggttgcggtacaactttcaagctcctgcgaccaatgctagagatagttccagccgcgtggacaacgcccctgaccagcagaattcccatcctgacttagctcaggaggagatccgcttctccttctcaaccacaaaagctccatgtattttactctacatatccagcttcactaccgatttcctggctgtgctggttaaaccgacggggtccctgcagattcgctacaacctcggagggacccgggaaccatacaacatcgacgtcgatcataggaacatggcaaacggacagcctcacagtgtgaatattacccgacacgagaagacaatattcctcaagctggaccactaccccagcgtatcgtaccaccttccgtctagctctgacacactttttaactccccgaaaagcttgtttctaggtaaagtcatcgaaacaggtaagatcgaccaggaaattcacaaatacaacactcctggattcacggggtgcctgtcccgggtgcaatttaaccagatcgcacctctcaaggcagctctcaggcaaactaacgcctctgcccacgtccacatacagggtgagttagtggagtcaaattgtggggcatcacccctcactctcagccctatgtcttccgccacagacccatggcacttagatcacctggacagtgcctccgctgatttcccctataatcctggccaaggtcaggctatacgcaacggtgtgaacaggaatagcgcgatcattggcggagtcatcgcggttgttatctttaccatactgtgcacactggtcttcctgatcaggtacatgtttcgccacaagggtacatatcatactaacgaagctaagggagctgaatcagccgaaagcgcagacgccgccattatgaataatgatccgaatttcactgagaccattgacgaatctaagaaagagtggctgatatag

SEQ ID NO: 183805 - DNA, 1173 bp, synthetic construct
  misc_feature 1..1173: note = Description of Artificial Sequence: Synthetic coding sequence
  source 1..1173: mol_type = other DNA
atgaacggcgtgaccctggacctggaggagcgggccaaggtgacctccggattcatctcaggctgcagtgggcactgcaccagttatgggaccaactgcgaaaacggcggaaagtgcctcgaaaggtatcacggctatagctgcgactgttcaaatacggcttacgacggcactttttgtaacaaggatgtcggtgcttttttcgaggagggtatgtggttgagatataatttccaggcaccagcaaccaatgcacgggactcatcatcaagggtcgacaacgcaccagaccagcagaatagtcacccggatttagcccaagaggaaattcggtttagctttagtacaacaaaggcaccatgcattctgttgtacataagcagctttacgaccgactttctagctgtactcgttaagcccaccggaagtctgcaaatacgctacaacctaggcggcacccgcgagccttacaacattgacgtggaccacagaaatatggctaatggacagccccattctgtaaatatcacacgccacgaaaagacaattttcctgaaactggatcactacccatccgtctcttaccatttaccaagcagctcagatacattatttaatagcccaaagtctttgttccttgggaaagtgatcgagaccggcaaaatagaccaagagatccacaagtataatacaccagggttcactgggtgcttgagtcgtgttcagtttaatcagatagcaccgttaaaggctgcccttaggcagacaaacgccagtgcacacgtgcacatacaaggcgagctcgttgagtctaactgtggagcatccccattgacgctttccccgatgtccagcgcgacggacccttggcacttagatcaccttgactctgccagtgcagacttcccgtataaccccggacagggccaggccatacgaaatggggtaaatcgaaattccgctatcataggaggggtaattgcagtggtcatattcaccattttgtgtacactcgtatttctgatccgctacatgttccgccacaaagggacctatcacacaaacgaggcgaaaggggcagagtctgcagagtctgcggatgcagccatcatgaataatgatcccaatttcacagagaccattgacgagtcaaagaaagaatggctgatatag

SEQ ID NO: 183806 - DNA, 1353 bp, synthetic construct
  misc_feature 1..1353: note = Description of Artificial Sequence: Synthetic coding sequence
  source 1..1353: mol_type = other DNA
atgagcgacatggaggacgacttcatgtgcgacgacgaggaggactacgacctggaatattctgaggacagcaacagcgaacctaatgtagacctggagaaccaatattataacagtaaggcgttaaaagaggacgaccccaaagctgcactgtcttcatttcaaaaggtgctcgaactggagggcgagaagggtgaatggggcttcaaggccttgaaacaaatgataaagattaacttcaagctaaccaactttcccgagatgatgaatcggtacaagcagttgctaacttacatccgtagtgccgttacaagaaactattccgagaaaagtattaatagtatcctggactacattagcacttctaagcaaaattcggacttcctgtgccagatggatctgctccaggagttctacgagacaacactcgaggccttgaaagacgcgaagaatgacagactttggttcaaaacgaacacaaagttaggaaagctatatcttgagcgcgaagagtatggcaaactccaaaaaatcctcagacaactgcaccagtcttgccaaaccgacgatggcgaggatgatcttaagaaaggtactcaactcttagagatatatgccttggagatacagatgtacaccgcccagaagaataataaaaaattgaaggctctgtatgaacagtcccttcacattaagtctgccattcctcatccactgatcatgggtgtaattcgggaatgcggtgggaagatgcacctgcgagagggcgagttcgagaaagcacacacggattttttcgaagcctttaaaaactatgacgaatctggctctccaagaagaacgacttgcttgaagtacctggtgttggccaacatgcttatgaaatctggcattaacccctttgactctcaggaggctaagccttacaagaacgatccggagatcctcgccatgaccaatctcgtctccgcctatcagaacaacgacataactgaatttgagaagattctaaaaaccaatcactcaaacatcatggatgacccattcatcagagagcacatcgaagagcttctccggaatatccgaacccaggtcctgattaagcttattaagccatacacgagaatccatataccgttcatctcaaaagagctgaacatagacgtagcggatgtggagtctttgctcgtgcagtgcatcctagacaacactatccatggaaggatcgatcaggttaaccagcttctggaattggaccaccagaagaggggcggggctagatatactgcacttgacaaatggaccaaccagctaaattcacttaaccaggccgtagtgtctaagctagcctag

SEQ ID NO: 183807 - DNA, 1332 bp, synthetic construct
  misc_feature 1..1332: note = Description of Artificial Sequence: Synthetic coding sequence
  source 1..1332: mol_type = other DNA
atgagcgacatggaggacgacttcatgtgcgacgacgaggaggactacgacctggaatacagcgaggacagcaacagcgagccgaacgtagaccttgaaaatcaatattacaactcgaaagcgctgaaggaggatgatcccaaagccgccctatccagttttcagaaagtactagagttggagggcgagaaaggcgaatgggggtttaaagccctcaagcaaatgattaagattaacttcaaattaaccaacttcccagaaatgatgaatcggtataaacagctgctgacatatataaggtccgcagtgacccgcaactattccgagaagtccatcaatagtatattggattatattagtacttccaaacagatggatctgcttcaggagttttacgaaactactctggaagcgctcaaggacgccaaaaacgatagactgtggttcaaaacaaacactaaactcggcaaactgtacctcgagcgggaggaatacgggaagctgcaaaagatcctgcgccagctccaccagtcatgccagacagatgatggcgaagatgatctgaaaaaggggactcagctgctagaaatctatgccctcgagatccagatgtacacggcccagaaaaacaataaaaaactgaaggccctctatgagcagtcactgcatataaaatctgcaatcccccatccgctaatcatgggggtgattagggaatgcggtggaaaaatgcatctgagagagggagagttcgagaaggcccacaccgacttctttgaggcattcaagaactatgacgagagcggttctcctcggcgcactacttgtttgaaatacctggtgctggcaaatatgctcatgaagtcaggaattaacccatttgattcacaggaagcaaaaccatataagaatgatcctgagatactggccatgacaaaccttgttagcgcctatcagaacaatgacataacagagtttgagaaaatattgaaaacaaatcattctaatatcatggatgacccattcatccgggagcacattgaggagctgctccgaaacatccgcacccaggtactcattaaactgattaagccgtacacgcggatccacatcccctttatatctaaagaattgaacattgacgtggccgacgtggaatctctactcgtgcagtgcattctcgacaatactatccacggtaggatagatcaggtgaaccagctgctggaactggatcaccagaagaggggaggtgcccgatacacagcactggataagtggacgaatcagctaaactccctgaaccaagctgtggtttcaaaactggcctag

SEQ ID NO: 183808 - DNA, 1272 bp, synthetic construct
  misc_feature 1..1272: note = Description of Artificial Sequence: Synthetic coding sequence
  source 1..1272: mol_type = other DNA
atggccagcgccctggagcagttcgtgaacagcgtgcggcagctgagtgcccagggacagatgactcagctgtgcgaattgattaacaagagcggcgagctgctagccaagaacctgtcccatctcgacaccgtcttgggtgccctcgatgtgcaggaacattctctaggggtgcttgccgttcttttcgtgaaattttctatgccctccgtgcccgatttcgagacacttttttcgcaagtacaactgttcatcagcacatgcaatggcgaacacatacggtatgctactgatacattcgccggactctgtcatcagctcaccaacgccttggtagaacgtaaacagcctctcaggggcatcggcatccttaagcaagccatcgacaagatgcagatgaacaccaatcagctcaccagcatccacgcagatctgtgtcagctgtgcctgctagcaaagtgcttcaaaccagccctgccgtatctcgacgttgacatgatggatatctgtaaggagaatggggcctatgacgcgaagcattttctctgctattactattacggcggcatgatctataccgggttaaagaacttcgaaagggcgctgtacttctacgagcaggccatcactacaccagccatggccgtgagccacataatgctggagagttacaagaagtacattctagtaagcctgatactattagggaaagtccaacaactgcctaagtatacctcccaaattgtcgggcgctttataaagcctctctccaatgcctaccacgaattagcgcaggtctacagtactaataaccccagcgagctgaggaacttggtaaataaacacagtgagaccttcacccgcgacaataatatggggctggtgaaacagtgtctctcttccttgtataaaaagaatattcagcgcctaaccaaaacgtttctgactttatcactgcaggatatggcatcacgcgttcagctgagtggccctcaggaagctgaaaaatacgtcctgcacatgattgaagatggagagatcttcgccagcattaaccagaaagatgggatggtgagtttccacgataaccccgaaaaatataataatcccgccatgctgcacaacattgatcaagaaatgctgaagtgcatagagctggatgagaggttgaaagcgatggatcaagaaataactgtcaatcctcagtttgtgcagaagtccatggggtctcaggaagatgactcaggaaataagccgtctagctactcatag

SEQ ID NO: 183809 - DNA, 960 bp, synthetic construct
  misc_feature 1..960: note = Description of Artificial Sequence: Synthetic coding sequence
  source 1..960: mol_type = other DNA
atggccagcgccctggagcagttcgtgaacagcgtgcggcagctgagcgcccaggggcaaatgacgcagctttgcgagctcattaataagtcgggcgaactgttggcaaaaaacctgtcccacttggacacggtgctcggcgctctggacgtgcaggaacattcactgggtgtgctcgccgtgctctttgtaaagttcagcatgccgtccgtcccggactttgagaccttatttagtcaggtgcagctctttatttctacatgtaatggggagcacattaggtatgcaaccgacacttttgccggtctgtgtcaccagctcacgaacgctttagtagaaagaaaacagcctcttagaggtattggtatccttaagcaggcaattgacaagatgcagatgaatactaaccagttgacttctattcatgcagatctttgccaactctgtctgctggcgaaatgtttcaagccggcccttccttatctggacgtcgatatgatggacatctgcaaggagaacggggcctacgacgcgaagcacttcctatgctattattactacggagggatgatctataccgggctgaaaaactttgaaagggccctgtatttctacgaacaggcgattaccacccctgccatggcagtgagccacatcatgctggagtcctataaaaaatacatcttagtctcactgattctcctgggaaaagttcaacagttacctaaatacacatcacaaattgtgggccgcttcattaaaagacagagtcttgcaatgttggctaggctcgtcctgaacagctggccgcaggcggtactactgcgtctacccccacgtgtgctgggcttgcagcccctctccaatgcttatcacgagctcgcacaggtgtatagcaccaacaaccccagtgaactgagaaacctggtcaataaacatagtgaaacatttactcgctag

SEQ ID NO: 183810 - DNA, 834 bp, synthetic construct
  misc_feature 1..834: note = Description of Artificial Sequence: Synthetic coding sequence
  source 1..834: mol_type = other DNA
gccagccccttctgggtgagctggctgtacggcagccccctgcccgctccacccctgccagggggtgcacgatcagggacttgtgctccaatacttgtgcttcagaacgctgctgaggcactggctaggcagatgacacagctctgtgaactcatcaataaatccggcgagttgctggcgaagaatctcagccacctcgatacagtgcttggagccctcgacgtgcaagagcactccctgggtgtgctggcagtgctattcgtcaagttctctatgccatctgtcccagatttcgaaactttgttctcccaggtgcagctgttcatttccacatgcaacggcgagcacattcgttacgccacagacacctttgcgggcctctgtcaccagctcacaaatgcactggtggaacgcaaacagcccctgcgaggaattggaatcctgaaacaggctatagataagatgcagatgaacaccaaccagctgacatccattcacgccgacctatgtcagttatgccttctcgcaaaatgttttaaacctgcacttccatatctcgatgtggatatgatggatatatgcaaggagaatggggcttacgacgccaagcatttcctgtgttactattattacggcggcatgatatacactgggctgaagaacttcgaacgggcactttacttttacgagcaagccatcacaactcctgccatggccgtcagtcacatcatgctggagtcctacaaaaaatacattctggtgtctcttattctgctgggaaaagtacagcagctgcctaagtacacctcacaaattgtcggccgttttatctag

SEQ ID NO: 183811 - DNA, 1212 bp, synthetic construct
  misc_feature 1..1212: note = Description of Artificial Sequence: Synthetic coding sequence
  source 1..1212: mol_type = other DNA
atgacccagctgtgcgagctgatcaacaagagcggcgagctgctggcgaagaacctgtcccaccttgatacagtgctgggcgcacttgatgtacaggagcacagcttgggcgtactggcagtattgttcgtgaaattctcgatgccatcagtccccgacttcgaaacactgttttcccaagtgcaattgtttatttctacatgcaacggagaacatattagatatgccaccgacacatttgccggtctctgccatcagcttacaaacgcacttgtcgaaaggaagcagccccttagaggcatcggaatcctcaaacaagctatcgacaagatgcagatgaatacaaaccaactgactagtattcacgcagatctttgtcagttgtgtctgctggctaaatgtttcaaacccgcgctgccctatctagatgtggacatgatggatatctgtaaagagaatggggcgtacgatgctaagcacttcctgtgttactattattacggaggaatgatctacactgggcttaagaatttcgaacgcgcactgtatttctatgaacaggctatcaccacccccgccatggccgtcagccacattatgctggagtcttataagaaatatatccttgtcagtttgatcctactgggaaaggtgcaacaactgcccaaatacacttcccagatcgttggccgctttattaagccactgtccaacgcttaccacgaattggcccaggtatatagtacgaataatccctctgagctcaggaatctggtgaataaacacagcgagacgttcacacgggacaataacatgggtcttgtgaaacagtgcttaagctctttatacaagaagaacattcaacggctgacgaagaccttcttgactctgtcactgcaggatatggctagtagggtccagctgtcaggcccgcaagaggccgagaagtacgtgctgcatatgattgaagacggggagatttttgcctctataaaccagaaggacggaatggtctcctttcacgataatccggaaaagtataataatccggccatgctacacaatatcgaccaagaaatgctgaaatgtatagaactcgacgaacgattgaaggccatggaccaggaaattacggtcaacccacagtttgtgcaaaaatccatgggaagtcaagaggacgattcggggaacaagccttcaagctattcttag

SEQ ID NO: 183812 - DNA, 1614 bp, synthetic construct
  misc_feature 1..1614: note = Description of Artificial Sequence: Synthetic coding sequence
  source 1..1614: mol_type = other DNA
atggccgcccagtgcgtgaccaaggtggccctgaacgtgagctgcgccaacctgcttgacaaggatatcggctctaagtcagatccactctgtgtgctgttcctgaacaccagcggacaacaatggtacgaggtggagagaactgagaggattaaaaattgcctgaaccctcagttcagtaagacattcatcatagactattattttgaggtggtgcaaaagctgaagtttggcgtctacgacattgataataaaaccatagaactgtccgacgatgatttccttggggaatgtgagtgcactctgggccaaatcgtgtcatcaaagaaactgacaagaccactggtgatgaaaacagggcgtccagccggaaaaggctctattactatatctgcggaggagattaaggacaaccgtgtggtacttttcgaaatggaggcacgtaaattagacaacaaagacctttttgggaaatccgatccttacttggagtttcacaaacagacaagcgatggcaactggttaatggtacaccgcactgaagtggtgaagaacaacctgaatcctgtgtggcgcccctttaagatttcattaaattctctctgctatggtgacatggataagaccatcaaggtggagtgctatgattacgacaacgacggctcccacgatctcataggcactttccagaccaccatgaccaagctgaaagaggcgagccggtccagtcctgtggagttcgagtgcatcaatgagaagaagcgccaaaagaaaaagtcgtacaagaacagcggggtaattagtgtgaagcagtgtgagatcacagtggagtgtacctttttggattacatcatgggagggtgccagcttaactttacggtgggagtggacttcactggaagcaacggggacccgcgtagtcctgattctctgcattacatctcccctaatggagttaacgagtatctgacagcactgtggtccgttggcctggtaatacaagattacgatgctgataaaatgtttccggcttttgggttcggagcacaaattcccccacagtggcaggtaagccatgagttccccatgaattttaatccctccaacccttattgtaatggaattcagggaatagtggaggcttaccggagttgcctgcctcagattaaactctatggccctaccaatttcagtcccattatcaaccacgtcgcacgcttcgccgcggccgccacacagcagcagacagcatctcagtacttcgttctccttattatcaccgacggagtcatcacagatttagacgagacgagacaggccattgtcaatgccagccgtttaccgatgtctattatcatagtcggggtgggaggtgccgacttcagcgctatggagttcctagacggcgatggaggatctctgcgatcccccttgggagaagttgcgattcgggatattgtgcagttcgtcccctttcgtcagtttcaaaatgcaccaaaggaagcactcgcacagtgcgtactcgctgaaattccacagcaagtcgtgggttattttaatacgtataagttgctgcctcccaagaaccctgcaaccaagcaacagaaacaatag

SEQ ID NO: 183813 - DNA, 420 bp, synthetic construct
  misc_feature 1..420: note = Description of Artificial Sequence: Synthetic coding sequence
  source 1..420: mol_type = other DNA
atggccgcccagtgcgtgaccaaggtggccctgaacgtgagctgcgctaatctgctggacaaggacatcgggtctaagagtgaccctctatgcgtgttgtttctgaacacctccgggcaacaatggtatgaggtggaaaggactgagaggattaaaaattgtctcaatccccagtttagcaagacattcatcatagactactactttgaggtggttcaaaagcttaaattcggagtgtatgacattgataataaaaccatcgagctgagcgatgacgatttcctcggagagtgcgaatgtactctggggcagatagtttcgtccaaaaagttaacaaggcctctcgttatgaaaacaggtcggcctgctggaaagggctccatcactatatccgccgaagagattaaggataaccgctag

SEQ ID NO: 183814 - DNA, 30 bp, synthetic construct; identical to SEQ ID NO: 77620
  misc_feature 1..30: note = Description of Artificial Sequence: Synthetic coding sequence
  source 1..30: mol_type = other DNA

SEQ ID NO: 183815 - DNA, 1614 bp, synthetic construct
  misc_feature 1..1614: note = Description of Artificial Sequence: Synthetic coding sequence
  source 1..1614: mol_type = other DNA
atggccgcccagtgcgtgaccaaggtggccctgaacgtgagctgcgcaaatctgctcgataaggatatcggcagcaaatccgaccccctgtgcgtcctatttctcaacacaagcggccaacaatggtacgaggtggagcgcaccgagagaataaaaaattgtctgaacccccagttttcaaagaccttcatcatcgactactatttcgaggtggttcaaaagctgaaatttggagtatatgacattgacaataagaccattgaactgagcgacgatgattttctgggtgagtgtgaatgtacactcgggcagattgtttcttcaaagaagctgaccagaccattagtcatgaaaaccggcagacctgccggcaagggctccattaccattagcgcggaagaaatcaaggacaatagagtcgtcctgttcgagatggaagcaagaaagcttgacaataaggacctgttcggcaaatcggatccttacctggagttccacaaacagacatcagatggtaattggctgatggtgcaccgcactgaggtggtaaaaaacaacctcaaccccgtgtggaggccattcaaaatttccctcaacagcctgtgctacggcgacatggataagaccattaaagtggagtgctatgactacgataatgacggctctcacgacctgatcggcacctttcagacaaccatgacaaagctcaaggaggcctccagatcctcacccgtggagtttgaatgcattaatgagaaaaaaagacagaagaagaagtcctataagaatagcggggtgataagtgtgaagcagtgcgagattacagtcgaatgtacgttcctagattacattatgggaggctgccagttgaatttcaccgtgggggtggattttacggggtccaatggcgatccaaggtcccccgactcactgcactatatttcccccaatggcgtcaacgaatacctgacggccctctggtccgtagggctggtcattcaggactacgatgcagacaagatgttccccgctttcgggttcggcgctcagatacctccccagtggcaggtctcacacgagttccctatgaactttaacccctccaacccatattgtaatggcatccaaggcatcgtggaggcttatcgcagttgcctgccccagattaagctctacgggcctactaattttagccctattattaaccacgttgcacgttttgcagctgccgctacgcaacagcaaacagcctcacaatacttcgtcttgctgattatcaccgatggagtgatcacagaccttgacgaaacaaggcaggctatcgttaacgcgtctcggctgcctatgagcatcataatagtgggggtgggaggcgccgatttttctgccatggaatttctggacggggacggcggtagccttagatctccactgggggaggtggctatcagagacatcgttcagtttgtgccattccgacagtttcagaacgctcccaaagaagccctggcccagtgcgttctggccgaaattcctcagcaagtcgtaggctactttaatacatacaaactcctgcctccaaaaaacccagcaactaagcagcaaaaacagtag

SEQ ID NO: 183816 - DNA, 240 bp, synthetic construct
  misc_feature 1..240: note = Description of Artificial Sequence: Synthetic coding sequence
  source 1..240: mol_type = other DNA
atggccgcccagtgcgtgaccaaggtggccctgaacgtgagctgcgctaatctgttagacaaagacattggatctaagagtgatcccctgtgcgttctctttcttaacacatctggccagcagtggtacgaagtggagcggacagagcgtatcaagaattgcctcaatcctcagttctcaaaaacattcataattgactattatttcgaggttgtccagaaactgaagtttggcgtctag

SEQ ID NO: 183817 - DNA, 408 bp, synthetic construct
  misc_feature 1..408: note = Description of Artificial Sequence: Synthetic coding sequence
  source 1..408: mol_type = other DNA
atggccgcccagtgcgtgaccaaggtggccctgaacgtgagctgcgccaacctgttagacaaagacatcgggagcaaatcagatcctctctgcgtactgtttctgaacacgtctggccagcagtggtacgaggtggagcgcaccgagcgtataaagaactgcttgaatccccagttctccaaaactttcataattgactactatttcgaagtagtgcagaagctcaagttcggcgtctatgacattgacaataaaactatagagctgagtgacgacgattttctcggtgaatgcgagtgcacgctaggccagatcgtctccagcaaaaagctgacacggcccctagtgatgaagacagggcggcctgctggcaaagggagcattaccatctctgccgaggagatttag

SEQ ID NO: 183818 - DNA, 705 bp, synthetic construct
  misc_feature 1..705: note = Description of Artificial Sequence: Synthetic coding sequence
  source 1..705: mol_type = other DNA
atggccgcccagtgcgtgaccaaggtggccctgaacgtgagctgcgctaacctactagacaaggacatcggaagtaagtcagatcccctctgcgtcctgttcctgaatacttccggtcagcagtggtacgaggttgaaagaacagagaggatcaagaactgcctgaacccccagttctccaagacattcataattgattactacttcgaggtggtgcagaagctcaaattcggggtgtacgatattgataataaaacaatagagctgagcgacgacgacttcttaggagaatgcgaatgtacgttagggcagatagtgtctagcaagaagttaacccgtccgcttgtaatgaaaaccggccgccccgcgggcaagggctcaattacaatcagtgccgaagagataaaagataacagggtcgtgctctttgaaatggaggcaagaaagctggacaacaaggacctcttcggaaaaagtgatccctacctggagttccataaacagacgagtgatggcaattggctgatggtgcaccgaaccgaagtagtgaaaaataacctcaaccctgtctggaggcctttcaaaatttccttgaattccttgtgctacggggacatggacaaaacaatcaaagtcgaatgttacgactatgataacgatggctctcatgatctgattggcacattccagaccacaatgacgtag

SEQ ID NO: 183819 - DNA, 462 bp, synthetic construct
  misc_feature 1..462: note = Description of Artificial Sequence: Synthetic coding sequence
  source 1..462: mol_type = other DNA
atggccgcccagtgcgtgaccaaggtggccctgaacgtgagctgcgctaatttactggataaggatattggatctaaaagcgatcctttgtgcgtactttttcttaacaccagcggccagcaatggtatgaggtcgagcggacagagaggataaaaaattgtctaaatccacagtttagtaagacattcatcatagactactattttgaggtcgtgcagaaattaaagttcggcgtctacgatatcgataataaaactatcgagctgtccgacgacgattttctgggtgaatgcgaatgtacacttggccaaatcgttagctctaagaagctaacacgcccccttgtgatgaagacaggacggccagcaggcaagggatccatcaccatctcagccgaggagataaaagacaaccgagtggtgctcttcgagatggaggcacgtaaactggacaacaaatag

SEQ ID NO: 183820 - DNA, 1782 bp, synthetic construct
  misc_feature 1..1782: note = Description of Artificial Sequence: Synthetic coding sequence
  source 1..1782: mol_type = other DNA
atggagcagcccgaggacatggccagcctgagcgagttcgacagccttgctggaagcatcccggcaacgaaggtagagataacagtgagctgtcgtaaccttctggacaaagacatgttctcaaaatcagatccgctttgtgtcatgtacacccagggaatggagaataagcagtggagagaattcggccggaccgaagtcattgataacaccttgaatcccgattttgttaggaaatttattgtggactatttcttcgaggaaaagcaaaatctgcgtttcgacctatacgacgtggatagcaagagccctgatctgagtaagcatgactttttgggacaggccttttgcaccctgggagagattgttggttccccaggttctagattagagaaaccactgacgatcggagctttctctctgaattccagaacaggtaagcctatgcccgcagtgtcaaatgggggcgtccccggcaagaaatgcggcaccattatcctgagtgcagaagagctgagtaattgtcgagacgtggcaacaatgcaattctgcgctaacaagctggataagaaagatttctttgggaaatccgatccattccttgtcttctacagaagcaatgaggacggcacattcactatctgtcacaaaaccgaagtgatgaagaacactctaaatccagtgtggcagacattctctataccggtgagggccctgtgtaacggtgactacgataggacgatcaaggtggaggtatacgattgggatcgagacgggtctcatgactttatcggagagttcaccacatcatacagggagcttgcgcgaggacaatctcagttcaatatttacgaggtagtgaatcctaagaaaaaaatgaagaagaaaaagtatgtcaactccgggactgttaccctgcttagtttcgctgtggagtcagagtgtacatttcttgactacattaagggggggacccagataaattttacagtcgctattgactttacggccagcaatggaaatccctcgcagtccacatccctgcactacatgagtccttatcagctgaatgcctacgctctggccctcaccgccgtgggagaaattattcagcactatgacagcgataaaatgttccccgccctgggcttcggagcaaaactgcctcctgacgggagagttagtcatgagtttcctctcaatgggaaccaggagaatccgtcctgctgcggcatcgacgggattcttgaggcgtatcatagaagcctgagaaccgtacagctgtatggcccaaccaattttgcgccagtggtgactcacgtggcgcgaaacgccgccgccgtccaggacggttcacagtacagcgtgctgctaattatcacagacggtgtaatctctgatatggctcagacgaaggaagcaattgtaaatgccgcgaagttgccgatgagcatcattatagtcggggtgggtcaagcagaatttgacgcgatggtggagctagacggggacgatgtccggattagcagccggggcaagctcgccgagcgagacatagttcagtttgtgcccttccgcgactacgtcgaccgcacgggaaaccatgttctctccatggccagactggccagggacgtactcgccgagatccccgatcaattagttagttatatgaaagcacaaggtattagacccagacccccccccgctgcccccacgcatagtccttcacagtcgcccgcgcgcacaccccccgcatcaccgctgcacacccacatctag

SEQ ID NO: 183821 - DNA, 906 bp, synthetic construct
  misc_feature 1..906: note = Description of Artificial Sequence: Synthetic coding sequence
  source 1..906: mol_type = other DNA
atgaagaagaagaagtacgtgaacagcggcaccgtgaccctgctgtcttttgccgttgaaagcgagtgtaccttcctggactatattaaaggaggcacgcagattaactttacagtggcaatcgattttacggcaagcaatggtaacccatcacagagtaccagtcttcattacatgagtccatatcagctaaacgcctatgccttggcactcacagccgtcggtgaaataattcagcattacgatagtgacaaaatgttcccagctctggggtttggggccaaactccctcccgacggtagagtatcccacgaatttcctttgaatggcaatcaagagaacccctcgtgctgcggcatcgatggcattttagaagcataccatcgcagcttgagaacagtccagttatatggtcctacaaacttcgcgccggttgtaacccacgtggcccgcaatgcagctgccgtgcaagatgggtcccagtactcagtgctcctgattataaccgatggagtgatatccgacatggctcagactaaagaggccatagtcaatgccgcaaagctgccaatgagcattataatagtgggcgtgggccaggccgagttcgacgccatggtcgagctcgacggggacgatgtccgcatcagctctcgagggaagctggctgagcgtgacatagtgcaatttgttccctttcgggactatgtcgaccggaccgggaaccacgtccttagcatggcccggttggctcgggatgtcctcgccgagatcccagatcagctcgtgagttatatgaaagcccaaggtatcaggcctcgacctcctccggccgcacctactcatagtccctctcagtctccagctcgaactccaccggcaagtcccctgcatacccacatctag

SEQ ID NO: 183822 - DNA, 1515 bp, synthetic construct
  misc_feature 1..1515: note = Description of Artificial Sequence: Synthetic coding sequence
  source 1..1515: mol_type = other DNA
atggtgctggccgacctgggccggaagatcaccagcgccctgcggtctctctccaatgccaccattattaacgaagaggtgctgaatgcgatgcttaaggaggtgtgcacggctctccttgaagccgatgttaatatcaaactggtcaaacagttacgcgagaatgtgaaaagcgctattgacctcgaagaaatggcatcaggcctgaataagaggaagatgatccaacacgctgtctttaaggagcttgtcaaactggttgatccgggagttaaagcatggacccctacaaaggggaagcagaacgtaatcatgtttgttggcttgcagggctctgggaagaccacaacttgttcaaaacttgcctactattaccagcgcaaaggttggaaaacttgtctcatttgcgccgatacttttagagccggtgcgttcgatcaactgaagcaaaatgctacgaaagctaggatcccgttctatggctcttatacagaaatggatcccgttataatagcttcggagggtgtcgaaaagtttaagaatgagaacttcgagattatcatcgtcgacaccagcgggaggcacaaacaggaggattccctgtttgaagaaatgctgcaagtagccaacgccattcaaccagataacattgtgtatgtgatggacgcatccattggacaggcttgcgaggcccaagctaaggcctttaaggacaaggtggatgttgcaagcgtgatcgtgactaaattggacggccatgccaagggggggggtgcactgagcgctgtggcggccacgaagagccctatcatcttcatcggcaccggtgagcacattgacgacttcgagccctttaagacacagcccttcataagtaaactgctgggtatgggcgacattgagggacttatcgacaaggtgaatgagctgaagttggacgacaatgaggccctgatagagaagctgaagcacggacagtttacactgagagatatgtacgaacaattccagaatattatgaaaatgggtccattttctcaaatccttggaatgatccccggattcgggacagatttcatgtcgaagggcaacgagcaggaatcaatggctcgcttaaaaaaactgatgacaattatggacagtatgaacgaccaggagctcgactcgacagatggcgcgaaagttttctctaagcagccagggcggatccagcgcgtggcccgcggttccggtgtaagtacgagagacgtgcaagagctgttgactcagtacacgaagttcgcacagatggttaagaagatgggcggtatcaagggactgttcaaggggggagacatgtccaaaaacgtgagtcaatctcagatggcgaaacttaatcagcaaatggctaaaatgatggaccctcgtgtgctgcatcatatgggggggatggccggccttcagtctatgatgcggcagttccagcagggcgccgccggcaatatgaagggtatgatggggtttaataatatgtag

SEQ ID NO: 183823 - DNA, 1674 bp, synthetic construct
  misc_feature 1..1674: note = Description of Artificial Sequence: Synthetic coding sequence
  source 1..1674: mol_type = other DNA
atgagcgaccccgagatgggctgggtgcccgagccccccaccatgaccctgggagcgagccgtgttgagttacgggtcagttgtcacggactgctggatcgagacacactgacaaagccgcatccctgcgtgcttcttaaactttactcagatgagcagtgggtggaggtggaaaggacagaagttctgagatcttgttcaagtcccgtgttcagccgggtccttgctctcgaatactttttcgaagaaaagcagccactgcagttccacgttttcgacgcagaggatggagccacctctccacggaatgacacgttccttggatcaactgaatgcactctgggtcaaatcgtgtctcagactaaggtgactaagccgctgctgttgaaaaacggcaaaacggctggcaagagtacgattaccatcgtcgcagaggaagtaagtggcactaatgactacgttcagctgaccttcagagcatacaagctggacaataaggatctgttctcgaaatctgacccttttatggagatatacaaaacgaatgaggaccagtccgaccagctggtctggcgaacagaagtcgtaaagaataatctgaatcctagctgggagccctttcgcttgtcactgcacagtctctgttcttgtgacgttcaccgacctcttaagtttctggtgtatgactacgatagctctgggaagcacgatttcataggcgaatttaccagcacgttccaagagatgcaggaaggcaccgcaaaccccggtcaagaaatgcagtgggattgcattaaccctaagtacagagacaaaaagaagaattataagagctctggcacagtggtgctggcccagtgtaccgttgaaaaagtccatactttccttgactatatcatgggggggtgccagatcagttttaccgtagccattgatttcacagcctccaacggagatcccagatctagtcagtctctgcattgtctgagccctcggcagcccaatcactacctccaggccttaagggcagtgggaggcatttgtcaggattatgattcagataagcggtttcctgccttcgggtttggtgcacggatcccaccaaacttcgaggtgtcacatgactttgccataaacttcgatcccgagaaccccgaatgtgaggagatttcaggcgtgattgcttcctaccgcagatgccttccccagatccaactgtacggccctactaacgtcgctcccattatcaatcgggtggccgaacctgcacagcgggaacagtcgacgggacaggctacgaagtattccgtcctgctggttctgacggacggtgtggtaagtgatatggctgagacgagaaccgcgatcgtgcgggcaagcagacttcctatgtccattatcatcgtgggcgtcgggaacgccgacttctccgacatgagactgctggacggagatgacggccctctgaggtgtccgcggggcgtacccgccgctagagatatagtacagtttgtgccttttcgggacttcaaagatgcggccccgagcgctctggccaagtgtgtcctcgcagaggtgccacgccaggtcgtggaatattacgcatctcagggaatttccccaggcgccccccgcccttgcacattggcaactacgccgtctccttctccctag

SEQ ID NO: 183824 - DNA, 1839 bp, synthetic construct
  misc_feature 1..1839: note = Description of Artificial Sequence: Synthetic coding sequence
  source 1..1839: mol_type = other DNA
atggccttcaaggagcacggcaagatcaccagctgctgcatccccggccccattaattcttcccgcgctggcgccggggccggggcttctggttggagcagcaagggggtgcgcgcccgggcacgagaacccgaacgcggcgcccctgaccgggagcccagtgatatgtctgatcccgaaatgggctgggtgcctgagcctccaaccatgacattgggcgcaagtcgggtggaacttcgcgtttcatgtcacggactgttagatagggatactctcacgaaaccccatccatgcgtgctgttgaaactctactccgacgagcagtgggtcgaagtggagcggacggaggtgctaagaagctgtagctctcctgtcttttcacgagtgctggccctagaatatttctttgaagaaaaacaacccctgcagttccatgtatttgacgcagaggatggggctacttctccaaggaatgacacttttcttggctcgacagaatgcactctcggccagatcgtctcccagacaaaggtgaccaagccactgttgctcaaaaacgggaagaccgctggtaaatcaacaatcaccatcgtggcagaagaagtaagtggtaccaatgactatgtgcagctgacgttcagagcatacaaactcgataataaggatctgttttccaagtcagatccttttatggaaatttacaaaaccaatgaagaccaaagcgaccagcttgtttggaggaccgaagtcgtcaaaaataacctgaaccctagctgggagccattccgtttgtctctgcacagcctctgcagctgcgatgtgcacaggccactgaagttcctcgtgtatgattacgacagctccggcaaacacgattttatcggggagtttacatcgacctttcaggagatgcaggaagggaccgccaatcccggccaggaaatgcagtgggactgcatcaacccaaaataccgggataaaaaaaaaaattacaagtcttctggaacggttgtgctggctcagtgcaccgtggagaaggtgcatacgtttttggattacataatgggaggctgtcaaatctcatttaccgtggctatcgacttcaccgcaagcaacggtgacccccgctcgtctcaaagcttgcactgcctaagtccaaggcagccaaatcactacctgcaggcattgcgcgcagttggcggaatttgccaggactatgatagcgacaagaggtttcccgcgttcggctttggcgctagaatccctcctaactttgaagtgagccatgattttgctattaacttcgatcctgaaaacccagaatgcgaggaaattagcggggtcatcgcaagctatagacggtgtctgccacaaatccaactatacgggcctacaaacgttgcccctataataaatcgggtggctgagccggcacaaagggagcaatccaccggacaggccacaaagtactcggttcttctggttctcaccgacggtgttgtcagtgatatggctgaaacacgaactgctattgtccgggcttcccgcttgcctatgagcataatcatcgtgggagtgggtaacgcggacttcagcgatatgcgtcttcttgacggagacgacggtccactcaggtgcccgcgaggggttccggccgcccgcgacattgtacagttcgtgccgttcagagatttcaaagacgccgccccaagcgcacttgcaaagtgcgtccttgcagaagtccccagacaagtggtggaatactatgcatcccaaggaatcagcccaggagccccccgtccatgcactctggccacaactcctagcccttctccctag

SEQ ID NO: 183825 - DNA, 159 bp, synthetic construct
  misc_feature 1..159: note = Description of Artificial Sequence: Synthetic coding sequence
  source 1..159: mol_type = other DNA
atgagcgaccccgagatgggctgggtgcccgagccccccaccatgaccctgggcgcgtcaagggtggagctgcgcgttagctgtcatggacttttagaccgcgacactctcacaaagccccatccatgtgtgctgcttaaactgtactctgatgagtag

SEQ ID NO: 183826 - DNA, 396 bp, synthetic construct
  misc_feature 1..396: note = Description of Artificial Sequence: Synthetic coding sequence
  source 1..396: mol_type = other DNA
atgagcgaccccgagatgggctgggtgcccgagccccccaccatgactcttggggcctctagggtcgagctgcgagtgagctgccacggcttactcgaccgtgatactctgactaagccacatccttgcgttctgctgaaactctactcagatgagcagtgggtggaagtggagagaacagaggttctgcgcagctgcagctcaccagtgttttcccgagtgctggcactcgaatactttttcgaagagaagcaacccctgcagtttcacgtgtttgacgcagaagacggggcaacgtcccccagaaacgataccttcctcggcagcacagaatgcactcttggacagatcgtttcccagaccaaagtgacgaaaccactcctgttgaagaactag

SEQ ID NO: 183827 - DNA, 681 bp, synthetic construct
  misc_feature 1..681: note = Description of Artificial Sequence: Synthetic coding sequence
  source 1..681: mol_type = other DNA
atgagcgaccccgagatgggctgggtgcccgagccccccaccatgacactaggtgcaagccgagtggagcttcgagtctcctgccacgggttgcttgatcgggataccctgactaaaccccacccatgcgtgctgctgaaattatactcagacgagcagtgggttgaggtggagagaactgaggtcctgagaagctgctctagtccggtctttagtagagtgttagctttggaatatttcttcgaggaaaaacaaccgttgcaattccatgtgtttgatgccgaagatggcgcaacatcacctcgcaatgataccttcctgggttctaccgagtgcactctgggccaaatagtgagccagactaaagtgactaaacccctgctcctgaagaacgggaaaactgccggtaaatccaccatcaccatcgtggctgaagaagtgagcggcactaatgattatgtgcagttgacctttcgggcttataagctggacaataaagacctcttcagtaagagcgacccctttatggaaatttacaaaactaatgaggaccagagtgatcagctagtttggaggacagaagtggtaaagaacaacttaaacccctcctgggagccctttagattgtcactgcattcactctgcagttgtgatgtccaccggccattaaaatttctgtag

SEQ ID NO: 183828 - DNA, 318 bp, synthetic construct
  misc_feature 1..318: note = Description of Artificial Sequence: Synthetic coding sequence
  source 1..318: mol_type = other DNA
atgagcgaccccgagatgggctgggtgcccgagccccccaccatgacgctgggcgctagcagagtggagctccgagtgagctgtcatggactcctcgatcgggacacactgaccaaaccacacccttgcgtcctcctgaaactgtacagtgatgagcagtgggtggaagtcgagaggacagaggttttgcggagttgctcatcccccgtcttctccagagtactggctctagaatatttttttgaggagaagcagccccttcagttccacgtgtttgatgctgaagacggggcgacatccccaaggaatgacacctag

SEQ ID NO: 183829 - DNA, 426 bp, synthetic construct
  misc_feature 1..426: note = Description of Artificial Sequence: Synthetic coding sequence
  source 1..426: mol_type = other DNA
atgagcgaccccgagatgggctgggtgcccgagccccccaccatgaccttgggcgcttctagagtcgaattaagggtcagttgccacggcctcctagatagggacaccctaactaagccacatccatgtgtgctgctgaaactgtactccgatgagcagtgggtcgaggtggagcgaaccgaggtgctgagatcatgtagcagccccgtgttctcccgcgtgttggcgttggagtacttttttgaagaaaagcaacccctgcagtttcatgtgttcgacgcagaagatggggctacaagcccccgaaacgacactttcctcgggtccaccgaatgcacacttggccagattgtttctcagaccaaagtaacaaagcccttactcctgaaaaatgggaaaacagcaggaaagtctactataacctag

SEQ ID NO: 183830 - DNA, 450 bp, synthetic construct
  misc_feature 1..450: note = Description of Artificial Sequence: Synthetic coding sequence
  source 1..450: mol_type = other DNA
atgagcgaccccgagatgggctgggtgcccgagccccccaccatgaccctgggggcgagccgggtcgaactgcgggtgtcttgccacgggctgctggatagggacaccctgaccaagcctcatccatgcgtcctcttgaaattatattctgatgaacagtgggtggaagtggagcggacagaagtactcagaagctgttccagtcctgtcttttcaagagtcttagccttagaatatttttttgaggagaaacagccattgcagtttcatgtgtttgatgcagaggatggagcgacaagtcccagaaatgacacttttctcgggtccaccgaatgcacactcggacagattgtgtcacaaaccaaggttacaaagccgctcctgcttaaaaatggaaagaccgcgggaaagtccactatcacgattgttgcagaggaggtcagcggttag

SEQ ID NO: 183831 - DNA, 1902 bp, synthetic construct
  misc_feature 1..1902: note = Description of Artificial Sequence: Synthetic coding sequence
  source 1..1902: mol_type = other DNA
atgagcgccggcagcgagcggggcgccgccgccacccccggcggcttgccggccccctgcgcctcgaaagtcgagctaaggttgagctgccgtcacttgctggatagagacccgttgactaagagtgatccctcagtggccttgctgcagcaagctcagggccagtgggtccaggttggccgtactgaggtggtccgatcatctctacaccctgttttcagcaaagtattcactgtcgactattacttcgaggaagtgcaacgcttgcggtttgaggtttatgatacccacggaccatccgggttctcttgtcaggaggacgactttctgggggggatggagtgcacgctgggtcaacccgcccagaaatggctgttgcaggtggtgatgagagtttcagttgacgttctcggccccgcaggtcattgcgccaagcactttttatgctgcactgaatcctcgcatctggccaggacaggccctagtttccttctgagatatgatgatttatgccttccctgggccacagcgggcgcagttcgatggtggacctgtaggggcggtcacacgcaagggtggcagatagtagctcagaagaaggtgacacgccctctacttctgaagttcggccgtaatgcggggaagtccactatcaccgtgatcgctgaggacatatcagggaacaatggctatgtggagctgagtttcagagccagaaagctggatgataaggacctattctctaaaagtgacccattcttagaactatacagggtgaatgatgatcaggggcttcagctggtgtatagaacggaagttgtgaagaacaacttgaatcccgtctgggaggctttcaaggtgtctctgtctagtttgtgctcatgtgaagagactaggccattgaagtgcctggtctgggattacgactcccgcggaaaacacgatttcattggggagtttagtaccaccttcgaagaaatgcagaaagctttcgaggagggacaggctcagtgggattgtgtaaatcccaaatacaaacagaagcgtcggagctataaaaactcaggtgtcgtggtcttggctgacctgaaattccacagggtctattcattcctggactatataatgggggggtgtcagattcactttacagtggccattgatttcaccgctagcaatggtgacccgaggaactcatgcagtctgcactacattaatccctatcagcctaacgagtacctgaaagccctggtaagcgtgggagagatctgccaggactatgatagcgacaagcggtttagcgctctcgggtttggagcacggatcccacccaagtacgaggtgagtcatgatttcgccatcaactttaatcctgaggatgacgagtgcgaggggatccaaggggtagtcgaggcataccaaaactgtctgcctcgagtacagctgtatggccctaccaacgtcgcccctataattagtaaagtggcacgggttgccgctgcagaggaatccacaggtaaggcctcacagtattacattcttctcatcctgactgatggggtagttaccgacatggccgataccagggaagccattgtgcgcgccagtaggctccccatgtcgatcatcatcgttggcgtcgggaacgcagattttacagacatgcaggtcctggatggcgacgatggggtgctgagaagcccgcgaggtgaacctgctctgagagacatcgttcagtttgtgcctttcagggagctgaagaacgccagtcctgctgccctggccaagtgcgtactagcggaggttcccaaacaggtagtggagtactattctcacaggggcctgccacccagatctctgggagtgcccgctggagaggcttcacctggctgcaccccttag

SEQ ID NO: 183832 - DNA, 1677 bp, synthetic construct
  misc_feature 1..1677: note = Description of Artificial Sequence: Synthetic coding sequence
  source 1..1677: mol_type = other DNA
atgagcgccggcagcgagcggggcgccgccgccacccccggcggcctccctgccccctgtgctagcaaggtggaattgagactgagctgtcgccatctgctggaccgcgacccactgaccaagagcgatccaagtgtggctctgttacagcaggcccagggtcaatgggtccaggtggggagaaccgaagttgtacgttcctctctgcatcccgtcttcagtaaagtgttcacggtggactattattttgaggaagtgcaacgcctgcgtttcgaggtctatgatactcatgggcccagcgggttctcttgtcaggaagatgatttcctcggggggatggagtgcactctcggccagatcgttgcccagaagaaagttacccgtccgctgttgctgaagtttggccgaaacgcgggcaagagcacaattactgtcatcgcagaggatatctccggtaacaatggttacgtggaactgtcatttcgcgccaggaaactcgacgacaaggatctgttctctaaatccgacccttttctggagttataccgggtgaatgacgaccagggcctgcaattagtctacaggacagaagtggtgaaaaacaatttaaatcccgtgtgggaagcctttaaggtctccctgagttccctgtgttcttgtgaggagacgagaccactcaagtgtctagtgtgggattacgacagcagaggcaaacatgactttattggcgaattctccacgaccttcgaggagatgcaaaaggcctttgaggagggccaggcgcagtgggactgtgtaaatccaaagtacaaacagaagcggcggtcttataagaacagcggagtggtggtcctggccgatctgaaattccaccgggtgtactcttttctggactacatcatggggggctgccagattcattttacagtggccattgatttcaccgcctccaacggtgaccctagaaatagctgctcattgcattatatcaacccttaccaaccgaacgagtacctgaaagctttggttagcgtcggggagatctgtcaggactatgactctgacaagcggttctctgcactgggcttcggggcacgtattcctcccaaatacgaggtgtctcatgatttcgctattaatttcaaccccgaagatgacgagtgcgaaggaatccagggtgtagtggaggcttatcaaaattgcttacctcgcgtacagctgtatgggcccaccaacgtggcgccgattatttcaaaagtggctagggtggcagccgccgaagaatccaccgggaaggcttctcagtactacattttgctcatcttgacggatggggttgttactgatatggctgacacacgggaggcgatagtccgggcttctaggctccccatgagtataattatcgtgggggttggcaatgctgatttcaccgatatgcaggtcctggatggtgatgacggcgtgctgagatcaccgcgtggggagcccgccctcagggatatcgtccagttcgtcccctttcgggaactgaaaaacgctagccctgcagctctcgccaagtgtgtgcttgcggaagttcctaaacaggtcgtggagtactattcccaccgaggccttccaccgcgcagtctgggggttccagctggcgaggcaagcccaggctgtacaccctag

SEQ ID NO: 183833 - DNA, 825 bp, synthetic construct
  misc_feature 1..825: note = Description of Artificial Sequence: Synthetic coding sequence
  source 1..825: mol_type = other DNA
atggccagcgacagcggcaaccagggcaccctgtgcaccctggagttcgcagttcagatgacttgtcaatcttgtgtcgacgccgtgcgtaagtccctacagggtgtggccggtgtccaggatgtggaagtgcaccttgaagatcagatggtgctcgttcatacgaccctcccctctcaggaggtccaggctctgctcgaaggaacagggaggcaagccgtactcaaggggatgggaagcggccagctgcagaacctgggggccgccgtcgccatcctcgggggccctggtaccgtccagggcgtggtgcgttttcttcaactgacaccagaaaggtgcctgatcgaagggaccatcgatggcctggaacccggcctgcatggactgcacgtacaccaatatggagatctcacaaacaactgcaacagctgtggcaaccacttcaatcccgacggcgctagccatgggggcccccaggattctgaccgtcatcggggggacctggggaacgtgcgagcagatgctgatggaagggcaatcttccggatggaagatgagcaattgaaggtgtgggacgtgatcgggcgaagcctgatcatcgacgagggagaggacgacttgggccgcggaggacacccattgtctaaaattaccggcaattccggcgaaaggctggcatgcggaataatcgcaaggtccgccgggttattccaaaatcccaagcagatttgttcctgcgatggcttaacaatatgggaggagcgaggccgccctattgctggcaagggccgtaaggagagcgcacaacccccggcccatttgtag

SEQ ID NO: 183834 - DNA, 1365 bp, synthetic construct
  misc_feature 1..1365: note = Description of Artificial Sequence: Synthetic coding sequence
  source 1..1365: mol_type = other DNA
atggccctgcagctgggccggctgagcagcggcccctgctggctggtcgcgagagggggttgtggcggaccacgagcttggtctcaatgtggaggaggtgggcttcgggcctggtctcagcgctcagctgccgggagggtgtgtagacccccagggcccgcaggcacagaacaatcccgcgggttggggcacggaagtaccagccgcggagggccttgggtggggaccggcctggcagctgcgctggccggcctggtaggattggcaaccgccgctttcggccatgtgcaacgggcagagatgctgcctaagacttctgggaccagagctacttcactagggcgacccgaggaagaggaggatgaacttgcccatagatgtagttccttcatggcgccccctgtgaccgatctgggagaactgcggcggcggccaggagatatgaaaacaaaaatggaattgctgatcctcgagacccaggctcaagtctgtcaggcgttggcccaggtagacggcggggccaatttttcagtggacagatgggagcgcaaagaggggggcggcggaatttcatgtgtcctccaggacggatgtgtgttcgagaaagctggcgttagtatctctgtggttcacggtaacctgagcgaggaagccgctaaacagatgagaagccgaggaaaagtactaaaaacaaaagatggtaaactaccattctgtgctatgggcgtatcaagcgtgatccaccctaagaaccctcatgctccgactattcactttaattatcgctacttcgaggtggaggaagcagatgggaacaagcagtggtggttcggaggaggatgtgatctgaccccaacctacctgaatcaagaggacgccgtccattttcacaggaccctgaaagaagcatgtgatcagcatggccctgatctgtaccctaaattcaaaaagtggtgcgacgactacttcttcatcgctcatcggggggaacggaggggcatcggaggaatattcttcgacgacctggacagtccttcaaaggaagaagtgtttagattcgtgcagagctgtgccagggcggtggtcccatcctacataccactggtcaaaaagcactgtgatgactcgtttacccctcaggagaagctatggcagcagctcaggcggggtcgatatgtcgagtttaacctgctgtacgataggggaacaaagttcggcttatttactccaggttcaagaatcgagtccattcttatgagtctccctctgaccgctaggtgggagtacatgcacagtccttccgagaattctaaagaagctgagatcctggaggtcctacgacaccctagggattgggtcagatag

SEQ ID NO: 183835 - DNA, 1026 bp, synthetic construct
  misc_feature 1..1026: note = Description of Artificial Sequence: Synthetic coding sequence
  source 1..1026: mol_type = other DNA
atgggcgtggccaccaccctgcagccccccaccaccagcaagaccctccaaaagcaacatctggaagctgtgggtgcataccagtacgttctgacatttctctttatgggacccttctttagtctgctcgtctttgtcctgctgttcactagcctgtggcccttcagcgtgttctatcttgtctggctctatgtcgactgggacacccccaatcaagggggacgtaggagcgaatggattaggaacagggccatatggaggcagttgcgcgactactatccagtgaagctggtgaaaacggcggaacttcctccggaccggaactacgtactcggcgcccatccacacgggataatgtgtactgggtttctctgtaatttcagtaccgagagcaacggtttctcccagctattccctgggcttagaccttggctggccgtgctcgccggtctgttttatctgcctgtgtatagggattatataatgtcttttgggctgtgtcccgtctccagacagtccctcgactttatcctctctcagccacagctggggcaggctgtcgttattatggtgggcggagctcacgaggcactatactcggtgccaggtgagcactgcctgaccctgcagaagcggaagggattcgttaggctcgctttgcgccatggggccagcctcgttcctgtgtatagctttggggagaacgacatattccgtttaaaagcatttgccacgggcagctggcaacattggtgtcagctgactttcaagaagctgatggggttttcaccgtgtatattttggggcagagggctcttctcagccacatcttggggcctgctcccgtttgcggtgccaatcacaactgtggttggccggcctatccctgtaccccagagactgcatcctacagaagaggaagtaaaccattaccacgctctgtacatgaccgccctggagcagctattcgaggagcacaaggagtcatgcggtgtccctgccagcacctgtctcaccttcatttag

SEQ ID NO: 183836 - DNA, 930 bp, synthetic construct
  misc_feature 1..930: note = Description of Artificial Sequence: Synthetic coding sequence
  source 1..930: mol_type = other DNA
atggccagcaagagctggctgaacttcctgaccttcctgtgcggcagcgccatcggctttttgctatgctcccaattatttagcattctactgggtgagaaagtcgacactcagccgaacgttctccacaacgatccccatgccagacactccgacgacaacggtcagaaccacttggagggtcaaatgaacttcaacgctgattcctcccagcataaggatgagaacactgacatcgccgagaacctctaccagaaggtgcggattttatgttgggtgatgactgggccacaaaacttggagaaaaaagccaagcatgttaaggcgacctgggcacaaaggtgtaacaaagtcctgttcatgagtagcgaggagaacaaggattttcctgcggtgggacttaagaccaaagaaggccgggaccagctctactggaagaccatcaaagcttttcagtacgttcacgaacactatctggaggatgctgattggtttttgaaagcagatgatgacacatacgtgatcctggacaacctaagatggctcctatcaaagtatgatcccgaagaaccaatctactttggtagaagatttaagccatacgtcaagcaggggtatatgtccggaggagccgggtatgtgctgtccaaggaggccttgaagcgcttcgttgatgctttcaaaacggataaatgcacacattcgtcttcaatcgaagacctggctttgggccgctgcatggaaataatgaacgtggaggcaggcgacagcagggataccatcggcaaggagacattccacccgtttgtgcctgagcaccacctgattaagggctacctgcccaggaccttttggtactggaactacaactactacccaccggtcgaggtgagcctcgaaatcttgctgctatgccagtacctcgattag

SEQ ID NO: 183837 - DNA, 303 bp, synthetic construct
  misc_feature 1..303: note = Description of Artificial Sequence: Synthetic coding sequence
  source 1..303: mol_type = other DNA
atggccagcaagagctggctgaacttcctgaccttcctgtgcggctctgcgataggcttccttttgtgcagccagctgttttcaattctgctgggagagaaagtggatacccagcccaatgtcctgcataatgatccccatgcccggcatagcgatgacaatggacagaatcacctggagggacaaatgaactttaacgccgattccagccagcacaaggatgaaaacactgacatagctgaaaacctctaccaaaaagttaggatcctgtgttgggtgatgactggaccccagaatctgtag

SEQ ID NO: 183838 - DNA, 396 bp, synthetic construct
  misc_feature 1..396: note = Description of Artificial Sequence: Synthetic coding sequence
  source 1..396: mol_type = other DNA
atggccagcaagagctggctgaacttcctgaccttcctgtgcggctcggcgatagggtttctgctgtgttcacagttgttttcaatcctgctaggagagaaagtggacactcaaccgaacgttttgcacaatgacccccacgctagacacagcgatgacaatgggcaaaatcaccttgaggggcagatgaattttaacgcagactcatcccaacataaggacgagaacacagatatcgcagaaaatctctatcagaaagtccgaatcctctgttgggttatgacagggccccagaacctggaaaaaaaagccaaacatgtcaaagccacctgggcacagcgctgtaataaggtgttatttatgtcctctgaggagaacaaggacttccccgcatag

SEQ ID NO: 183839 - DNA, 1092 bp, synthetic construct
  misc_feature 1..1092: note = Description of Artificial Sequence: Synthetic coding sequence
  source 1..1092: mol_type = other DNA
atggccagcaagagctggctgaacttcctgaccttcctgtgcggcagtgccatcggctttttgctatgttcccagttattctccattctcctgggcgagaaggtcgacacccagcccaatgttctgcacaacgacccgcacgcacggcactcagacgataatggccagaaccatctggagggccagatgaactttaacgcagatagttcccaacataaggatgaaaatactgatatcgccgagaatctgtaccagaaagttcggatcctgtgctgggtaatgaccgggccccaaaacctcgaaaaaaaggccaaacacgtcaaggcaacttgggcccaacggtgcaataaggtcttattcatgtctagcgaggagaataaggacttcccagccgtgggattgaagaccaaagagggacgggatcagctgtattggaagaccattaaagccttccagtacgtccacgaacattacctggaggatgccgactggttcctgaaggcagacgacgatacgtacgtaattctcgataacttgaggtggctgctgtcaaagtatgacccagaagaacctatctactttggtcgacggtttaagccgtatgttaaacagggctatatgtccggaggcgcgggttatgttttatcaaaagaggccttaaaaagatttgttgacgcctttaagaccgacaagtgtacacactcatccagcatcgaggatctcgcattgggccggtgtatggagatcatgaatgtggaggccggcgacagccgggacactattggcaaggagacattccacccttttgtgcccgaacaccatctcattaaagggtatctgccgcggacattctggtactggaactacaactactatcctccagtggaagggcctggctgctgctcggatctggccgtctccttccactatgtggacagcacgacaatgtacgagttggagtacctggtgtaccacctgcgcccttacgggtacctgtataggtatcagcccacactcccagagaggatcttaaaggaaatctcgcaagcaaataaaaatgaggacactaaagtgaaactgggcaacccgtag

SEQ ID NO: 183840 - DNA, 549 bp, synthetic construct
  misc_feature 1..549: note = Description of Artificial Sequence: Synthetic coding sequence
  source 1..549: mol_type = other DNA
atgccccgggtggtgcccgaccagcggagcaagttcgagaacgaggagttttttagaaaattgtctcgtgaatgtgaaattaaatatactggctttcgagatcgaccccacgaagagcgtcaggcccgattccaaaacgcctgcagagatggacggtcagagattgcgttcgtggccactgggaccaacctttctctgcagttcttccccgcctcctggcagggggaacaaagacaaacgccatcccgggagtacgtagacctggagagggaagccgggaaagtctacctcaaggctccgatgatactgaatggagtttgcgttatctggaaggggtggatagatctacagcgacttgacgggatgggatgtctcgagttcgacgaggaacgggcccaacaggaagatgcactagcgcagcaggcctttgaggaagcgcggaggcggacacgcgagttcgaggaccgtgatagaagccaccgggaagaaatggaggtgcgcgtgtcccagttattagcagtcaccggaaaaaagacaactaggccctag

SEQ ID NO: 183841 - DNA, 564 bp, synthetic construct
  misc_feature 1..564: note = Description of Artificial Sequence: Synthetic coding sequence
  source 1..564: mol_type = other DNA
atgccccgggtggtgcccgaccagcggagcaagttcgagaacgaggagttttttaggaaactgtctcgtgaatgtgaaatcaaatatacaggcttcagggacagaccgcacgaagaaagacaggctagattccaaaatgcttgtcgagatgggagaagcgaaattgcatttgttgcaacagggaccaatttaagcctgcagttttttcccgcttcctggcagggcgagcagagacaaacgccctcacgtgaatacgttgatctagagcgcgaggccgggaaagtttacctgaaggcaccaatgatcctcaatggtgtgtgcgtgatttggaagggttggatagacctacagcggctcgacggcatgggttgcctagaattcgacgaagaacgcgctcagcaagaggatgccctcgcccagcaggctttcgaggaggccagacgccggactagagaatttgaggacagagaccggtcccatagggaggaaatggaggctaggcgccagcaagatccttctccaggaagcaacttaggcggcggggatgacctcaagctgcgttag

SEQ ID NO: 183842 - DNA, 1788 bp, synthetic construct
  misc_feature 1..1788: note = Description of Artificial Sequence: Synthetic coding sequence
  source 1..1788: mol_type = other DNA
atggtgggcgtgcccggcgccgccgccttccagctgggccccgagaaacgcgtgccagcaatgcctggctcgcctgtcgaagtcaagattcagtctcgtagttccccaccgacaatgcctccacttcctccaatcaacccgggaggacctcgacccgtaagtttcacacctacagccctttcaaacggcatcaaccacagtcctcctacgctcaatggagcgccctctccccctcagcgatttagtaatggcccggcctccagcacgagcagcgccctgacaaaccagcagctccctgccacttgcggcgccagacagctatcaaagctgaagaggtttctgactaccctgcagcaattcggtaacgatatttctcctgaaatcggagaaaaggttcggaccctggtgttggccctggtcaacagcactgtaaccattgaagagttccactgtaagctccaggaagccacaaatttcccattgcgccccttcgtgatcccttttctaaaggccaatctgccattgctacagcgggagttgctgcattgcgccagagccgcaaagcagaccccaagccagtatctggcacaacatgagcatttattgcttaacactagtattgcctcaccagccgactccagcgagctgctgatggaggtccatggcaatgggaagagaccatccccggagcggcgcgaggaaaattcatttgaccgagatactattgccccagaaccacctgctaagcgcgtgtgcacaatcagtcctgctccccgccattcccccgcactgactgttccattgatgaaccctggagggcagttccatcctacacctcctccactgcagcactacaccttagaagacatcgctacgagtcacctctatcgggagccgaacaagatgttggagcatcgcgaagtgagagataggcaccacagtttgggcctgaatggagggtaccaggacgagttggtggaccaccggttaacggagagagaatgggcggatgagtggaagcatctggatcacgcgctgaattgcatcatggaaatggttgagaagaccagaagaagtatggccgtgctgaggagatgccaggaatcagacagagaggaattgaattactggaagcgccgatacaatgagaataccgaactgcggaaaacagggacagaactggtcagtaggcagcactcccctggatccgctgactccttatccaacgatagtcagagggagttcaactcacgacccggaacaggatacgtccccgtcgagttttggaagaaaaccgaagaggctgtcaataaagtcaaaatccaggccatgagcgaggttcagaaggccgtggccgaagcggaacagaaggcatttgaagtgattgccactgagcgagctaggatggaacagacaattgccgatgtgaagaggcaggcggccgaagatgcatttcttgttatcaatgagcaagaggagagcaccgagaattgctggaattgtggacgcaaggcaagcgaaacatgcagcggttgtaacattgctagatattgcggctccttttgtcagcacaaagattgggagcgccatcaccgtctgtgtggacagaacttacacggacaatctccccacgggcaaggccgcccacttctaccagtgggccgcggcagctctgcccggagcgctgactgtagcgtgcccagtcctgcactagataaaaccagcgctaccaccagtcggtcaagtacaccagcatccgtaaccgcgattgacacaaatggcctgtag

SEQ ID NO: 183843 - DNA, 1815 bp, synthetic construct
  misc_feature 1..1815: note = Description of Artificial Sequence: Synthetic coding sequence
  source 1..1815: mol_type = other DNA
atggccaaggagagcggcatcagcctgaaggagatccaggtgctggctcgacaatggaaagttggaccggagaagcgcgttccagcgatgcccggttcacccgtggaagtgaagatacagagtcgcagttctccacctacaatgccgccacttccccctatcaatcctggtggaccccggcctgttagtttcactcctacagccctgtcaaatggaattaatcatagccctccgaccctgaacggagccccaagcccaccacaaagatttagcaacgggccggcctctagcaccagtagcgctttaaccaatcagcagcttcccgctacctgcggcgcacgacagttgtcgaaactaaaaaggttcttgacaacgcttcagcaattcggaaacgacattagccccgaaattggcgaaaaagttagaacacttgtgctagcattagtgaactcaaccgttactatcgaagagttccattgtaaactgcaagaggccaccaactttccattgcgtcccttcgtgatcccattccttaaagcaaatttgccactgttgcaacgggaacttcttcattgcgccagggccgctaaacagacccccagccagtacctcgcccagcacgaacatctgcttctcaacactagtattgccagtccagccgactccagtgagctcctgatggaagtgcacggcaatgggaagcggcccagccctgagagaagggaagaaaattccttcgaccgggatactatcgcaccagagccacctgccaagagagtctgcacaatcagcccagcccccaggcactctcctgctttaaccgtccccctgatgaatcctggagggcagtttcaccctactcccccacccctccagcactacaccctggaggatatagcgacctcacacctataccgggagccaaataagatgctggagcatcgagaggttcgagatcgccaccatagtctcggcttaaacggcggctaccaagatgaactggtggaccacagattgacagagagggaatgggcagacgagtggaaacatctcgaccatgcgctgaactgtattatggagatggttgaaaagactcgccgttctatggccgtgctgcgaaggtgccaggaatccgacagagaagaactcaactactggaaaaggcggtacaatgagaatacagaactgcggaagaccggaactgaactagtatctcgccagcatagtcccggctccgcggattccctgagcaatgattcgcagcgcgagtttaatagccggcctggcacaggatacgttcctgtggagttctggaagaagaccgaagaggccgttaacaaagttaaaatacaggcaatgtccgaggtccaaaaggcagttgccgaggctgagcagaaggccttcgaggtgattgcaacagagcgcgcccggatggagcagaccatcgctgacgtgaagaggcaagctgccgaggacgccttcctggtgattaatgaacaggaggagtcaacagagaattgttggaattgcgggagaaaagctagtgaaacttgttcgggatgtaatatagcaaggtattgcggcagtttctgtcagcacaaggactgggaaagacaccatagactctgtggccagaatttgcatggtcagtctccccatggacaaggaaggccactcctgccagtgggccgggggagtagtgcgcgatccgcagactgctcagtcccgagccccgctctggataagacctccgctacgactagtagaagctcaacgccagcctccgttacagcaatcgacaccaacggcctctag

SEQ ID NO: 183844 - DNA, 1815 bp, synthetic construct
  misc_feature 1..1815: note = Description of Artificial Sequence: Synthetic coding sequence
  source 1..1815: mol_type = other DNA
atggccaaggagagcggcatcagcctgaaggagatccaggtgctggcacggcaatggaaagtgggcccagaaaagcgggttcccgctatgcccgggtcccctgtagaggtcaagatccagtctcgatcctcccccccgactatgccccccctgcccccaatcaatcccgggggaccccggccggttagcttcacacccacggcactcagcaatgggattaaccactcacctcctacactaaacggagcgccctctcctccccagagattctctaacggacctgcaagctccacatcttcagccctgactaaccagcagcttcctgcaacatgcggcgcacgtcagctgagcaagctgaagaggttcctcactactctccaacagtttggtaacgatatctcacccgagatcggcgaaaaggtgcgcacgttggtactggctctggtcaatagtaccgtgaccatcgaggaatttcattgcaagttacaggaagcaacaaattttcccttgcgccccttcgtgatacccttcctcaaggctaacctgcctttattacagcgcgaactcctgcattgtgcgcgagccgctaagcagacaccaagccagtacctcgctcagcacgagcatctgctactcaatacctccattgcatctcccgccgattcctcagaactgctgatggaagtgcatggcaacggaaaaaggccgtcaccagagagacgggaagagaatagtttcgatcgggacactattgcaccagagccccccgccaaacgggtgtgtacaatcagccctgccccccgtcacagtcctgcactgacagtcccacttatgaatccagggggacagttccaccccacgcctcccccactccagcattatacactagaggatatcgccacgtctcacctgtacagggaacctaataagatgctcgaacatcgcgaggtgagagacaggcatcattcccttgggttgaatggcggctatcaggatgaactggtggatcaccgactgaccgaacgcgaatgggcagatgagtggaagcatctggaccatgcgctaaattgtattatggaaatggtggaaaaaacacggcggtctatggccgtcctccgtcggtgtcaggagtctgatcgcgaggaactgaactactggaagcgacgctacaatgaaaacactgagcttcggaaaaccggcacggaactggtgtcacggcagcattcgcccggaagtgctgacagcctgtcgaatgattcacagcgtgaatttaactctagaccaggcactggatacgtccctgttgaattttggaagaagaccgaggaagcagtgaataaggttaaaatacaggccatgtctgaggtccagaaggccgtggcagaagccgagcagaaggcttttgaggtaattgccaccgagagggccaggatggagcaaacaatcgcagatgtgaaacgtcaagccgccgaggacgcctttctggtgattaatgagcaggaggagagcaccgaaaattgttggaactgcgggaggaaagcaagtgagacatgttcaggatgcaacattgcccgctattgcgggtcgttctgccagcacaaagactgggagcgacaccaccggctgtgcggccagaatctgcacgggcagagcccgcatgggcagggtcggccccttcttccagttgggcgcggcagttccgccagaagtgcagattgttctgtgccctctcccgctctggataaaacgtccgccaccacatcaagatcatcaacaccggcaagcgttaccgcaatagacaccaacgggctgtag

SEQ ID NO: 183845 - DNA, 792 bp, synthetic construct
  misc_feature 1..792: note = Description of Artificial Sequence: Synthetic coding sequence
  source 1..792: mol_type = other DNA
atgcccggcagccccgtggaggtgaagatccagagccggagcagcccacctacgatgccaccgcttccgccgatcaaccccgggggcccacgaccagtctcttttacgcccaccgcactgtctaatggcatcaatcattcaccacccaccctaaacggtgccccaagcccacctcagcgcttttctaacggcccagcaagctcaactagtagtgccttgactaaccagcagctaccagctacatgcggcgccaggcaactgagtaagttgaagcgcttcctgactaccctgcagcaatttggaaatgatatcagcccagagatcggcgagaaggttcgaacactcgtgttagccctggtcaatagtactgtcaccattgaagaatttcactgcaaactgcaggaagcgacaaattttccgctccgtccgttcgtgatcccattcctgaaggcaaacctacctcttttgcaacgcgagctccttcactgtgctcgcgccgccaagcagacccctagtcagtacctggcacagcacgaacacctcctgttgaatacctctatcgcatcacctgctgactccagcgagcttctgatggaggtacatggaaacggcaagcggccctctcctgaatcatgcattatccacctaaaatccatgggcgtggccagccgacatgagtacttttcggggacgctccaaatgccagctcatccagtacgcaactccacgcttgagaacctgtgggtggattgctcaaggtcgttaagatccaccgtactgcccttcccttag

SEQ ID NO: 183846 - DNA, 1728 bp, synthetic construct
  misc_feature 1..1728: note = Description of Artificial Sequence: Synthetic coding sequence
  source 1..1728: mol_type = other DNA
atgcccggcagccccgtggaggtgaagatccagagccggagcagcccaccgactatgcccccccttccacctataaatccaggcgggccacggcctgtgagctttactcctacggcactctcgaatggcatcaaccattctccacctaccctcaacggggccccgtctcctcctcagcggtttagtaacggccccgcctctagcacatcgtctgctcttactaatcagcagttgccagcaacatgcggcgctagacagctgagcaagcttaaacggtttttaaccaccctgcagcagtttggtaatgatatttccccagaaattggggagaaggtcaggacacttgtattggcgctggttaattctaccgtgaccatcgaggaatttcactgcaagttgcaggaagctaccaattttccactacgcccgtttgtgattcctttcctcaaagcaaatcttcccttgctgcagagagagctgcttcactgcgctcgcgccgcaaagcagactccaagccagtacctggcgcagcacgaacatctcctactcaatacctcaatcgcctctccagccgattcatcagagctgctgatggaagtgcatggtaacggaaaaaggccctcccctgagcgacgggaggaaaacagcttcgacagggataccattgctcctgagcccccagcgaagcgagtgtgcacaatatctcccgctcctcggcatagccccgcacttaccgtcccgttgatgaaccctgggggacaatttcaccccactcccccgccactgcaacattacaccctggaggacattgcgacaagtcacttgtaccgggaaccaaataaaatgttggaacatagggaagtgagagatcgacaccactcactcgggttgaacgggggataccaagatgagttggtagaccaccgtcttaccgaacgggagtgggctgacgagtggaagcacttggaccacgctctcaactgtatcatggagatggttgaaaagacaagacgaagtatggcggtgctccgcagatgtcaggagagcgacagggaggaattgaactactggaaacgccgctacaacgaaaataccgaactcaggaaaactgggaccgagctagtgtccagacagcatagtcctggctctgccgatagtctcagcaacgattcccaaagagagttcaactcccgcccgggcacagggtacgtaccggtggaattttggaaaaaaactgaggaggcggtgaataaggtgaaaattcaggcaatgagcgaggtgcagaaggccgttgcggaggccgagcagaaggccttcgaggtcatcgccacggagcgagcccggatggagcagaccatagccgatgtgaaacggcaggccgccgaagacgctttcttagtcataaacgaacaagaggagtccacggagaactgttggaactgcggcaggaaggccagtgaaacctgcagtggatgcaatatagcaaggtattgcgggagcttctgccaacacaaggattgggagcggcatcaccggttatgtggccagaaccttcacggccagtctcctcatggacagggccgccctctgttgcccgttggccggggaagtagcgcacgaagcgctgactgctccgtgccgagccccgctctcgacaagacttcagcaaccacctcaagatccagcacgcccgcttcggtcaccgcgattgacacaaatgggctctag

SEQ ID NO: 183847 - DNA, 1137 bp, synthetic construct
  misc_feature 1..1137: note = Description of Artificial Sequence: Synthetic coding sequence
  source 1..1137: mol_type = other DNA
atggaggtgcacggcaacggcaagcggcccagccccgagcggcgggaagaaaactcgtttgacagagataccatagccccagaaccacccgcaaagagagtatgtaccatctctcccgcccccagacactcccccgccttaacagtccccctcatgaatccaggaggtcagttccacccaacccctccaccactccagcattatactctggaggatattgccactagccacttgtatcgggaacccaacaaaatgctggaacaccgcgaggtgcgtgataggcaccactccctgggcctcaacgggggttaccaggacgagttggttgatcatcggctgaccgagcgagagtgggccgacgaatggaagcacttagaccatgcgctgaattgcatcatggaaatggtggaaaaaactagaaggagcatggccgtcctgcgacggtgtcaggagtccgatcgagaagagctgaattactggaagcgtaggtacaatgaaaataccgaactgcggaaaaccggtactgagctggtttcacgacagcactctccaggatctgctgattctctttcaaacgattcccagagagaatttaactcccgtccaggaacaggatatgtacccgtcgaattttggaaaaaaacagaagaggcagtgaacaaggtcaagatacaggctatgtccgaagtccaaaaggctgtggcagaggctgagcagaaggcctttgaggtgatcgctactgagcgcgcccgcatggagcagactatcgccgacgtcaagagacaggccgctgaggatgcctttctggttatcaacgaacaagaagaaagcaccgagaattgctggaactgtgggcgtaaggcctctgagacgtgctcaggatgtaatatcgccaggtactgtggcagcttttgccagcacaaggattgggaaagacaccatcggctctgtggccagaacctgcacggtcagtccccacacggacagggtcgaccccttctccccgttggccggggtagctcagccaggagtgcagattgcagtgttcctagtcctgcactggataaaacttctgccacaacatcacggtctagcaccccagcaagtgtgacagcgatcgatactaatgggctgtag

SEQ ID NO: 183848 - DNA, 546 bp, synthetic construct
  misc_feature 1..546: note = Description of Artificial Sequence: Synthetic coding sequence
  source 1..546: mol_type = other DNA
atggtgggcgtgcccggcgccgccgccttccagctgggccccgagaagagggtgccagctatgcctggctccccagtggaagttaagattcagtcccggagcagccccccaacaatgccccccctgccgcccataaaccccggtggtccacggcctgtgtctttcacacctaccgctctgtcgaacggcattaaccacagtcctcctactttaaacggagcgcctagccccccccagcgcttctccaatgggcctgcctctagcacctcttctgctctgaccaaccagcagctgcccgccacctgtggggcccgacaattgagcaaactgaagcggttcttaacaacgttgcagcaatttggaaacgatatatccccagagataggagaaaaggtacggacattggtgcttgctttggttaatagcaccgtgacaatcgaagagtttcactgcaagctccaggaggcaacaaattttccgctccgccccttcgtgatcccattcctgaaggctaaccttcctttactgcaacgcgagctgctgtag

SEQ ID NO: 183849 - DNA, 243 bp, synthetic construct
  misc_feature 1..243: note = Description of Artificial Sequence: Synthetic coding sequence
  source 1..243: mol_type = other DNA
atggccaaggagagcggcatcagcctgaaggagatccaggtgctggcccgccagtggaaggtgggccctgaaaagcgcgtccccgcaatgccgggatcaccagtcgaggtcaaaattcagtcccgctcctctccgcctacaatgccaccactcccccctataaacccaggcggcccacgacccgtgtccttcacgccaaccgccctgtctaatggtattaatcacagccctccgaccctctag

SEQ ID NO: 183850 - DNA, 459 bp, synthetic construct
  misc_feature 1..459: note = Description of Artificial Sequence: Synthetic coding sequence
  source 1..459: mol_type = other DNA
atgagcgaggtgcagaaggccgtggccgaggccgagcagaaggccttcgaagtcatcgctaccgagagggcgcggatggagcagacaattgctgatgttaaacgccaggccgctgaggacgcgttcctagtgattaacgaacaagaagaaagcaccgaaaactgctggaattgtggccggaaagcctccgaaacctgcagcggttgcaacatcgcgagatactgcgggagtttctgccagcataaagactgggaacggcatcaccggttgtgcggacagaacctccacggccaatctccccacggccagggacggcccctgctgccagttggaaggggctctagtgccaggtctgcagactgctcagtgccatcacctgctttggataagacaagtgcaacaaccagtagaagcagtaccccagccagcgtgacagcaatagatacaaatggtctgtag

SEQ ID NO: 183851 - DNA, 1962 bp, synthetic construct
  misc_feature 1..1962: note = Description of Artificial Sequence: Synthetic coding sequence
  source 1..1962: mol_type = other DNA
atgcccgccagccggctgcgggaccgggccgccagcagcgccagcgggagtacttgtgggagcatgagccagacccatcccgtccttgagtccggcctcttggcatctgcaggctgttcagccccccgaggacctcggaaaggcgggccagctcctgtcgaccgaaaagcgaaagcctcagccatgccggatagtcctgccgaggtaaagacacaacctagatcaacccctcctagcatgcctcccccacccccagccgcttcacagggggccactagacctccgtctttcacaccacatacacaccgggaagacggcccggccaccctgcctcacggcagattccacggttgcctgaagtggagcatggtatgtttgttaatgaatggctcttctcattcccccaccgccatcaatggtgccccctgcacccccaacggcttctccaacggcccagctaccagtagtacggcctccctcagtactcaacatctcccccctgcctgcggggcccgccagttatcaaagctgaagcggtttctgactacactgcaacagttcggatcagatattagcccggagattggagagagggtccgcacgctcgtactcggcctggtgaactctacattaactatcgaagaatttcactcaaagctccaggaggccaccaactttcctctccgcccattcgtgattccttttttaaaagccaatcttcctctgctccagagagaactcctacactgtgccaggctggccaaacagacgccagctcagtatctcgcccagcacgaacaactgctgctggatgcctccgccagttctcctatcgactcctcagaactgttgctcgaagtgaatgagaacgggaaacggcggacgcctgaccgcactaaagagaacggaagcgaccgcgatccactccacccagagcatctgagtaagcgtccgtgtacattaaatccagctcagcgctactccccatcaaacggcccgccgcaaccgacgccacctccacattatcggctcgaggacattgccatggcccaccacttccgcgatgcttaccggcatcccgatcccagagaattgcgggagcggcacaggcccttggtggtcccaggctcccgccaagaggaagtgattgatcataagctgacggaaagagagtgggcggaagaatggaagcacttgaataacctgctgaactgcataatggatatggtggagaaaacccggaggtcattgacggtactgaggagatgtcaggaggccgatcgagaagagctgaaccattgggcacggaggtacagcgacgctgaggacactaaaaagggtcccgcccctgcagctgcccgcccccgctcctcttccgccggccccgaaggcccacaacttgacgtaccgcgcgagttcctgccacggacgctcacaggttacgttcctgaggacatttggcgcaaagcggaagaggctgtcaacgaggtaaagcgccaggccatgtcagaactgcagaaggctgtcagcgacgccgagcggaaggcccacgagttaattactaccgagcgtgctaagatggaacgagcgttggctgaagccaagcgtcaagcaagtgaagacgccttgacggtcattaaccagcaagaagactcaagcgaatcctgttggaactgtggtagaaaggcgagtgaaacttgtagtggctgcaacgcagcgcgctattgtgggagtttctgtcaacatagggactgggaaaagcatcaccatgtatgtgggcagtcacttcaggggcccacggccgttgtcgccgatcccgtgccgggtcctcccgaagctgcgcattccctgggcccctcattgcctgtgggtgcagctagtcccagcgaagcaggttctgcaggaccctctaggccgggatcaccatcacccccgggacctttggatacggtgccaagatag

SEQ ID NO: 183852 - DNA, 1704 bp, synthetic construct
  misc_feature 1..1704: note = Description of Artificial Sequence: Synthetic coding sequence
  source 1..1704: mol_type = other DNA
atgcccgacagccccgccgaggtgaagacccagccccggagcaccccccccagtatgcctccccccccccccgccgcttctcagggggcaactcgcccgcccagttttacccctcacacactcatgaatggatcctcccacagccccaccgccattaacggagccccatgtactcccaatggtttttccaatgggcctgcaacctcatctaccgccagtctaagcacccagcatctgccccccgcctgtggcgcaagacagctgtcaaagctgaagcgctttctcaccaccctacagcagttcggtagcgacatcagccctgagattggggagcgagtccggactctggtgctgggtctggttaatagcacactgacaatagaagagtttcatagcaagctccaggaggccacgaactttccattgaggccctttgtaatcccattcctgaaggctaatctccccctcttacagcgtgagctgcttcactgcgccagattagcaaagcagactcccgcccagtacttggcccagcatgagcagctgctgctggatgcttctgcatcatcccctatcgattcgagcgagctgcttctggaagttaatgagaacggcaagcggcgaaccccagatagaacaaaggagaatggtagcgatagagacccactccatcccgaacacctcagtaagcggccatgtaccttaaatcccgctcaaagatattcgccaagtaatggaccaccgcagcctactcctcccccccattaccggcttgaagacattgcaatggctcaccatttccgggatgcataccgtcacccagaccctagagaactgcgcgagagacacaggcctctcgttgtacctggctctaggcaggaagaagtgatcgatcacaaactcacggagagggagtgggcagaagagtggaagcacttaaacaaccttcttaactgcatcatggacatggtggaaaagaccagacgaagcctcaccgtgctcaggcggtgccaggaggcagacagggaggagttgaatcattgggcacgcaggtactcggatgccgaggatacaaagaagggccctgcccccgccgcagcccgtcctcgatcttcatccgctgggcccgaaggtcctcagctggatgtacctagagaatttctccctaggactctgacaggctacgtgccggaagacatctggcggaaagctgaggaggccgtcaacgaggttaaacgtcaggcaatgtccgagctccagaaggccgtcagtgatgccgagaggaaagcccacgaactcatcaccactgagagagctaagatggagcgggctcttgccgaagcgaagcgccaggcctctgaagatgctctgacggtcatcaaccagcaggaggattcttctgagagttgttggaattgcggaagaaaggccagtgaaacctgctccggctgtaacgccgcgagatactgcggttctttctgccaacacagggattgggagaagcaccatcacgtctgtggccagtctttgcaaggccccaccgctgttgtggcagaccccgttcctggaccaccagaggctgcgcattctcttggcccgagcttgccagtgggcgccgccagtccaagcgaggcaggaagtgctggaccttctaggcccggaagtccatcaccccccggacccctggatacagtgcctcggtag

SEQ ID NO: 183853 - DNA, 1704 bp, synthetic construct
  misc_feature 1..1704: note = Description of Artificial Sequence: Synthetic coding sequence
  source 1..1704: mol_type = other DNA
atgcccgacagccccgccgaggtgaagacccagccccggagcacccctccctcaatgccaccccccccgcctgcagcttcacagggagctacacgcccccccagcttcactccacacacactgatgaacgggagctctcattccccaacagcaatcaacggagccccttgcacccctaatggtttttcaaacggccccgctacctcatctactgcgagtctcagcacgcagcacctgccgcccgcgtgcggcgcccggcaactcagtaagttgaagcgctttcttacgactctgcagcagttcggctccgatatcagtcccgagatcggggaacgggtaagaaccttagttctgggacttgtcaatagcactcttaccatcgaagagtttcatagcaaactccaggaggctactaattttcccctgaggccgttcgtcatcccctttctgaaagctaacctacctttgttacaacgcgagctgctgcattgcgccaggctggcaaagcaaacccccgcgcagtacttagcacaacacgagcagttgcttctcgatgcttctgccagcagtcccattgactcgagtgagctgttattagaggtgaacgagaacggcaagcgaaggacaccggatcgcaccaaagaaaatggttctgaccgcgaccctctgcatcctgaacatctgtccaaacgcccttgtacgctgaatcccgctcagcgttacagccctagtaatggacccccacagcccacccccccgccccactacagactcgaagacatcgcgatggctcaccacttccgtgatgcttatagacatcctgaccctagggagctgcgtgagcgccatcgtccgctggtggtcccgggaagtcgccaggaggaagtgatagatcacaaactcactgaacgagagtgggccgaggagtggaaacatctgaacaatctgctaaactgcattatggacatggtggagaagacccgaaggtcccttacagttcttaggaggtgtcaagaggctgatagggaggaacttaaccactgggcgcggcggtatagtgacgccgaagacaccaaaaaagggcctgccccagctgccgcccgacctaggtccagctcagccggacctgagggcccacagttagacgttcccagagaattcctgccgaggaccctaactgggtatgtgcccgaagatatctggcgtaaggctgaagaggccgtcaatgaggtcaaacgtcaggccatgagcgaactacagaaggctgtctccgatgcagaacggaaagctcacgagctgattactactgagcgcgccaagatggaacgggcccttgcagaggccaagagacaggcttcagaggatgctctgaccgtgattaaccagcaggaagattcttccgagagctgctggaactgcggccggaaagcgtccgagacgtgcagtggatgtaacgccgcaagatattgtggctcattttgccagcatagagattgggagaaacatcatcacgtgtgcggtcagtcccttcaggggccaaccgcggtggtggctgacccggtgcccgggccgcccgaagccgcccactcattgggcccatcacttccagttggggctgctagcccctccgaggcaggcagcgccggcccctcccgccccgggtcgcctagtcctccagggcccctagatactgtcccacgctag

SEQ ID NO: 183854 - DNA, 1848 bp, synthetic construct
  misc_feature 1..1848: note = Description of Artificial Sequence: Synthetic coding sequence
  source 1..1848: mol_type = other DNA
atgcccgccagccggctgcgggaccgggccgccagcagcgccagcgggtctacttgtggcagcatgagccaaacccaccccgtcctggagtctgggctgctggcctcagctggatgtagcgccccgagaggcccgagaaaggggggacctgctcctgttgaccgcaaggccaaggcatctgccatgcccgatagtccagcagaggtgaaaactcagcctaggtcgacgcccccctctatgcccccaccgccacccgccgccagccaaggagccacaagacctccgagtttcacaccccataccttgatgaacggatcctcccactctccaactgcaattaatggagctccttgtactcctaatggctttagtaacggaccagcaacgtctagcactgccagtctgagcactcagcacctgccccctgcttgcggcgcccggcagctgtccaagctgaaacgtttcctgaccaccttacagcagtttggctcagacatctctcctgagataggggagagggtgaggacgctggttctcggcctcgtcaatagtacactcactattgaggaatttcactcaaagctgcaggaggcgaccaatttccccttacgtccctttgtaatcccatttctcaaagcgaatttacctttgctccagcgcgagctattgcactgtgcacgtcttgcaaagcagacccccgcacaatacttggcccagcacgagcagctcctgctggacgcctcggccagcagcccaatcgactcatcagaacttctgctcgaagtcaatgaaaacgggaagcgccgcacgcccgatagaactaaggaaaatggctccgatcgcgatccactgcacccagagagatattcaccttcaaatggacctccacagccgacgccccctccccactaccgccttgaggacatcgcaatggcccatcacttcagagacgcctatcgtcacccagatccaagggaactgcgagagaggcatagacccctcgttgttcctgggagccgccaagaggaagttattgaccataaactcacagaacgtgagtgggcagaggagtggaaacaccttaacaacctgcttaactgcataatggatatggtcgaaaaaacaagaagatctttaacagtgttgcggaggtgccaagaggccgatagggaggaactgaatcactgggctcgccggtacagcgatgccgaggacaccaaaaaggggccagccccagccgctgcaagacctcgctcatcgagcgccgggccagaagggccgcagttggacgttccacgcgaattcctgcctcgcaccctgacaggatatgtgcccgaagacatctggcgcaaagccgaggaagcggtgaatgaagttaaaaggcaggccatgtccgagctccagaaagcagtctctgatgcggagaggaaggcacatgagctgatcacgactgagcgtgcgaaaatggagagggccctggctgaagccaaacggcaggcttcggaggatgccttgacagtaattaaccagcaggaagacagtagcgaatcttgctggaactgtggccgaaaagcctctgagacgtgtagcgggtgtaacgccgctcgttattgcggctccttttgccagcaccgagactgggaaaaacaccaccacgtatgcggccagtcattgcagggtcccaccgccgtggtggctgaccccgtccctggtcctcccgaggctgcccatagcctaggcccatccctccccgtgggagccgcgtcacccagcgaagcggggtccgccggaccatcgaggccaggcagtccttccccccccggccctttagatacagtacctcgctag

SEQ ID NO: 183855 - DNA, 1734 bp, synthetic construct
  misc_feature 1..1734: note = Description of Artificial Sequence: Synthetic coding sequence
  source 1..1734: mol_type = other DNA
atgcccgccagccggctgcgggaccgggccgccagcagcgccagcggctctacatgcggtagtatgtcacagacacaccctgtgctggagtcgggcctgttggcctcagcagggtgtagcgctcctcgcggccccagaaagggcggacccgttatgaacggatctagccattcaccgaccgcgattaatggagccccctgcacgccaaacggcttttcgaacgggcctgcaacgtctagtacagccagcctcagcacgcagcatttacctcccgcgtgcggcgctcgccagcttagcaagctgaaaaggttcctcacaacgctgcagcagtttggttccgacatttccccggaaatcggggagcgtgtgagaactctcgtcctgggtctagtgaatagcacacttaccattgaggaatttcactctaaacttcaggaggccacaaattttcctctgcggcccttcgtcatcccttttctgaaggcaaatctcccactgctgcaacgggaactgttacattgcgctcggctggcaaagcagacgcccgcgcagtacctcgcacaacacgagcaactacttctagatgccagcgcttcatcacctatagattccagtgagcttctgctggaggtgaatgagaacggcaagcggcggacgccagataggacgaaggaaaatgggtcagatagggatccgctgcaccctgagcacctctctaagagaccgtgcacactgaatcctgcccagcgctactcacctagtaatggcccaccccagcccactccccctccccattaccggctcgaagacatcgccatggcacatcatttcagggacgcctaccggcatcccgaccctagggagctaagagagcgtcataggccgctggttgttcccggaagtcgacaagaggaggtcatcgaccacaaactgacagaaagagagtgggccgaagaatggaagcacctgaataatttactgaactgcatcatggatatggtcgagaaaacccgtcggagcctgacagtgcttcgcagatgccaggaggcggacagggaggagttaaaccattgggcaaggcgctattccgacgctgaagacactaaaaagggccccgcacctgccgctgctcgcccccggagctccagtgccgggcctgaaggaccccagcttgatgtgcccagggaattccttcctaggactctgaccggttatgtaccagaggatatctggcgcaaggccgaggaggcggtcaatgaagtaaagcgccaggcgatgtctgagctgcagaaggccgtgagcgatgctgaacggaaagcacacgagctgattacaacagaaagggcgaagatggagagagcgttggccgaagccaaacggcaggcaagcgaggatgctctcaccgtgattaaccagcaggaagactcatcagagagctgttggaactgtggcaggaaggcgtctgagacctgttcaggctgcaatgctgcacgctattgcggctctttttgccagcatagggattgggagaaacaccatcatgtctgtggccagtctctacagggtcccactgctgttgtcgccgatccggtgccaggcccaccggaagccgctcacagtctggggccctccctaccagtgggggccgccagccctagcgaagcgggctctgcgggtccctcccgccccggctctccttctccccctggcccactggacacggtgcctagatag

SEQ ID NO: 183856 - DNA, 558 bp, synthetic construct
  misc_feature 1..558: note = Description of Artificial Sequence: Synthetic coding sequence
  source 1..558: mol_type = other DNA
atggccgcccagaaggaccagcagaaggacgccgaggccgagggcctgagtggaactactctcctgcctaaactcataccctctggagcaggcagagagtggctcgaaaggaggcgggcaacgattcgcccctggtccaccttcgtggaccagcagcgcttcagtaggcccagaaatctgggagaattgtgtcagcgcctggtgcggaatgttgaatattatcaatccaattatgtatttgtgttccttgggctaattttgtattgcgtggtgacctccccaatgttactggtcgcattagccgtcttctttggagcctgctatatcctgtacctgaggaccctggaatctaagctggtgctgttcggcagggaagtgtctccagcccaccagtatgcactcgccggcggcattagcttccctttcttttggctggcgggcgcgggctcagcggtgttttgggttttaggggccacacttgtggtcatcggctctcacgccgcctttcaccagatagaggccgtcgatggggaggagctgcaaatggagcccgtttag

SEQ ID NO: 183857 - DNA, 3147 bp, synthetic construct
  misc_feature 1..3147: note = Description of Artificial Sequence: Synthetic coding sequence
  source 1..3147: mol_type = other DNA
atgaaccggttccgggtgagcaagttccggcacaccgaggcccggccaccacgcagggagtcttggattagcgatatcagagcaggcactgcccctagctgccgcaatcatattaaatcctcttgttcactgatcgcctttaacagcgatagaccaggtgtcttaggcatcgttccgctgcaaggtcagggggaggataagcgcagagtcgcgcacctggggtgccactctgacctggtcacggatctggacttttctccgttcgacgacttcctacttgcaactggaagtgcagataggaccgtgaagctgtggaggttacctgggccaggccaggctttacccagtgccccaggcgtggtgctcgggcctgaggatctgccagtggaagtcttacagttccaccctacctcggatggaatactggtttctgcagctggtacgacagtgaaggtctgggacgccgccaagcagcagcccctcaccgaattagccgctcacggggacctcgtgcaatcagccgtatggtctcgagatggtgcgctcgtaggaactgcctgcaaggacaaacagctgcgcatctttgatcctcggaccaagccccgggccagccagtcaacgcaagcacatgagaattcccgggattctagacttgcctggatggggacatgggaacatctcgtctcgacggggtttaaccagatgcgcgagcgggaggttaaattgtgggatacccgcttctttagctccgccttagcatctttgaccctggacacctccctggggtgtttggtgcccttactggacccagattccgggctcctggtgctcgccggtaagggggagcgacagctgtactgttatgaagtggtgccacaacagccggcgctgtctcccgtaactcaatgcgttctagaaagtgtgctgcgcggagctgcgcttgtgcctcgccaggcattagcggtgatgagctgcgaggtgctgcgagtcctgcagctcagcgatacagcgatcgtccctatcggttatcatgtgcctagaaaggccgtggagtttcacgaggatttgtttcctgacactgcaggatgtgtgccagctacagacccacattcctggtgggctggtgacaaccagcaggtccagaaagtgtccttgaatcccgcttgtaggccacatcccagtttcacatcctgcctcgtgccacctgcagaaccactgcccgatacagcccagccggcggtgatggagactcccgtaggggatgccgacgccagcgaaggtttttcttcaccaccgagctccttaacttcaccctccacccctagctctttaggaccatctttaagttcaacttctgggattgggacctcccccagcttaaggtccttgcagagcctgctgggccccagctctaaattcagacatgcccagggtaccgtccttcatcgcgactcgcacatcacaaatctgaagggattgaatctgacaacacccggggagagcgatgggttttgcgcaaacaaattaagggtcgccgtgccccttctgtcttcagggggccaggtggcggtactggaacttcggaagcccgggcgactgcctgacaccgccttgccgacacttcaaaacggggcagcggtgactgacttagcttgggaccctttcgatcctcataggttggccgtcgcaggcgaggacgcccgcattaggctctggcgggtgccagccgaggggctggaggaggttcttacaacacccgaaaccgtgttgacaggtcacaccgagaagatctgctccttgcgcttccaccccctagcagccaatgtccttgcaagtagcagttatgatctgactgtacgcatatgggaccttcaagctggggctgatcgcctgaaactgcaaggccaccaagaccagattttctccctggcctggagcccagatggacaacaactggcaaccgtgtgtaaagatggccgcgtcagagtgtacaggcccagatctggacccgaacctcttcaagaaggtccaggaccgaagggagggcgcggagcaaggattgtctgggtttgtgatgggagatgtctgctggtatcgggctttgacagtcagtctgaacgccagctgcttctttacgaagctgaagccttagccggcggccctttagccgtgctcggtttagacgtagcaccttccacactgctgccctcttatgaccctgacaccggcctggtgctactgacaggcaagggcgatactcgggttttcctgtatgagctgctgcctgagagtcccttttttttggaatgcaattctttcacaagccccgaccctcacaagggcttagttctgcttcctaagaccgaatgcgatgttagagaagtggagcttatgcgttgtctgcgcttgcgccagtccagcctggagcccgtagcctttaggctgcctagggtgaggaaggaattctttcaagatgacgtgtttccagataccgctgtgatctgggagcctgtgctttctgcggaggcatggctgcaaggggccaatggccaaccgtggctgttatccctccagcccccagatatgtctcctgtttctcaagcacccagggaggctcctgccagacgagctccctctagcgctcagtacctggaggagaagtcggaccagcaaaagaaggaagaattgctaaatgccatggtcgcaaagctcggcaaccgtgaggatccattgccacaggacagctttgaaggcgtggatgaagacgagtgggctaaatacctcgctcagataatagtaatgggagtacaggtggtcggaagggctttcgctagagcccttcgccaggaatttgccgcaagtagagcagccgccgatgcaagaggcagggccggacaccgaagcgcagccgcctcaaatctgtcgggcctaagcctccaagaagcacagcagattctgaacgtgtccaaactctctcccgaagaagtgcaaaaaaactatgaacacctctttaaagtgaacgataagagcgtcgggggatcattctatctgcagtctaaagtggtgagggccaaggaacgcctggatgaggagttgaaaattcaggctcaagaggacagggaaaaaggccagatgcctcacacctag

SEQ ID NO: 183858 - DNA, 2778 bp, synthetic construct
  misc_feature 1..2778: note = Description of Artificial Sequence: Synthetic coding sequence
  source 1..2778: mol_type = other DNA
atgaaccggttccgggtgagcaagttccggcacaccgaggcccggcctccccgcagagagtcctggatatcagatatacgcgccggcaccgctccgtcttgccgtaatcacataaagagttcctgctccctaattgcctttaactccgataggcctggcgtgcttgggattgtcccactgcagggccagggagaagataagagaagagtggctcacctgggttgtcatagcgaccttgtgaccgatctggatttttcccccttcgatgactttcttctggctacgggctccgccgacagaacggtgaaattgtggagactgccaggacccggccaagccctaccctccgcccccggggtagtattaggcccagaggatctgccagtggaggtccttcagtttcaccctacttccgacggtatacttgtttcggcagcaggtaccactgttaaggtctgggatgcagcaaagcaacagccattaaccgaactcgcagctcacggtgaccttgttcagagcgcagtctggagcagggatggtgccctggttggcacagcttgtaaggataaacaactgcggatcttcgaccctcgcacaaaaccaagagccagccagtccacccaggcccatgagaacagcagagactcaaggctggcctggatgggcacatgggagcacctggtctccacggggttcaaccaaatgagggaacgggaagtcaaactgtgggacacacgtttcttctctagcgcactggcttcgctcacactggacacatcactaggatgtctcgttccacttttggatccagactctggactcctggtgctcgcagggaagggcgagaggcaattgtattgttacgaagtagtccctcagcaacctgcccttagccctgtgactcagtgcgtcctggagagtgtgcttcgcggcgcggccctggtccctaggcaagcgttggctgtcatgagctgtgaggtacttcgcgttctacagctgtccgacactgctatcgtccccatcggctaccacgtgccacgaaaggccgtggagtttcacgaggatttgttcccagatactgccgggtgtgtgccagcgacggatccgcactcctggtgggcaggagacaatcaacaggttcaaaaagtgagtctcaaccctgcctgcaggccccatccctcgttcacaagttgcctcgtgccccctgctgagcccctgcccgacaccgctcagccagccgtgatggaaactcccgtcggcgacgctgatgcgagtgaaggcttttcctcgccaccatccagccttacatcacctagtaccccttcaagtttaggaccttctctcagtagtactagtgggataggcacctccccttcccttcgctcacttcagagtctgctgggaccctcctccaaatttcgccacgctcagggcactgtgttacatagagattcccatatcactaatctcaagggacttaacctgacaacccccggggagtccgatggtttctgcgcaaataagctaagagtcgctgtgcccctcctaagcagtggaggtcaagtggcagtcctggagcttcgaaagcctggcaggctgcccgacactgctctgcctactctgcagaatggagctgcggtaaccgatctggcctgggacccctttgatccccaccgcttggctgtcgctggagaagacgccagaataaggctttggcgcgtgcccgccgaaggcctcgaggaggtgctgactactccggagaccgtactcacaggacacaccgagaaaatctgcagcctcagatttcatcccttggctgccaacgtattagcttccagcagctatgatctcacagtgcgcatttgggatctgcaagccggggcggaccggctgaagctgcaaggacaccaagaccagatttttagcctggcttggagtccagacggtcagcagctcgccacggtctgcaaggacgggcgtgtgcgggtgtatcgccctcggtcaggccccgagccccttcaagaggggccaggacccaagggcggcaggggtgctaggattgtctgggtgtgtgatggaaggtgccttctcgtgtccggctttgactctcagagcgagaggcagctcctcctgtatgaagcagaggcactcgccggtggacctctggccgttttaggtttggatgtcgccccttctactctgctgccctcatatgaccctgatactggtctggtactcttgacaggtaagggcgacacccgtgtgttcctgtatgagctgctccctgagagtcccttctttctcgagtgcaatagcttcacctcgcctgaccctcacaagggactcgtgctgcttccgaagaccgagtgtgacgtgagagaggttgagctcatgcggtgcctgcgcctgcggcaatcctccctggaacctgttgcgttccgcctaccccgggtgcgtaaggaattcttccaggacgacgtgttcccagacacggccgtgatctgggaacccgtcctcagcgccgaagcatggctgcagggggccaatgggcagccctggcttctcagcctgcagccacctgatatgtcccctgtgtcacaagctcccagagaagccccagcccgtcgggccccctcatcggctcaatacctggaggagaaaagcgatcagcaaaagaaggaggaactgctaaacgccatggtggctaaattggggaatagagaagaccccttgcctcaggacagctttgaaggagttgacgaagacgagtgggactag

SEQ ID NO: 183859 - DNA, 1104 bp, synthetic construct
  misc_feature 1..1104: note = Description of Artificial Sequence: Synthetic coding sequence
  source 1..1104: mol_type = other DNA
atgaaccggttccgggtgagcaagttccggcacaccgaggcccggccacctcggagggaagacaagcagctgcgtatatttgatccccgaacaaaacccagagcctcgcagtccactcaggcccacgagaacagccgcgattccaggctcgcctggatggggacttgggagcatctggtgtctacaggatttaatcagatgagagaacgggaggtgaaactgtgggacacccggttcttttcttctgccctggcgtccctgacccttgacacatccctcgggtgtctggtgcctcttctggatccagactccggactgctggtgctcgccggaaagggagaacgtcagctttattgctatgaagtggtgccccagcagcctgccctgagtccagtcacacagtgtgtcttagagagcgtactccgtggcgcagccctggtacctcggcaagccctcgctgtgatgtcgtgcgaagtcctcagagttcttcaactctcagataccgctatcgtgccaattgggtatcacgtgcctcgaaaagcggtcgaatttcatgaggatctgtttcctgacaccgcaggatgcgtacctgccacagaccctcactcttggtgggcaggcgataatcagcaggtccagaaggtgtccctcaatccagcctgtagacctcacccaagcttcacctcctgcctcgtgcccccagctgagccactcccagatacagcccagcccgctgttatggagacccccgtaggcgatgcagacgcttccgaaggttttagcagcccgccttcttcgctaactagcccaagtaccccatcttccctcggacccagcctgagctcaacatccggcatcggaacttccccttcccttagatctctccagagtctgttaggcccctcatcaaaatttaggcacgcacagggcaccgtgttgcatagagattcccatatcaccaatttaaaaggcctcaacttgaccacccctggcgagtctgacgggttctgcgcgaataagttacgggttgccgtgcccttgttgtcctctggtggtcaggtggcagttctcgaaatgagagagaaaaggcaccgggaggtgtag

SEQ ID NO: 183860 - DNA, 2523 bp, synthetic construct
  misc_feature 1..2523: note = Description of Artificial Sequence: Synthetic coding sequence
  source 1..2523: mol_type = other DNA
atgaaccggttccgggtgagcaagttccggcacaccgaggcccggccacctcgcagagagtcctggatatcagatatcagagcaggcactgctccatcttgtagaaatcacattaaatcatcgtgtagcctgatcgctttcaacagcgatcggcccggcgtgctcggaatagtgcctctccagggccagggggaggataagcgcagggtggcccacctgggctgccattctgagctggctgcacatggggacctagtccaaagcgctgtgtggtccagggatggagcccttgttgggactgcctgtaaggacaaacagctgcggattttcgacccacgaacaaaacctcgagcctctcagagcactcaagcccatgagaactcaagggactcacgcctcgcctggatgggaacatgggagcacctggtctctaccggctttaatcagatgcgggagagagaagtgaagctgtgggatacgagatttttttctagcgcattggcttctcttacattggatacatcactgggctgcctcgtccctttgcttgaccctgattcagggctgctggtgcttgccgggaagggagagagacaactgtattgctatgaagtggtgccacagcaacctgctttgagcccagtgactcagtgcgtgctcgaaagtgtgctgcggggggctgccctagttccccgccaggctttggcagtgatgtcttgtgaagtgctgcgggtgctgcagctgtccgacaccgctattgttcctataggctaccatgtaccgagaaaggccgtggaatttcatgaggatctcttcccggatactgcgggctgcgtacctgctacagacccgcattcctggtgggccggagacaatcagcaagtgcagaaagttagcctgaatcccgcctgtcggccccacccaagcttcacatcttgcctggtcccacctgcagaacctctgccggacacagcccagcccgctgtgatggagaccccagttggcgatgcagatgcatcagaggggttcagctcccctcctagctccctgacttctccgagcacaccctcctctcttgggcccagcttatcgtctactagcggaataggtacctcaccgagtctgcgcagtttgcagagccttctcggtcctagctcaaagtttcggcacgctcaaggtacggtgctgcaccgggactcgcacattacgaacctgaaaggcctgaatctcaccactcctggggagtctgacgggttctgtgcaaacaagttacgcgtcgctgtcccccttctgtcatccggtggccaggtggccgtcctggagctgcgcaaacctggacgactccccgacacagcccttcccactctgcagaacggcgccgctgttacggatcttgcttgggacccttttgatccccatcggctggctgtggctggagaagacgctcggattcgcttgtggcgggtgcccgccgagggcctcgaagaagtcctaaccactcccgagacagttctgactggtcacactgaaaagatttgtagtctcaggttccacccccttgccgccaacgtccttgcaagctcgtcttatgacctaactgtgcgaatctgggacctgcaagctggggcggatcgactcaaactgcagggccaccaagatcagatcttttccctggcatggtcaccagatggccagcagctggcaacggtctgtaaagacgggagggttcgagtttaccgaccacgtagtggacccgagcctctgcaggaggggcccggtccaaaaggcggcagaggtgccagaattgtgtgggtctgtgatggccgctgccttctggtgtctggattcgatagccagtccgaacgtcaactcctcttgtatgaggctgaagctttggctggaggtcctttggccgtccttggtttggacgtagcaccatctactcttttacccagctacgacccagatacgggcttagtcttgctcactggcaaaggcgacacccgcgtgttcctgtatgagcttctgccagaatcgccctttttcttagagtgtaacagcttcacctctccagacccccacaagggcctggtgctgctgccgaaaaccgagtgcgatgtccgggaagtggaactcatgaggtgcctgcgactccggcaatcctctctcgagcctgtagcctttagactgccgagagtgcgaaaagagttcttccaggatgacgttttccctgatactgctgttatttgggagcctgtcctgtccgccgaagcttggctgcaaggcgccaatggtcagccatggttgctgtccttacagccacccgacatgtctcccgtgtcacaggcccccagggaggcaccagccagaagggcaccatccagcgctcaatacctggaagagaagtctgatcagcagaagaaggaggagctgctcaatgccatggtggcaaaactagggaacagggaagacccccttccacaggactcattcgagggagttgatgaggatgagtgggactag

SEQ ID NO: 183861 - DNA, 2118 bp, synthetic construct
  misc_feature 1..2118: note = Description of Artificial Sequence: Synthetic coding sequence
  source 1..2118: mol_type = other DNA
atgggcacctgggagcacctggtgagcaccggcttcaaccagatgagggaaagggaggtgaaactctgggataccaggttcttttcctccgccctggcatctctgacactggacacgtcgttggggtgtctggttccactgctggaccccgactcgggactgctggtcctggctgggaagggagaaaggcagctatattgttatgaagttgtgcctcagcagccggccctatctcctgttacacagtgtgtactggaatctgttctgcgcggggccgccctggttccaaggcaggctctggctgtaatgtcctgcgaagtcttgcgagtattgcaactctcagacacggctatcgtgccaattggatatcatgtgcccagaaaagccgtggagttccacgaggacctcttccctgacacggcgggctgtgtccccgcgaccgacccccatagctggtgggcaggggacaatcagcaggtgcaaaaggtgtccctgaaccccgcctgtcgacctcatccttccttcacgtcgtgcctggtcccgccagccgagccactcccggacacagcccaaccggccgtgatggaaaccccggtgggagatgccgacgcctccgagggcttctcttctcccccaagctcactcacaagcccaagcacaccctctagtctcggaccaagtctgtcttccacatcaggaataggaactagccccagtttgcggtccctgcagtcccttctcggacccagctcaaaatttcggcatgcccaggggacagtccttcatcgggactctcatattacaaatctcaaaggcctgaatcttacaaccccaggcgaatctgacggattttgtgcgaataaactgagggtggcggttccactcctgtctagcggaggccaggtggctgtgctggaactgagaaaaccaggccgacttcccgacacagccctgccaacactccaaaatggggcagctgtgacagacctagcttgggatccatttgacccacacagactcgctgtggccggcgaagacgcaaggatccggctatggcgcgtgcccgccgagggcttagaagaagtactcaccaccccggaaactgtcctgacagggcatactgaaaagatctgcagccttagatttcatcctctcgcagccaacgttctggcgtcatccagttatgatctgaccgtgcgcatctgggatctgcaggccggggctgatcgcctaaagttacagggacatcaggaccaaatattctcgctcgcatggtcacccgacgggcagcaactggccactgtgtgtaaggacggcagagtccgcgtctataggcctcggagtggcccagagccgctgcaggagggaccggggccgaaaggcggccggggtgcaagaatcgtgtgggtgtgcgatggcaggtgtttgctggtctccggcttcgactcccagtccgagcggcagcttttgctctatgaagctgaggctctggcaggcggaccgctggccgtgctcggactggacgtggccccatccacactcctgccaagctacgatccagacaccgggctggtgttactaacaggcaaaggggatacacgagtgttcctgtacgaactactgcccgagagtccatttttcctcgagtgcaactcttttacttcccccgatccccacaaaggtttggtcttgctccctaagaccgaatgtgacgtgcgcgaggttgagctaatgaggtgtttgcgcctgcggcagtcttccctggagccggtggcattccgcctgcctcgcgttcgaaaagagtttttccaggatgatgttttcccagatacggccgtcatctgggaacctgtgctgtctgccgaagcctggctacagggtgccaacggtcaaccttggttactctcgctccaacctcccgatatgtccccggtgtctcaggcgcccagggaggccccggcacgcagggcccccagcagtgcgcagtacctggaggagaaaagtgaccagcagaagaaggaggagctcttaaacgctatggtggccaaactgggcaacagggaagaccccttgccccaggatagtttcgagggggtcgatgaggatgaatgggattag

SEQ ID NO: 183862 - DNA, 1386 bp, synthetic construct
  misc_feature 1..1386: note = Description of Artificial Sequence: Synthetic coding sequence
  source 1..1386: mol_type = other DNA
atgagccggcaggtggtgcggagcagcaagttccggcacgtgttcggccagccggctaaggccgaccaatgttacgaggacgtgagggtgagtcagacaacatgggatagtgggttctgtgctgtcaatccaaaattcgttgctctgatctgtgaagctagcggcggtggtgcattccttgtgcttcccctggggaaaacaggacgtgtggataagaatgcacccaccgtgtgcggacatactgctccagtgttagacatcgcctggtgtccacacaacgacaacgtgatcgcttccggaagcgaagattgtacggtaatggtctgggaaattcctgatgggggccttatgctgcctctgcgggaacctgttgtgactctggagggccacactaagcgggtgggcatcgtggcctggcataccaccgcacaaaatgtactgctgagcgctggctgtgataacgtcattatggtgtgggatgtgggcacaggcgctgccatgttgacactggggcccgaagtacacccagataccatctactctgtagactggtcgcgggatggcggcctgatttgcactagctgtcgcgacaagcgcgtgagaatcatagagcctcgaaaagggaccgtggtagctgagaaggacaggccgcatgaggggacaagacccgtgcgagccgtcttcgtatccgaagggaagatcctgacgactgggttctccaggatgtctgagcggcaggtggctctctgggatactaaacatctggaggagcctctgtccttgcaagagttggatactagcagtggtgtgctgctgccctttttcgaccccgacacaaacatcgtgtacttgtgtgggaaaggagattccagcatcaggtatttcgagatcacctccgaagcacctttccttcactacttaagtatgttcagctcaaaggaaagccagcggggaatgggctacatgccaaagaggggcttagaggtcaacaagtgtgagatagcccgattctacaagcttcacgagagacgatgtgagccaattgctatgaccgtgccccggaagtcggatctttttcaggaggatctttaccctccgaccgctgggccggacccagcgctcactgccgaagagtggttgggtggtagggatgccggcccacttctcataagcttgaaagatggctacgtgccacccaagtcacgggagttgagggtcaaccgcggcttagatactggtagaagaagagccgcccccgaagcctctggtaccccatcatctgatgcagtaagtcggctcgaagaggaaatgaggaaattgcaggccaccgttcaggaactccagaagagactggacagacttgaagaaacggtgcaggctaaatag

SEQ ID NO: 183863 - DNA, 1443 bp, synthetic construct
  misc_feature 1..1443: note = Description of Artificial Sequence: Synthetic coding sequence
  source 1..1443: mol_type = other DNA
atgaccgtgaccaagatgagctggcggccccagtaccggagcagcaaattcagaaacgtttacggcaaagtcgccaatagggaacattgtttcgatggcattccaatcaccaagaacgtccacgataaccacttttgcgctgtgaacacacgttttctggccatcgtgacggagtcggctggtgggggatcctttctggtaattccccttgaacaaacaggtcgcattgaacccaattacccgaaagtttgcggccaccaaggcaatgttctggacattaaatggaacccctttattgacaatattattgctagctgttccgaagacacctcagtgaggatttgggaaatacctgagggcggacttaagagaaacatgacagaagccctgctggagttgcatggccactctcgccgagttgggttggtggagtggcaccccactactaataatatcttattcagcgcaggctacgattacaaagtactcatttggaacctcgacgtaggcgagccagtcaagatgatagactgtcatactgacgtgatcctctgtatgtcttttaatacagatggctccctgctgactaccacctgtaaggacaagaagttgagagtgattgaaccacgtagcggcagggtgctgcaagaagctaattgcaaaaatcacagagtcaatcgagtggtgtttctgggaaatatgaagcggctgcttaccacaggagtatctagatggaacacgagacagatcgctctttgggatcaggaagacctgtctatgccactgattgaggaggagatcgatggattgtccggacttttattccctttctatgatgcagacacacacatgctgtatctggccgggaagggggacgggaacatccggtactacgaaatctccaccgagaagccctacctgtcttatctgatggaatttaggagccccgcccctcagaaaggcttgggtgtgatgcctaagcacggactggatgtgagtgcctgtgaagtattccgcttctacaagctggtgacactcaaggggcttatcgagccgatttccatgattgtgcctcggcgctccgactcttaccaggaagacatatatcccatgacacctggcacagagcccgcattgacgccagacgaatggctgggtggcatcaatagggatccagtactgatgagcctgaaggagggctataaaaagtctagcaaaatggtctttaaagctccaataaaggaaaaaaagagcgtagtggttaatggaatcgatctactggagaacgtccctccccgaactgagaacgaactgctgcggatgtttttccggcaacaggacgagattaggaggctgaaggaagagctggcccaaaaggatattcgtatccgtcagttgcagctcgagcttaaaaatctaagaaactcccctaagaactgttag

SEQ ID NO: 183864 - DNA, 1269 bp, synthetic construct
  misc_feature 1..1269: note = Description of Artificial Sequence: Synthetic coding sequence
  source 1..1269: mol_type = other DNA
atgctggacctggaggtggtgcccgagcggagcctgggcaacgagcagtgggagttcaccctgggcatgcctctggcccaggctgtagccattctccagaagcactgtcggatcattaagaacgtccaagtgttgtactctgaacagtcgccgctctctcacgacctcatcttgaacctgacacaggatgggatcaagttgatgttcgacgctttcaaccagcgactcaaggtaattgaggtttgcgacttgaccaaagtgaaactgaagtactgcggagtccacttcaatagtcaagccattgctccaactattgagcagatcgatcagtccttcggagctacccatcctggcgtttacaatagtgcggagcagctctttcacttaaacttccggggcctctcattcagctttcagctcgattcatggactgaggcaccaaagtatgagcctaacttcgcccatggcctagccagcctccaaatcccgcacggagctactgtgaaaaggatgtacatctactccggcaatagtctgcaggacactaaggcgcccatgatgccactcagctgctttctcggcaacgtctatgcggagtccgttgacgttttgcgtgacggtacaggaccagctggcctcagactgaggctattggccgcaggatgtggccctggcctgctggccgatgctaagatgcgagtattcgagcgatcagtctacttcggtgattcctgccaggatgtgctgtcaatgctcggatcaccacataaggtcttttataagtccgaagataaaatgaaaattcattccccttcaccccacaagcaagtgcctagcaaatgtaacgattacttttttaattacttcaccttaggagtggatattctcttcgacgccaacacacataaagtgaaaaagtttgtcctgcacacgaactaccccggacactataattttaatatttaccatcgatgtgaatttaaaatacccctcgctatcaaaaaggaaaacgcggatggccaaactgagacgtgcaccacctattccaaatgggacaatatccaagagctgctgggccacccagtcgaaaagcctgtagtgctccatcgctcgtccagtccaaacaacacaaacccctttggttcgactttctgcttcggcctgcagaggatgatatttgaggtgatgcaaaataaccacatagccagcgtcacgctgtacgggcccccgaggcctggtagccacctgcgaaccgcagagctgccctag

SEQ ID NO: 183865 - DNA, 1470 bp, synthetic construct
  misc_feature 1..1470: note = Description of Artificial Sequence: Synthetic coding sequence
  source 1..1470: mol_type = other DNA
atgagcttccggaaggtggtgcggcagagcaagttccggcacgtgtttggccagcccgtcaagaacgaccaatgctatgaggacattcgggtgagcagagttacctgggatagtacgttttgcgccgttaatccaaaatttttggccgtgatcgtcgaagcatccggggggggagcattcctggtgctgccgctgtccaagaccggcagaatcgataaggcttacccaacggtatgcgggcacaccggaccagtccttgacattgactggtgcccacacaatgatgaagtcatcgcctccggcagcgaagactgcactgtcatggtgtggcagattcctgagaacggtctgacttcccctctgaccgaacctgtggtggtactggagggacacacaaagcgcgtggggataatagcgtggcacccaaccgcaaggaacgtcctgctcagcgccggatgtgacaacgtggtgctgatatggaatgtaggtactgctgaagaactctatagactagactctctgcatcccgacttaatctacaatgtgtcctggaaccacaacggatctctgttctgcagtgcatgtaaggacaagtctgtcaggatcatcgacccccggaggggtaccctagtggctgagagggaaaaggcacacgagggcgcaagacctatgagagctatcttcctggctgacggaaaggtgtttactacgggcttttcacgtatgtccgaaagacaactcgccctttgggacccggagaacttggaggagccgatggccctgcaggaattggattcctccaacggcgcccttctgcccttctacgaccctgacaccagtgttgtgtatgtatgtgggaagggagacagctcgatcagatatttcgaaattactgaagaacccccttatattcacttcctcaacaccttcacttctaaggaacctcagcgtggtatgggatctatgccaaagcgcgggttagaggtgtcgaaatgcgagatcgctaggttttacaaattgcatgagcggaagtgtgagccaatcgtgatgacggttccgagaaagtctgatctgtttcaggacgatttataccccgataccgcaggtccggaggcggccttagaagcagaagaatgggtcagcggacgcgacgccgatcccatacttatctcactccgggaggcctacgtacctagcaagcagagagacttgaagatctcaaggcgcaatgtactttctgacagcagacctgccatggcccccggatccagccacctcggggccccagcctctactactactgctgctgacgccactccttctggctcactggctcgggccggggaggcaggaaagctcgaggaggtaatgcaggagctgagagctctgcgggctcttgttaaggagcagggtgatcgaatctgtcggctggaagaacagctgggtagaatggaaaatggagacgcgtag

SEQ ID NO: 183866 - DNA, 864 bp, synthetic construct
  misc_feature 1..864: note = Description of Artificial Sequence: Synthetic coding sequence
  source 1..864: mol_type = other DNA
tgcttcctgctgccccggggccgggaccccgagccccccgaggccggtgctgccgctccctgtgctccgggtgccccagacatgtctttccgcaaggtggtccgacagtctaagttcagacacgtatttggccaaccagtaaagaacgaccagtgctacgaggatatccgcgtaagccgtgtgacgtgggacagcaccttctgtgccgtgaatcctaagtttttagctgtgatcgtagaggctagcggcggaggggcctttctggtcctccctctgagtaagactggacggatcgacaaggcctaccccaccgtatgcggtcacacagggcctgtgcttgatatagattggtgtccccataacgatgaggtcattgcctctggctccgaggattgcaccgttatggtgtggcaaatccctgagaatgggcttacctctccacttactgagccggtggttgtgctggaaggtcacactaagagagtggggatcatcgcgtggcatccgacagccaggaatgtgctgctgagcgctggatgtgataacgtcgtccttatttggaacgtggggactgctgaagagctctataggcttgacagtcttcatccggatctcatttataacgtctcatggaaccacaatggaagcctcttttgttctgcatgtaaagataagagtgtgcgtatcattgatccaaggcgcggcactttggtagcagagcgggaaaaggcccacgaaggtgcgcggccaatgagggctatattcctggccgacgggaaagtgtttacaactggtttttcccggatgtcggagaggcagctggcattgtgggatcctggcgtgaggaggttctgtctggcatag

SEQ ID NO: 183867 - DNA, 1470 bp, synthetic construct
  misc_feature 1..1470: note = Description of Artificial Sequence: Synthetic coding sequence
  source 1..1470: mol_type = other DNA
atgagcttccggaaggtggtgcggcagagcaagttccggcacgtgttcgggcagcctgttaagaatgatcaatgctacgaggatattagagtgagtagggttacgtgggatagtaccttctgtgctgtgaatcccaagtttctcgctgtgatcgtagaggcttcagggggcggcgccttccttgtcctgccattaagtaagacaggcagaattgacaaagcctatccgactgtgtgcggtcacaccgggcctgtgctggacatcgactggtgcccacataatgacgaagttattgccagtggcagcgaagattgtaccgtgatggtgtggcagatacccgagaatgggctgactagccccttaaccgagcccgtagttgtactggagggccacactaaacgggtaggcattattgcctggcaccctacggcgagaaatgtactgctgtctgccgggtgtgataatgtagttctgatctggaacgtcggcacagctgaggagctgtatcgtttagattccctgcacccggacctgatctacaacgtgagctggaatcataacggcagcctgttctgttctgcatgcaaagacaagagcgtccggatcatcgacccgaggagaggtaccctggtggccgaacgcgagaaggctcacgagggcgcgcgccccatgcgagctattttcctggccgatgggaaggtgttcactactggattttcccgcatgagtgaacgacaacttgcactctgggacccagaaaacctcgaagagcctatggccctgcaggagcttgattcctctaacggcgccctgctgcccttctacgacccagacacgtctgtggtgtatgtgtgtgggaaaggtgatagtagcattaggtactttgagatcacagaagaacccccatacatccactttttgaacactttcaccagtaaggagcctcagcgcggaatggggagtatgcccaagcggggactggaagtgtccaagtgcgagatcgccagattctataaacttcacgagcggaaatgcgagcctatcgtaatgaccgtacctcgcaagtccgaccttttccaggatgacctctaccccgatactgctggccctgaggctgcactagaggcagaggagtgggtgtctggcagagatgccgaccccattctgatttctttaagagaagcctacgtgccttcaaagcagcgcgacctgaagatatccagacgtaatgtgctgtccgatagccggcccgccatggcacccggttctagccatttgggcgccccagcctctactactacggccgctgatgctactcctagcgggtcgctcgcccgggccggtgaggccggtaaactggaggaggtcatgcaagaactgagggctttgcgtgcattggtgaaagaacaaggcgatcggatctgccggctggaggagcagctgggcaggatggaaaatggcgacgcatag

SEQ ID NO: 183868 - DNA, 870 bp, synthetic construct
  misc_feature 1..870: note = Description of Artificial Sequence: Synthetic coding sequence
  source 1..870: mol_type = other DNA
atgagcttccggaaggtggtgcggcagagcaagttccggcacgtgttcggtcagcccgtgaaaaacgatcagtgttacgaagatattagggtgtcgcgcgtcacttgggattctacgttttgcgctgtgaaccctaagtttctagctgtgatagtggaggcctcaggtggtggggcgttcctggtgttgcccttaagcaaaacgggcagaattgacaaagcttatcctacagtgtgcggccacaccgggcctgttttggacattgactggtgtccgcataacgacgaggtgattgcctctgggtccgaggattgcacggttatggtgtggcaaattccagagaatggtcttacaagtccgctcaccgagccagtggtcgttctggaagggcacactaaacgagtcggtattatagcctggcatccaactgcacggaacgtcctcctctcagccgggtgcgataacgttgttctcatctggaacgttgggaccgccgaggaactctatcgccttgatagtctccatcctgatttgatttataacgtctcttggaaccataatgggtccctgttttgctctgcttgcaaggataagagtgtccggatcatcgatcccagaagaggcactctggtggccgagcgggaaaaggcccacgaaggagctagaccaatgcgtgctatctttctggccgacggcaaggtgttcaccaccggcttctctagaatgtctgagcggcagctggcactatgggaccccgtgagcggtcaacctgagggagctaatctacgactgggtccgcacccgggcccagggcggcaaggatccccatggggagggttgtggttcctcgcctccctgcccggcacatag

SEQ ID NO: 183869 - DNA, 552 bp, synthetic construct
  misc_feature 1..552: note = Description of Artificial Sequence: Synthetic coding sequence
  source 1..552: mol_type = other DNA
atgagcttccggaaggtggtgcggcagagcaagttccggcacgtgttcgggcagcccgtaaagaacgatcagtgttatgaggatatccgagtgtccagagtcacctgggactcaacattttgcgccgtcaaccctaagttcctggccgtaatagttgaggctagtggtggaggtgccttccttgtcctcccccttagcaagacgggcaggatcgataaagcttatcctaccgtttgcggtcacacagggcccgtgctggacattgactggtgtccccacaatgacgaggttattgcctctgggtcagaggactgtacagttatggtgtggcaaattcccgaaaacggcctgacaagtccccttacggaacccgtggtggtactcgaaggacatactaagcgagtcggcatcattgcttggcatcctaccgcccggaacgtgcttctgagcgcaggattgcatcgacccccattttgtgctccgccgccccatgggcccctgcatacaagccagcagcctctgcagggcccacacgataagtgggaatcttag

SEQ ID NO: 183870 - DNA, 1425 bp, synthetic construct
  misc_feature 1..1425: note = Description of Artificial Sequence: Synthetic coding sequence
  source 1..1425: mol_type = other DNA
atgcggcgggtggtgcggcagagcaagttccggcacgtgttcggccaggcagtcaaaaatgaccagtgttacgacgacattcgagtgtcaagagtgacgtgggactcaagcttttgcgccgtcaatccgcgcttcgtcgctataataatagaggcttcaggggggggagcctttcttgtattacccctgcacaaaacaggtcggattgataagtcttacccaacggtgtgtgggcatacaggtccagttcttgatatagattggtgcccccataatgaccaggtcatcgctagtggtagcgaggactgtaccgtcatggtatggcagatacctgagaatggactcactttaagcctgacggaaccagttgtgatactggaaggccactctaaacgtgtgggaattgttgcctggcatccaactgcccgcaatgtgctgttatccgcgggatgtgacaatgctataatcatttggaacgtggggacaggggaggctctgattaatcttgacgacatgcacagcgatatgatttacaatgtgagttggaatagaaacggctcgctcatctgcaccgccagtaaggataagaaagtcagagtgatcgatcccaggaagcaggagattgtcgccgagaaggaaaaggcgcatgagggcgctaggcccatgcgcgccatcttcctcgctgatggcaacgtgtttaccactggcttttcccgaatgagtgaacgacagttagccctgtggaatcccaagaatatgcaggagcccatcgctctgcatgaaatggacacgtcaaacggcgtgctgttgcctttctacgaccccgacactagtattatttacctctgcggaaagggcgatagctccattcgctactttgaaataacagatgagagcccgtacgtccactacctgaacacttttagctcaaaagagcctcaaagggggatggggtatatgcccaaaagaggattggatgtgaacaaatgtgagatagctagatttttcaagctgcacgaacgcaaatgtgagcctatcattatgacagtaccccgcaagtctgatctgttccaggatgatctgtacccagacactgcaggaccggaggcagccctagaggccgaagaatggttcgaaggtaagaacgctgacccaatccttatttccctaaaacacggatatatcccgggtaaaaatcgagatctaaaggtagttaagaaaaatattctcgactcaaagcctacagcaaataaaaaatgcgacctgatttccatcccgaagaaaactacagataccgcctctgtgcagaacgaagctaaactcgatgaaatcctcaaggagattaaaagtattaaggacaccatttgcaatcaagatgagcgaatatccaagctcgaacagcaaatggccaaaattgcggcatag

SEQ ID NO: 183871 - DNA, 1584 bp, synthetic construct
  misc_feature 1..1584: note = Description of Artificial Sequence: Synthetic coding sequence
  source 1..1584: mol_type = other DNA
atgtacggccccggcagccagctgggcaagagcggcaacaacagctgggcgaaggaacgcggctgctcgattgcttgtcagggcagcctgacctctgccagacttcacgctcccagcataggagagcgacccctgtcccatatgagatggaaggatactatgaggagggtggttcgacagagcaaattcagacacgtcttcgggcaggcagtgaagaacgaccaatgctatgacgatattagggtgagccgggttacatgggactcttccttctgcgcagtgaaccccagattcgtcgccatcatcatcgaagcctccggaggcggcgcattcctagtcctgcctcttcataaaactggtaggattgataagagttatccaactgtgtgtggccatacaggccctgtcctggatattgactggtgtcctcacaatgatcaggtcatagcctcaggcagcgaagactgtaccgtcatggtctggcagatccccgagaatgggttgaccctgtctctgacagagcctgttgtgattctggagggtcatagcaaaagggtgggaatcgtggcctggcaccctacggctcgcaacgttcttctttctgctgggtgcgacaatgctataatcatttggaatgtcggcacgggcgaagcccttatcaatctggatgatatgcatagcgatatgatatacaatgttagctggaaccggaacgggtcccttatctgcaccgcgtccaaggacaaaaaagttcgagtgattgacccaaggaagcaggagatcgtggcagaaaaagaaaaagctcatgagggggcacgccctatgcgtgccatatttttagctgacggcaatgtgtttaccacaggcttttcgaggatgtccgagcgacagttagcactctggaacccaaagaacatgcaggagccgattgcgctgcacgagatggatacaagtaatggtgtgcttttgccgttctatgaccccgacacaagcattatctacctttgtgggaagggggactctagtatcaggtacttcgaaataaccgatgaatccccttacgttcactacctcaataccttctcctctaaggaaccccaaaggggaatgggctatatgcctaaacgcggacttgacgtgaataagtgcgagattgctagatttttcaagctgcacgagcgcaagtgcgaacccattattatgactgtgcctaggaaaagtgacctcttccaggatgacctctaccccgatactgcgggcccagaggccgctctcgaggcggaagaatggtttgagggcaaaaacgccgaccctatcctcatctcgctgaagcatggttacatccctgggaaaaacagagacctgaaggttgtgaagaagaatatcttggactcaaagccaaccgctaataagaagtgcgacctgattagcatcccgaaaaagaccaccgataccgcttccgtgcagaacgaagccaagctggatgaaattcttaaggaaatcaagagcattaaggacacaatttgcaaccaggacgaacggatttccaaattggaacagcagatggccaagattgcggcttag

SEQ ID NO: 183872 - DNA, 1425 bp, synthetic construct
  misc_feature 1..1425: note = Description of Artificial Sequence: Synthetic coding sequence
  source 1..1425: mol_type = other DNA
atgcggcgggtggtgcggcagagcaagttccggcacgtgttcggccaggccgtcaaaaatgatcagtgttacgacgatatccgcgtctcacgtgtgacctgggactcctccttttgtgcggtaaatcccaggttcgtggccattattatcgaagcttccgggggaggtgcgttcctggtcctgccactgcacaaaacaggccgtatcgacaaatcctacccgacagtctgtggacataccgggcctgtgttagacatagattggtgcccccataatgaccaggtgatagcatccggtagcgaagactgcacagttatggtctggcagatcccggaaaatgggctcaccctctccctaacagagcccgtggtgatattggaaggtcacagtaagagagtgggcattgttgcttggcatccgactgctcggaatgtgttactgagcgccggctgtgataacgcaatcatcatttggaacgttggcacgggggaggctctgatcaaccttgatgacatgcattcagatatgatttacaacgtgtcctggaaccggaacggctcgctaatttgtacagccagtaaggataagaaagtcagagtgatcgaccctcggaaacaggaaattgtggccgaaaaggagaaggctcacgaaggggctaggcctatgcgggcaatcttcctcgccgacggaaacgtgttcaccactgggttttcccggatgagcgagaggcagctggccctttggaatcctaaaaacatgcaggaacccatcgccttacacgagatggacactagcaatggggtcctgctgcctttctacgatccggacacttctattatttacctgtgcggcaagggggatagtagcattaggtatttcgaaatcacagatgagtccccctatgtccattatctcaatacattttccagtaaagagccacagcgcgggatggggtacatgcctaaaaggggacttgacgttaacaagtgcgaaatcgcgcgcttctttaagctgcacgaaagaaaatgtgaacccattatcatgactgtgccacggaagagtgacctcttccaggatgacctgtacccagacacagctgggcccgaggctgccctggaagcagaggaatggtttgagggcaagaatgcagaccctatcctgatcagcctgaaacatggctatattccaggaaagaaccgcgatttgaaagtagtcaaaaagaacatcttggactctaaaccaacggcaaacaagaagtgtgaccttatttctatacctaagaagactaccgacacagcctcggtccaaaatgaggcaaagctcgacgaaatactgaaggaaatcaagagcatcaaggacaccatttgcaatcaggacgagaggataagcaaacttgagcagcaaatggctaagattgctgcttag

SEQ ID NO: 183873 - DNA, 489 bp, synthetic construct
  misc_feature 1..489: note = Description of Artificial Sequence: Synthetic coding sequence
  source 1..489: mol_type = other DNA
atgcggcgggtggtgcggcagagcaagttccggcacgtgttcggccaggcagtcaaaaatgaccagtgttacgatgacatcagagtatcaagggtgacctgggatagtagcttctgcgccgtgaatcctagattcgtcgccatcataatagaggcctccggcggcggggcatttttggtactcccgctccacaagactggaaggatcgacaaatcctaccccaccgtttgcggccacacgggaccagtgctggacatcgattggtgcccccataacgaccaggttatcgcctcagggtctgaggactgtacggtaatggtctggcaaatccctgagaatggactgaccttatccttgaccgaaccagttgttatcctcgagggacactcaaagagagtcggaatcgtcgcctggcatcctaccgcacgcaatgtgcttctcagtgctggttgcgataacgccattataatatggaatgtggggacctag

SEQ ID NO: 183874 - DNA, 498 bp, synthetic construct
  misc_feature 1..498: note = Description of Artificial Sequence: Synthetic coding sequence
  source 1..498: mol_type = other DNA
agcaaggagccccagcggggcatgggctacatgcccaagcggggcttagacgtgaataagtgtgaaatcgctcggttttttaagctacacgagcgcaagtgcgagcccatcattatgaccgtgccgaggaagagtgatctgttccaggatgatctttatcccgatacagccgggcctgaggctgccctggaggctgaagaatggttcgaagggaagaacgctgacccaatacttatcagcctgaaacatggctacattccgggcaagaacagggacctgaaagtggtgaaaaaaaacatcctggactccaaaccaacggcaaataagaagtgtgacctgatctccattcccaagaaaaccactgacaccgcttccgtccagaacgaagcgaaactcgacgaaattttgaaggagatcaaatctattaaggacaccatctgcaaccaggatgagagaatttcaaagctcgagcagcagatggccaaaatagccgcctag

SEQ ID NO: 183875 - DNA, 546 bp, synthetic construct
  misc_feature 1..546: note = Description of Artificial Sequence: Synthetic coding sequence
  source 1..546: mol_type = other DNA
atgcggcgggtggtgcggcagagcaagttccggcacgtgttcggccaggcagtgaagaatgaccagtgctacgatgacatccgtgttagtcgggtgacgtgggactcttctttttgtgcagtgaaccctcgattcgtggcaatcataatcgaggcctctggcggtggggcgtttctcgtgctgccattgcacaagacggggaggatagacaagtcttacccaactgtatgcgggcatacaggtcccgtgcttgacattgattggtgcccccataacgatcaggtaatagcctcagggtccgaagactgcaccgtaatggtgtggcagattcctgagaatggcttgacgctgagtctcacagagccagtcgttattctggaggggcatagcaagagggtgggcattgtggcttggcatcctactgctcgcaacgtgctgctgagcgccggttgtgacaacgctatcatcatttggaacgtgggcactggcgaggcactcatcaacctggacgacatgcactctgatatgatttataacgtgtcgtag

SEQ ID NO: 183876 - DNA, 1443 bp, synthetic construct
  misc_feature 1..1443: note = Description of Artificial Sequence: Synthetic coding sequence
  source 1..1443: mol_type = other DNA
atgcggtggaaggacaccatgcggcgggtggtgcggcagagcaagtttaggcatgtgtttgggcaggcggttaaaaacgaccagtgttacgacgacattcgggtgtctagggtcacttgggactctagcttctgcgctgtgaatccaagattcgtagctatcatcatagaggcctcaggcgggggagcgtttctggtgctccctctccataaaaccgggagaattgacaaatcatacccaacggtatgcggtcataccgggcccgttctggatatcgactggtgcccccataatgatcaggtcattgcctctggcagcgaagattgtaccgttatggtatggcagatacccgaaaacggactgacgttgtctcttacagaacctgtggtcattttagaggggcatagcaaacgggttggtatagtggcatggcatcccacagccagaaacgttctgttgtcggccgggtgcgacaatgccatcatcatctggaatgtcggaactggcgaggcgcttattaacctggacgatatgcacagcgacatgatttataacgtgagttggaacaggaatggctcactgatatgtacagcttcaaaagacaagaaggtcagggtaattgaccccagaaagcaggagatagttgccgagaaagagaaagcgcacgagggggccagacccatgcgggcgatcttcttagctgatggcaatgtgtttacgacaggtttttcccgcatgagcgagaggcaactggccttgtggaatccaaaaaacatgcaggaaccaatcgctctgcatgagatggatacaagcaatggtgtgctgctgcccttttatgaccccgatacttccatcatctacttgtgtggaaagggtgacagctcaatccgctacttcgagatcaccgatgagagtccctatgttcattatctgaacacgtttagtagcaaggaacctcagcggggaatgggatatatgcctaagaggggtctggatgtcaacaaatgcgagattgcgcgctttttcaaactacatgaacgaaaatgcgagccgatcattatgaccgttcccaggaagtctgatctctttcaggacgacctgtacccagacacagcaggaccagaagccgccttagaagctgaagaatggttcgaggggaaaaacgctgatcctattcttatttcactgaagcacgggtatattccaggtaagaatcgggacctcaaagtcgtgaaaaagaatatcctcgactccaaacctaccgccaataagaaatgtgatctgatttccatacctaagaaaacaaccgacaccgcatccgtgcaaaatgaggccaagctggatgagattctgaaggagatcaagagtataaaagacactatctgtaaccaggatgaacgtatcagcaaactcgaacagcagatggcgaagatcgccgcttag

SEQ ID NO: 183877 - DNA, 510 bp, synthetic construct
  misc_feature 1..510: note = Description of Artificial Sequence: Synthetic coding sequence
  source 1..510: mol_type = other DNA
atgcggcgggtggtgcggcagagcaagttccggcacgtgttcggccaggcagtgaagaatgaccagtgttacgacgacatcagagtctcccgcgtcacttgggattcttccttttgcgccgtgaacccaagatttgtggccattatcatcgaggcctcgggggggggcgccttcctcgttcttcccctgcacaagaccggcaggattgacaaaagctacccgactgtctgtggacacactggcccagtcctggatatagattggtgcccgcataatgatcaggtaatagcgtccggcagcgaggattgtaccgttatggtttggcagattcccgaaaacgggctgactctctctctcaccgagcctgtcgtgatcttggagggtcactccaagcgtgtgggcatcgtcgcctggcaccctactgccagaaacgttcttctctccgcaggctgcgataatgctatcatcatttggaatgtgggcacaggtgaagcactgatcaatctttag

SEQ ID NO: 183878 - DNA, 456 bp, synthetic construct
  misc_feature 1..456: note = Description of Artificial Sequence: Synthetic coding sequence
  source 1..456: mol_type = other DNA
atgcggcgggtggtgcggcagagcaagttccggcacgtgttcggccaggcagtcaaaaacgaccagtgctacgacgacattcgcgtgtccagggtgacctgggatagctcgttctgcgctgtaaaccccaggttcgtggctattataattgaggcctctgggggaggggccttccttgttttacccctgcataagacgggtaggattgacaaatcctacccaaccgtttgtggccacactgggcctgttctggacattgattggtgtccacacaacgaccaggtcattgcatcgggctctgaagactgtacagtcatggtttggcagattcccgaaaatggcctaacattgagccttacggagcctgtggtgattctggagggccactcaaagcgtgtggggatcgtagcctggcatcccaccgccagaaatgtactattaagtgcaggcggttag

SEQ ID NO: 183879 - DNA, 492 bp, synthetic construct
  misc_feature 1..492: note = Description of Artificial Sequence: Synthetic coding sequence
  source 1..492: mol_type = other DNA
atgcggcgggtggtgcggcagagcaagttccggcacgtgttcggccaagcagtgaagaacgatcagtgctatgatgacattcgggtttcaagggtaacatgggattctagtttctgcgcagtcaatcccaggttcgtcgctattatcatagaggccagcggcggcggagcctttcttgtcctcccgttgcacaagactggcaggatcgacaagtcctacccgaccgtgtgcggtcacactggtcctgtgctagatatcgactggtgcccccataacgatcaggttatagcgtccggctccgaagattgtaccgtgatggtgtggcagattcccgagaacgggctcaccttatccttgacagagcccgtggtcattctggaaggccactcaaaacgagttgggattgtcgcctggcacccaactgctcggaacgtgctactttcagccggatgcgataacgctatcattatttggaatgtgggaacaggatag

SEQ ID NO: 183880 - DNA, 1578 bp, synthetic construct
  misc_feature 1..1578: note = Description of Artificial Sequence: Synthetic coding sequence
  source 1..1578: mol_type = other DNA
atgagctggcacccccagtaccggagcagcaagttccggcacgtgtttggcaaacccgcatccaaggagaattgctacgacagcgtgcctattacacgaagtgtgcacgacaatcacttttgtgcagtgaatcctcactttatcgcggtggtcaccgagtgcgccggcgggggagccttcctggtcattccccttcaccagacaggcaaacttgacccacattatcccaaagtttgcgggcacagaggcaatgtgctggatgtgaagtggaacccatttgatgattttgagatcgcatcatgctctgaagatgcaactatcaagatctggtccattcctaagcagctgctcaccaggaacctgactgcctatcgcaaagaactcgtgggccacgcaaggcgggtggggctagtggaatggcacccaactgcagcgaacatacttttctcagcagggtatgactacaaggtcatgatttggaatctggacacaaaagaatccgttattacttctcctatgtccactataagctgccaccaggatgttatactcagcatgtcttttaatactaacggctccctcctggcgaccacctgcaaggaccgaaagattcgggttatcgatcctcgtgcgggaacagtcctacaggaagcctcctacaaaggccaccgagcaagtaaggtgctttttttaggcaacctgaagaagctgatgagcacggggacctcaaggtggaataatagacaggtggccctgtgggatcaggacaacttgagtgtcccactgatggaggaggacttggacggcagttctggcgtgcttttccccttttacgatgctgacacctcaatgttgtatgtagtaggaaagggagatggaaacatcagatattacgaggtctcagcagacaagccccatctttcttatctgacagagtatcgcagctataatccccagaagggcatcggagtcatgcccaagcggggcctggatgttagctcgtgtgagatcttccggttttacaagctgattaccactaaaagccttatcgagccaatctcaatgatagtcccacgccggtccgagtcctatcaggaagacatctatcctcccactgctggcgcgcaaccctcgctgaccgcccaggaatggctgagcggtatgaacagggaccctattctggtttcactcagaccagggagcgaactactccgcccccatcccctgcccgctgagagacctatattcaattctatggccccagccagcccacggctgcttaatcaaaccgaaaaactggctgcggaggatggatggcggtcaagtagtctgctggaagaaaaaatgccaagatgggccgccgaacaccgtcttgaggaaaaaaaaacttggcttactaacggttttgatgttttcgaatgtcctcctccaaaaactgagaacgaactgcttcagatgttttaccgccagcaagaagaaattcggcgcttacgggaacttctcactcaacgggaggtacaggctaaacagctcgaactcgaaatcaagaacttgaggatgggcagcgaacaattatag

SEQ ID NO: 183881 - DNA, 1578 bp, synthetic construct
  misc_feature 1..1578: note = Description of Artificial Sequence: Synthetic coding sequence
  source 1..1578: mol_type = other DNA
atgagctggcacccccagtaccggagcagcaagttccggcacgtgttcggtaagccagcttcaaaagaaaactgttacgacagcgtcccgataaccaggtcagtgcacgataaccacttttgcgccgtaaacccccacttcatagccgtcgtcacggagtgtgccggcggtggcgcctttctcgttatccctctccatcagacaggaaaactcgatcctcactatccgaaagtgtgtggacaccggggaaacgtcttggatgtcaaatggaatccatttgacgactttgagatcgcttcctgttctgaggatgccaccattaagatctggagcatccccaagcagctgttgacaagaaatttaactgcatacaggaaagaattggtcggacacgcgcgccgggtcggacttgtggagtggcatccaaccgccgccaacatcctattctccgcaggctacgactacaaggtgatgatttggaatctggataccaaagaatcagtgatcacctctcctatgagcacaatcagttgtcaccaagatgtcatcctttccatgtcctttaatactaacgggtctttgctagcaaccacatgcaaggatagaaaaattagggttatcgacccgagagctggtacagtgcttcaggaggcgtcctacaagggtcaccgggcttcaaaggtgttgttcctggggaacctgaagaaactgatgtccactgggacatcccgatggaacaatcgccaggtcgctctatgggatcaggataacctctcggtgcctcttatggaggaagacttggatggaagtagcggggtcctctttcccttttatgacgctgacaccagcatgttgtacgtcgtgggtaaaggcgacgggaatataagatactatgaagtttcagcggataaaccccacctgtcttatctgaccgaataccgcagctataatccccagaaagggatcggggtcatgccgaaacgcggactggacgtcagtagctgcgaaatttttcgcttttataagctgatcacaaccaaaagcctgattgagccaatcagcatgatcgtgccacggcgatccgaatcctatcaggaagatatctacccccccacggccggcgcgcaacctagcctgacagcccaggaatggctcagtggtatgaatcgcgatcctattcttgtctcactcaggcccgggtccgaactgctgagaccacatcctctcccagccgagagacccatttttaacagcatggctccagcttcccccaggctactgaatcagactgaaaagctggcagctgaggacggctggcgcagttcctccctgttagaggagaaaatgccccgttgggctgctgagcataggctggaagaaaagaagacctggctgactaatgggttcgacgtttttgaatgccctccccccaagactgagaacgagctgctgcagatgttctatagacagcaggaggagattcgtcgcctgagggaactgttaacacagcgggaggtgcaggccaaacagttagaactggagattaaaaatctgcgtatggggtccgaacagctgtag

SEQ ID NO: 183882 - DNA, 1443 bp, synthetic construct
  misc_feature 1..1443: note = Description of Artificial Sequence: Synthetic coding sequence
  source 1..1443: mol_type = other DNA
atgaccgtgaccaagatgagctggcggccccagtaccggagcagcaagttcaggaatgtgtacgggaaagtcgcgaatcgcgagcattgttttgacggaatccctatcactaaaaacgtgcatgataatcatttttgcgctgtaaataccaggtttctagccatcgtgacagaatccgcaggtggcgggagtttccttgtaatccctctagaacagactggtcgcatagagccaaattaccccaaggtctgcgggcatcaggggaacgtgctggatattaagtggaatcccttcattgataacatcatcgcatcatgctcagaggatacctccgtccgaatttgggaaattccagaaggcggtttaaagaggaacatgactgaggcactgcttgagttacatggccattccagacgcgtggggctcgtggagtggcatccaacaacgaacaacatactgtttagtgcaggctatgattataaagttctaatatggaatctcgacgtgggggagccagtgaagatgatagattgccacacagacgtaattctgtgtatgagcttcaacaccgacgggtcactgttgaccacaacctgcaaagataaaaagctccgcgtgatagaaccccggtccggaagagttctacaggaagccaactgcaaaaatcaccgggtgaatagagtggtatttctgggcaatatgaagcgtctcctaacgaccggagtttcacggtggaacacacgacagatcgccctctgggaccaggaagatctgtccatgcctctgatagaagaggagatcgacggcctgagtggcttgctgttcccattctacgacgcagatacccatatgctgtacctggcaggtaagggagacgggaacataagatactacgagatcagcacagaaaaaccatatctgtcttatctgatggaattcagaagcccggccccccagaaggggctgggtgtcatgcccaaacatgggcttgacgttagtgcctgtgaggtgtttaggttctataaactggtcacgctcaaaggccttatagaaccaataagtatgattgttcctcgacgctccgatagctatcaggaggacatctaccccatgacccccgggaccgaacccgcactaacaccggacgagtggctaggtgggatcaaccgggacccagtgctcatgagtctgaaggagggttacaaaaaatccagtaagatggtctttaaggctccaatcaaggaaaaaaaatccgtcgtcgtgaacggaatcgatctcctagaaaacgtacccccaaggaccgaaaacgaacttctgagaatgtttttcagacagcaggacgagatccggaggttgaaggaggaactagcccagaaggatataaggatcagacagctgcagctggagctgaaaaatcttcgcaactctcccaagaactgctag

SEQ ID NO: 183883 - DNA, 1428 bp, synthetic construct
  misc_feature 1..1428: note = Description of Artificial Sequence: Synthetic coding sequence
  source 1..1428: mol_type = other DNA
atgagctggcggccccagtaccggagcagcaagttccggaacgtgtatggtaaagtagcaaacagggaacactgttttgatggcattccaattacgaagaatgtgcatgacaatcatttttgcgccgtgaacactagattcctggccatcgttaccgagtcagcgggcggcggaagcttcctcgtgatccccctcgaacagaccggacgcatcgaaccaaactatcccaaagtctgcggccatcaaggcaacgtgctcgacattaagtggaatcccttcatcgataatattatagcaagttgtagcgaggacacgagtgtgcgcatatgggagatccccgaggggggtctcaaaaggaacatgaccgaggccctacttgaattacacggccacagcagaagggtcggcctcgtggaatggcacccaactacaaataacatcctgttcagtgccgggtacgattataaagtgctgatttggaaccttgacgtcggcgaacccgtgaagatgatcgattgccacactgacgttattctctgtatgtcttttaacactgacggctccctgcttaccaccacatgcaaagataagaagctaagggtcatagaaccacggagcggccgggtgttacaggaggccaactgcaaaaaccatcgagtcaacagagtggtgttcctgggtaatatgaaaaggttacttacgactggtgtatcaagatggaacaccaggcagattgctctttgggatcaggaggacttgtctatgcccctgattgaggaggagatcgacggtctctctggcctgcttttcccgttttacgacgccgatacccatatgctctacctcgctgggaaaggcgatggcaatattcggtattacgagatcagtaccgaaaaaccatatctgtcttatttgatggaatttaggagccctgcaccgcagaaaggtctcggagtgatgcctaaacatgggctggacgtgtcagcatgcgaagtcttcagattctataagctggttacgctgaagggtctgatcgaacccatatccatgatcgttcccagaagatcagacagttaccaggaagacatttatcctatgacacccggcaccgaaccagcacttacgcctgacgagtggctcggggggatcaatcgtgacccagtcttaatgtctctgaaagagggctacaagaagtcgagcaagatggtgtttaaggcccctatcaaagagaagaaatccgtagtcgttaacggaattgatctgctggaaaatgtgccacctcgcacggaaaacgaacttctgcgcatgttcttcagacagcaggacgagattcgtcgtctcaaggaagaactggcacagaaagacatccgcatcagacagcttcagctcgagttgaagaacctgagaaattcccccaagaactgttag

SEQ ID NO: 183884 - DNA, 1428 bp, synthetic construct
  misc_feature 1..1428: note = Description of Artificial Sequence: Synthetic coding sequence
  source 1..1428: mol_type = other DNA
atgagctggcggccccagtaccggagcagcaagttccggaacgtgtatggaaaagtggctaatcgcgagcactgtttcgatggaatccctatcaccaaaaatgtccacgacaaccacttctgtgcagttaatactcgctttttggccatcgtaacagaatcggccggaggcggcagcttcctggtgattcctttagaacagaccggcaggatcgagcccaactatcctaaagtctgtggccatcagggtaacgtcctagacattaaatggaatccgttcatcgacaatattatagcctcatgttctgaggacacctcagtgcgcatctgggaaatacctgaaggcgggctgaagcgaaacatgacggaggccctccttgagctgcacgggcacagccgccgcgtagggctggtcgagtggcatcctacaactaacaacattttattctctgccggttatgattataaagtgctgatctggaatctggatgtgggcgaaccggtgaagatgatagactgccataccgacgtaattctgtgcatgagcttcaatacagacgggtcactgctgacgactacctgtaaggataagaagctcagagtaatcgagcctcgttccggacgcgtgttgcaggaggccaactgtaagaaccaccgcgtgaacagggtcgttttccttgggaacatgaagcgactgctgacaaccggagtgtccaggtggaacacacgccaaatcgccctgtgggatcaagaggacctgtccatgcccctgattgaggaagagattgatgggttgtcgggtcttctgttcccattttatgatgctgacacgcacatgctctacctggccggcaaaggggatggcaacatcaggtactacgagatctccaccgagaaaccctatttgtcttacctgatggagttccgaagtccagcccctcaaaaaggactcggtgtcatgccgaaacatggcctggatgtaagtgcttgcgaggtttttaggttctacaaactggtgactttaaaaggactgattgagcctatctcaatgatcgtacctcgaaggagcgatagttatcaggaagatatttatcctatgactcctggaaccgaacccgccttaacccccgacgaatggttgggagggatcaaccgagatccggtcctcatgtcattgaaagagggatacaagaagtcaagcaagatggtattcaaggccccgatcaaggagaaaaaatccgttgtcgtcaatggcattgatcttctggagaatgtgccaccccgtaccgaaaacgagttactgcggatgttcttcaggcagcaggacgaaatccgacggctgaaggaggaactcgcccagaaggatattcgaatccggcaactgcagttggagctcaaaaatctgcgcaatagcccgaagaattgttag

SEQ ID NO: 183885 - DNA, 4992 bp, synthetic construct
  misc_feature 1..4992: note = Description of Artificial Sequence: Synthetic coding sequence
  source 1..4992: mol_type = other DNA
atggccaccgacggcgccagctgcgagcccgacctgagccgggccccggaagacgcagcaggggccgctgctgaagctgcgaagaaagagttcgatgtcgacacacttagtaagtcagaactgcgaatgttgttgagcgttatggaaggggaactagaagcccgagatcttgtgattgaggcactgcgcgcacggagaaaggaggtcttcatacaggaacgatacgggcgttttaatctgaacgaccctttcttggcccttcagagagactacgaggccggcgccggtgacaaagagaaaaaaccagtctgcaccaatcccctttccattttggaagccgtgatggcccactgcaagaagatgcaagagcgcatgtcagcccagctcgccgcagccgagagccggcagaagaagcttgagatggaaaagctacaactgcaggccctcgagcaggagcacaaaaagctggcagccaggctggaagaagaaaggggcaagaataagcaggtcgtgctcatgctcgtgaaggagtgcaaacagctgtccgggaaagtaattgaggaagcgcaaaagctggaggacgtgatggccaagctggaggaagagaaaaagaagacgaatgagctcgaggaagagctgagcgccgagaaaaggcgcagcaccgaaatggaggcccagatggagaagcagctctctgagttcgacaccgagagagagcagttaagagccaaacttaacagggaagaagcacataccactgacctgaaagaagagatcgacaagatgcgcaagatgatagagcagttgaagaggggctccgattctaagcctagcctttcgttgcctcggaaaactaaagataggagactggtttccattagcgtgggcaccgaggggaccgtgacccggtctgtggcctgtcagaccgacttggtaactgagaacgccgatcacatgaaaaagcttcccctcacaatgcctgtgaagccctccacggggtcaccactcgttagcgcaaacgccaaagggtccgtatgtacgtctgcaaccatggcgagacccggtattgaccggcaggcttcatacggtgacttaatcggagcctcagtgcccgccttccccccccctagcgctaacaagattgaggaaaatggccccagcacaggcagcactccggacccgacatcttccacacctcctctgccttctaacgcagcacctcctactgctcagactcctggaattgctccgcagaattcgcaggctcctcctatgcactcactgcactctccatgtgctaacacctcgttgcatccaggtctgaacccacgcatccaagccgcccggtttcgttttcaaggcaatgcaaatgaccctgatcagaatgggaacactactcagagtcctccctcaagagatgtatcgccgacgtctagggacaatctggtggcgaagcaacttgcacgcaatacagtgacacaggcgttaagtcgattcacgagtccgcaggctggagccccctcccgcccaggtgtccccccaacgggagatgttggcacccatccgcctgttggtcggactagtctgaaaacacacggcgttgcacgagtcgatcgtggcaaccccccacccattcctccaaaaaagcccggcttgagccagactccttccccccctcatccacagcttaaggttataatcgacagctctcgagcctccaacacgggtgctaaagtggacaataagaccgtggccagtaccccctcttccttgcctcagggtaacagggtaattaacgaagaaaatctgcctaaaagctcctccccccagctgccacctaaaccctcgattgacttgaccgtcgcacccgccggttgcgcagtatccgccttggccacctctcaagttggcgcgtggccggccgctacaccaggactgaatcagcctgcatgctctgattccagtcttgtcatacctaccacgatagcattttgttcaagtatcaatccagtctctgcatcgagctgccgacctggggcgagcgactctttgttggtgaccgcttcagggtggagcccaagcctgacaccgctgctaatgagtgggggacctgcccccctggcaggccggccaactttattacagcaggctgccgctcaggggaatgtaactctactttctatgctgctgaatgaagagggactggacattaattatagctgtgaagacggacactcagccttatatagtgcggcgaagaatggacacaccgattgcgtccgactgctccttagtgctgaggctcaggtgaacgccgccgataaaaatggatttaccccactgtgtgcggcggccgcccaaggccattttgaatgcgttgaactgttgatttcctatgacgccaacataaatcacgccgcagacggcgggcaaacacctctgtacctggcctgcaagaatggcaataaggaatgcataaaactgctgctggaggccgggactaataggtctgtaaaaacgactgatgggtggacccccgtacacgccgccgttgatactggaaatgtggatagcttgaagttactgatgtatcaccggattcctgcacatggaaatagcttcaacgaggaggagagtgagagctctgtatttgatttggatgggggcgaggaaagtcctgaaggcatctccaaaccggtggtgcccgctgatctcattaaccacgccaaccgagaaggttggacagcggcacacatcgcggcttccaaaggcttcaagaactgtctggaaatcctgtgtcgccatggaggactagagcctgaaaggagagacaagtgtaacaggacagtacacgacgtcgccactgatgactgcaaacaccttctggaaaatctgaacgcacttaagattcccctccgcatttcggttggtgagatcgaaccaagcaactatgggtcagatgatctggagtgcgaaaatacgatctgcgcccttaacatccgaaagcagaccagctgggatgactttagtaaagctgtgagtcaggctctgactaaccactttcaagcaatctcctctgatgggtggtggtctctcgaagatgtcacctgcaataatacgaccgattcaaacattgggctctccgcaagatccattcgttctatcacactgggtaacgttccttggagcgtcggccagtcattcgcccaatccccatgggatttcatgcgcaaaaataaggctgaacacatcacagtattgctctcaggccctcaggaaggctgtctgtcctccgtcacttacgcttccatgatacccctgcagatgatgcagaattaccttagacttgtggaacagtaccacaatgtgatatttcacggacctgaagggagtctccaggattacatagtccaccagcttgccctttgtctgaagcataggcagatggccgcaggattcagctgcgaaatcgtgagggccgaggtggacgctggcttctccaaggagcagctcctggatttgttcatcagctctgcctgtctgatccccgtgaagcagtccccatcaaagaagaagattatcatcattctggagaacctcgagaagtcttccctctccgaactgctacgggacttcctggcaccactggagaataggagcactgaatcgccttgcaccttccagaagggtaacggcctgtctgagtgttattattttcacgagaactgcttcctgatggggactattgccaaagcctgcctgcaggggagcgacttgctcgtgcagcaacactttcggtgggttcagctccggtgggatggagaacctatgcaggggctgctccagaggttcctgcgacgcaaggtggttaataaatttaaggggcaggcacccagcccatgtgatccggtctgtaagatcgttgattgggccctgtctgtgtggcgccaactcaatagctgtctggcacgccttggaaccccagaagccttgttaggcccgaaatattttcttagctgccccgttgtccctggtcacgcacaggtgacagtgaagtggatgtccaaactgtggaacggagtgatcgccccaagggtccaggaagctatattatcaagagctagcgtgaagcgccagccgggattcgggcaaaccacagccaaacggcatcccagtcagggtcagcaggccgttgtcaaggctgccctcagcatactcctgaacaaagcagtgttgcatggctgtccattgcctagagcggagctggaccagcacaccgctgattttaagggtgggtctttccccttatcaatcgtgtcgtcttataacacctgcaataagaagaagggcgagtcgggtgcgtggaggaaggttaacacttctccccgtcgaaagtctgggcggttctccctgccaacttggaacaaacccgacctttctaccgagggaatgaagaacaaaactataagccagctgaattgtaatagaaacgcctccctctccaagcagaagagtctagaaaatgatctaagtttgactctcaatctggaccagaggctatctctgggatccgatgacgaagccgatctggtgaaagagctccagagtatgtgctcgagtaagtctgaaagcgatatctctaagatcgccgactccagggatgatctaagaatgtttgattcatctggtaataatcctgtgctgagtgccactattaacaacctaagaatgccagtcagtcaaaaagaggtttcaccacttagtagccatcaaaccactgaatgctcaaatagcaaatcaaagacggaacttggagttagtagggttaagagtttcctgcccgtgcctaggagtaaggttacccagtgttcgcaaaacacgaagagaagttcaagcagcagtaatacccgccaaatcgaaatcaacaacaatagcaaggaggtgaattggaatttgcacaaaaacgaacacctggagaaaccaaataagtag

SEQ ID NO: 183886 - DNA, 249 bp, synthetic construct
  misc_feature 1..249: note = Description of Artificial Sequence: Synthetic coding sequence
  source 1..249: mol_type = other DNA
atgagcgccacctggaccctgagccccgagcccctgccccccagcacagggcccccagttggcgcagggctggacgcagaacagcgcaccgtgttcgcctttgttttgtgtctacttgtcgtgctagttcttttgatggtgagatgtgtgcggatcttgcttgacccctactccagaatgcctgctagcagttggactgaccacaaagaggccttagaaagaggccagtttgactatgctttggtctag

SEQ ID NO: 183887 - DNA, 969 bp, synthetic construct
  misc_feature 1..969: note = Description of Artificial Sequence: Synthetic coding sequence
  source 1..969: mol_type = other DNA
atgagccccaacttcaagctgcagtgccacttcatcctgatcttcctgacagccctgagaggcgaaagcagatatctagagctgcgcgaagcagccgattacgatccgtttttgctgttctcagctaatttaaagagagaactggcaggcgagcagccttataggagggctttgaggtgcctggatatgctttccctgcaaggacagttcacgttcaccgctgatcggcctcagctgcactgcgctgccttcttcatttctgaacctgaggaatttataactattcactatgatcaggtgtctattgactgtcaaggcggtgactttctcaaagtgtttgatgggtggatactcaagggcgagaagtttccatccagtcaggatcacccgttgccaagcgctgaacgctatatcgatttctgcgaatccggcctgtcccgtcgctctatcaggtccagccagaacgtggcaatgattttctttagggtgcacgagccgggcaatgggtttacactgactataaaaacagaccccaatttatttccatgtaatgtcatcagtcaaactcctaacggtaagttcacattggtagttccccaccagcatcggaactgctccttcagtataatttacccagtggtcattaaaattagtgatcttaccttgggacatgttaacgggcttcaactgaagaaatcttcagctggctgcgagggcattggcgacttcgtggagcttttagggggcacgggtttagacccatccaaaatgactcccctagccgatctttgctacccatttcacggcccagctcagatgaaagtgggatgcgacaatactgttgttagaatggtgagtagtggtaagcacgtaaatcgggtgacctttgaataccgtcagctggagccttatgagcttgagaatcccaacgggaacagtataggtgaattttgcctgagcggcctctag

SEQ ID NO: 183888 - DNA, 723 bp, synthetic construct
  misc_feature 1..723: note = Description of Artificial Sequence: Synthetic coding sequence
  source 1..723: mol_type = other DNA
atgagccccgaggtgcaccagagcaacgtgggctggtgccggctggtgacagccgcgtacaactattttcacgttaccaatttcttctggatgtttggagagggctgctatttgcacaccgccatcgtgctcacctattcaaccgaccgccttagaaaatggatgtttatctgcattggatggggcgtgcccttccctatcatcgttgcatgggctatagggaagctgtactacgacaacgaaaaatgctggttcggaaaacgacccggggtgtatacagactacatataccagggccccatgatcctggtgctgctgattaactttatatttctttttaacatagtgcgcatcctgatgactaaactgcgggctagcaccacgagcgaaaccatccaataccgtaaggccgtcaaagcaacgttggtcctgctgcctctcctggggattacctatatgctattttttgttaatccaggcgaggacgaggttagccgagtagtgttcatctatttcaactcgtttctggagtcttttcaggggttcttcgtgtcagtgttttattgcttcttaaattctgaagtgcgctccgcaattcgtaagcgctggcacaggtggcaggataagcactccatccgggccagagtagcccgggccatgtctatacccacttccccaaccagagtctcctttcatagtattaagcagtcaactgctgtgtag

SEQ ID NO: 183889 - DNA, 1248 bp, synthetic construct
  misc_feature 1..1248: note = Description of Artificial Sequence: Synthetic coding sequence
  source 1..1248: mol_type = other DNA
atgggcggccacccccagctgcggctggtgaaggccctgctgctgctcggcctgaacccagtctcagcctctttgcaggaccagcactgcgagtctttgagtctagcttcaaacattagcggacttcaatgcaacgcgtctgttgatctgatcggtacctgttggccccgtagcccagctggtcagctggtggtccgtccatgtcccgctttcttttatggggtgcggtataatactactaataacgggtatcgcgagtgtttagccaatgggtcctgggcagcacgcgtgaattatagcgagtgtcaagaaattcttaacgaggagaaaaaatcaaaagtgcattaccatgtggcagtcatcattaactatcttggacattgcatctcactggtcgcacttctggtggcttttgtcttattcttgcgcctccggtctatccggtgtttgcgcaatattatccactggaatctcatatccgcattcatcctgcggaatgcaacgtggttcgtggtgcagcttactatgtctcctgaggtccaccaatccaacgtggggtggtgccggctggttacagcggcctacaactatttccatgtgaccaactttttctggatgtttggcgaaggttgctatttgcatactgccattgtcctaacatacagtacggatcgccttcgtaaatggatgttcatatgtatcgggtggggcgttccattcccaatcatcgttgcttgggccatcgggaaactttactacgataatgagaaatgctggtttggtaagaggcccggtgtctacactgattatatttaccaaggaccgatgatcctcgtcctgctaatcaatttcatctttttgtttaacatcgtgcgaattttgatgactaaactgcgggcatccacaacgtcagagacgatacagtataggaaagccgtgaaggcgaccctggtgctcctacccctgctgggcatcacatatatgctgttcttcgtgaatcccggcgaggatgaagtttccagggtcgtcttcatctattttaactcgttcctcgaatcatttcagggtttcttcgtaagcgtcttctactgctttctcaactcggaggtgaggtctgcaatccgcaagcgctggcatcgatggcaggacaaacatagcattagagctagagttgctagagctatgtccatccccacatcccctaccagagtctcattccatagtatcaagcagagtacggccgtctag

SEQ ID NO: 183890 - DNA, 858 bp, synthetic construct
  misc_feature 1..858: note = Description of Artificial Sequence: Synthetic coding sequence
  source 1..858: mol_type = other DNA
atggtgagcgccaccatcccccagaagaagagcaaggtgcactaccacgttgccgtgatcatcaattacttggggcactgtatttctctcgtggcactcctggtggcatttgttttgttcctaagactgcgatccattagatgtctgcgcaatattatccactggaacttaataagcgcttttattttgaggaatgcaacctggttcgtggtgcagctgaccatgtccccagaggtccatcagtccaatgttggctggtgtaggctcgttaccgccgcctataactactttcatgtgacaaacttcttttggatgttcggcgaaggttgttacctgcacactgccattgtgcttacctactcaacagatcggttacgtaagtggatgttcatctgcattgggtggggggtaccgttccccatcattgtggcatgggcaatagggaaactctactatgataatgaaaagtgctggttcggcaagagacccggcgtctataccgattacatctatcagggacctatgattttggtgctgttgataaactttatcttcctctttaacatcgtacggattttgatgacaaaactcagggcaagcaccaccagcgagaccatacagtatcgagcatccttatgcctgtgtagcacagtgtcatccattgtccgttctgtccttcctagtgggcggggcgggactggtgggaggacctccacacgatcagtgccagaatggcctgtcccttgcccttcccctcctccacagcctgtcagtgcatttacagcaagttctagcccgcaacagagtgagctggcaggccacggggccgctccaaaagaactctggctggggggttag

SEQ ID NO: 183891 - DNA, 1206 bp, synthetic construct
  misc_feature 1..1206: note = Description of Artificial Sequence: Synthetic coding sequence
  source 1..1206: mol_type = other DNA
atgggcggccacccccagctgcggctggtgaaggccctgctgctgctgggtctcaatccagtgagtgccagtttacaggatcagcactgcgagtcactctctttagcctcgaatatcagcggtctgcagtgtaacgccagcgtggatctgatcggtacatgttggcccagatctcccgccggtcagctggtggttagaccatgtccggcatttttttatggtgtcaggtacaacacgacaaataatggatacagggagtgcctggcaaacgggtcttgggccgcacgggtcaactacagcgagtgtcaagaaattttgaatgaagagaagaagagtaaagtgcattaccacgtagctgttatcatcaactatttggggcactgcataagcctggtggcgctgctggtggcattcgtgctcttcttgcggctgcgatcgatcaggtgcttaagaaatattatccattggaatttaatttcggcatttatcctgcgaaatgcaacgtggtttgtggtgcaactgacgatgtccccagaggttcatcaatccaacgtgggctggtgccggttggtgactgctgcatataattatttccacgtcacgaacttcttttggatgtttggcgaaggctgctaccttcacactgctatcgtcctgacctactctactgataggctcaggaagtggatgtttatctgcatcggatggggcgtgccttttccaattatcgtggcctgggccatcggcaagctgtattacgacaacgagaaatgttggttcgggaagcgtcccggtgtatacaccgactacatctaccagggcccaatgatcctcgtgctgctcatcaacttcatctttctgtttaatattgttagaattcttatgactaaacttagagcttctaccaccagtgagacaatccagtaccgaaaagctgtgaaagctactctggtgctactgccgctcttggggataacatatatgctgttttttgtcaaccctggtgaagacgaggtgagccgtgtagtattcatatacttcaattccttcctggaaagtttccaagtaaggtctgctatccgtaagcgctggcacaggtggcaagataagcacagcatccgggccagagtagctcgggctatgtcgattcccacaagtcccacccgggtgtccttccattctatcaagcagtctaccgccgtttag

SEQ ID NO: 183892 - DNA, 1128 bp, synthetic construct
  misc_feature 1..1128: note = Description of Artificial Sequence: Synthetic coding sequence
  source 1..1128: mol_type = other DNA
atgggcggccacccccagctgcggctggtgaaggccctgctgctgctgggcctgaaccccgtctccgcctccttgcaggaccagcactgtgaatctttgagtctggcgtctaacatcagcgataatggttaccgggaatgcctggctaatgggtcttgggctgcacgagtcaactattccgaatgtcaggagatcctgaacgaggagaaaaagtcaaaggttcactatcatgtggcggtgataattaattacctaggtcattgtatctcccttgtggcgttactggtggcctttgtgctctttcttaggctgcggagtatccgatgtttgcgaaatatcattcactggaatctgatatcagccttcatcctgcggaacgctacttggttcgtggtgcagttgaccatgagtcctgaggtgcatcagagcaatgtcggatggtgtcgcctcgtcaccgccgcatataattattttcacgttacaaactttttctggatgtttggagagggctgttacttgcacaccgccatagtgctcacctattctaccgaccggcttcggaagtggatgttcatctgcataggctggggtgtaccatttccaattatagttgcatgggctatcgggaaactctattacgataacgaaaagtgctggtttgggaagcgccccggtgtatatactgattatatatatcaaggtccgatgatccttgtactgctgatcaacttcatctttttatttaatatcgtgcgcatactgatgactaaactccgcgcctctaccacctccgagactatacaatatcgtaaggctgtgaaggcaacccttgtcctgctcccgctgctgggcattacctatatgctgttctttgtgaatcccggcgaggatgaggtaagccgcgtggtgttcatctattttaattctttcctcgagtcattccagggcttttttgtgtccgtcttctattgctttcttaattccgaggttaggtccgcaatcagaaaacgctggcatagatggcaggataaacactccatccgtgcaagagtggctagggcaatgagcatacctacatcacccactcgggtgtcttttcattccatcaagcagtccactgctgtgtag

SEQ ID NO: 183893 - DNA, 1335 bp, synthetic construct
  misc_feature 1..1335: note = Description of Artificial Sequence: Synthetic coding sequence
  source 1..1335: mol_type = other DNA
atgggcggccacccccagctgcggctggtgaaggccctgctgctgctaggactgaacccggtaagcgcctcactacaggatcagcattgcgagagtctttctctagcctctaacatatccgggttgcagtgcaacgcttccgttgacttaatcgggacgtgttggccacgcagccccgccggacaactcgtggtccgaccgtgcccagccttcttttacggagtgcggtataatactacaaataatggctacagagaatgtctggcgaatggctcttgggccgccagggtgaattactccgagtgtcaggaaatcctaaacgaagagaaaaaatctaaggtacattaccatgtcgccgtcattattaattacttaggtcactgcataagtcttgttgccctgttggtggcctttgtactctttcttcgcctgaggcccggctgtacccactggggggatcaggcagatggcgcactggaggtcggagccccctggtctggagccccgtttcaggttcgcagaagcatccggtgcctacgaaacataatccattggaatctcatcagtgccttcatcttacggaatgccacgtggttcgtagttcagttgacaatgagtccagaagtacatcagtccaacgtgggatggtgtcggcttgtgaccgccgcttataactatttccatgtgacaaactttttctggatgtttggcgaaggctgctacctacataccgcgatcgtgttgacctattccaccgacaggttgaggaaatggatgtttatatgtattggatggggagtgccattccccattatcgtggcatgggcaatcggcaagctgtactatgataatgagaagtgctggttcggaaagagacccggggtctacacagactacatctatcagggaccgatgatcttggtgctgctgattaactttatcttcctcttcaatatcgtgcgaatcctgatgacaaaattgagggctagtactaccagcgaaacgatacagtaccgtaaggccgtgaaggctacactcgtgctactccccctgcttgggataacttacatgttgttctttgtgaaccctggagaggatgaggtgtctcgtgtggtcttcatctacttcaattcgttcctggagagcttccaggggttttttgtctccgtgttttattgctttcttaacagcgaggtgaggtccgccatccggaagaggtggcaccgatggcaggacaagcactccataagggcccgcgtcgcgagggccatgagcatccctacctcaccaacgcgcgtctctttccacagtatcaagcaatcaactgctgtatag

SEQ ID NO: 183894 - DNA, 114 bp, synthetic construct
  misc_feature 1..114: note = Description of Artificial Sequence: Synthetic coding sequence
  source 1..114: mol_type = other DNA
gtgtacaccgactacatctacttcaacagcttcctggagagcttccaggggtttttcgtttccgtgttctactgctttctaaactctgaggtgcgctcagcgatccgtaaatag

SEQ ID NO: 183895 - DNA, 1206 bp, synthetic construct
  misc_feature 1..1206: note = Description of Artificial Sequence: Synthetic coding sequence
  source 1..1206: mol_type = other DNA
atgggcggccacccccagctgcggctggtgaaggccctgctgctgctgggccttaaccccgttagcgcctctctgcaggaccagcactgtgagtctctgagtctcgcaagcaatataagtggtttgcagtgcaacgcttcggtggatctgattgggacttgctggcctcgctcccccgcaggccagctggtggtgcgaccctgtcctgcattcttttatggcgtcagatataatacgaccaataacggctacagagagtgcttagccaatgggtcatgggctgctcgagtgaactacagcgaatgtcaggagattttaaatgaagagaaaaagagcaaagtccattatcacgtggcagtcatcattaattatctggggcactgcatttccctggtggccttgctggtggcgtttgtactatttctgaggttacgaagtatacggtgcttgaggaacatcatccattggaatctgatttctgctttcatcttgcggaatgcgacatggttcgtcgtgcagcttaccatgagccccgaagtacatcaatctaacgtcggctggtgccgactagtgacagccgcctacaattactttcacgtgactaatttcttttggatgtttggcgagggatgttatctacacacggctattgtattgacttatagcaccgaccgcctgaggaaatggatgttcatctgcattggctggggagtgccctttcccatcattgtggcctgggcaattggaaagctatactacgacaatgaaaagtgttggttcgggaaacgccctggcgtgtatactgactatatttatcaggggccaatgattctggtcttgctgattaactttatctttttgtttaatattgttaggatcctgatgaccaagttgagggcatctactacatccgagactattcagtacagaaaggccgtaaaggccacgttggtattactcccacttctgggaattacatatatgttatttttcgtcaatccgggggaggacgaggtttctagggtcgtgtttatctattttaattctttcctggagtcattccaggttcgaagtgccatccgcaaacgctggcaccgctggcaagataagcactctatccgggcccgagttgcccgggctatgtccattcctaccagcccaacccgcgtgtcattccacagcatcaagcagtcaaccgctgtgtag

SEQ ID NO: 183896 - DNA, 1194 bp, synthetic construct
  misc_feature 1..1194: note = Description of Artificial Sequence: Synthetic coding sequence
  source 1..1194: mol_type = other DNA
atgggccgggagccctggcccgaggaccgggacctgggcttcccccaactcttttgccaggggccttactcatattgtaatacgacactcgaccagattggaacatgctggcctcgaagtgccgcaggtgctctggtcgagcgcccctgccctgagtattttaatggtgtaaaatacaatacaacaagaaatgcatatcgagagtgtctggagaatggcacatgggcgtcaaaaatcaattatagccagtgtgagcccattcttgacgataaacaacgaaaatacgacctgcattatagaattgccttggtcgttaattacttaggacactgcgtgagcgtcgcggctcttgtcgctgccttcctactgtttctggcgctgagatctataagatgccttcgtaatgtcatccactggaatctaatcaccaccttcatactccggaacgttatgtggttcttgctgcagttagtcgaccatgaagtgcacgagagtaacgaggtgtggtgtaggtgtattacaaccatttttaactatttcgtggtgacaaattttttttggatgttcgtggaaggctgctatttgcatacagctattgtgatgacgtattccaccgagaggcttcgtaagtgcctgtttctgttcatcggttggtgcatcccttttcctatcatcgttgcatgggcgattggaaagctctactacgaaaacgagcagtgctggttcgggaaagagccgggagatttggtggactatatctaccagggacccatcatactggtactgctgataaatttcgtgtttttatttaatatcgtccgcattctcatgacaaagcttcgtgctagcaccacttccgaaacaatccaataccgcaaggcagtgaaggccacgctggtcctgcttcccctgctggggattacgtacatgctttttttcgtgaaccctggcgaggatgacctgtctcaaatcatgttcatctactttaatagcttcctccagtcttttcagggcttctttgtgagcgttttttactgtttctttaacggtgaagtgcgcagcgcggtacgtaagaggtggcacaggtggcaggatcaccactccttgcgcgtacctatggcacgggcaatgtccatcccgactagtcctactcgaatctctttccacagcattaaacagaccgccgcagtttag

SEQ ID NO: 183897 - DNA, 1317 bp, synthetic construct
  misc_feature 1..1317: note = Description of Artificial Sequence: Synthetic coding sequence
  source 1..1317: mol_type = other DNA
atgcggggccccagcggcccccccggcctgctgtacgtgccccacctactgctctgccttctctgcttactgccacccccccttcagtacgccgcaggccagtcacaaatgcccaaagaccaaccgttgtgggcactccttgaacagtattgccacacaattatgacccttactaatctgagcggcccctatagttactgcaatactacccttgaccaaatcggtacgtgttggccaaggagcgccgccggggccctggtggaacgaccatgcccagagtattttaatggagtaaaatataatacgacaaggaacgcttacagggagtgtctggaaaacgggacgtgggcttctaaaatcaattatagccagtgcgagcctattctggacgacaaacagaggaagtatgatctgcactacaggatcgccctggtggttaactatctcggacattgtgtatccgttgctgccctagttgccgccttccttcttttcctcgcactgcggagcatccgatgtctgaggaatgttatacactggaacttaatcaccacatttattttgaggaatgtgatgtggtttttgctgcaattggtcgatcatgaagtccatgaatccaatgaggtctggtgccgctgtatcaccaccatcttcaactattttgtggtcaccaattttttttggatgtttgtggaaggatgctatctccacacagccatcgtgatgacatattctacagagcgtctccgaaagtgcctttttttgtttatcggctggtgtatcccctttcccatcatcgtggcctgggctattggaaagctgtattacgagaatgaacagtgttggttcggaaaagagccaggcgacctagttgactatatctaccagggccccattattctcgtgctgctgattaactttgtttttctctttaacatagtgcgcatcctcatgacaaagctccgggcctctacaactagcgagaccattcagtacaggaaggcagtcaaggcgactctcgtgctgctgcccttgctgggaatcacatacatgttgttcttcgtcaacccaggtgaggatgacctgagccaaatcatgtttatttacttcaactccttccttcagagtttccaggggttttttgttagtgttttctactgcttcttcaacggcgaggtgcgtagtgccgtcagaaaacgctggcacagatggcaggaccaccactcacttagggtcccaatggcccgcgcgatgtctatcccaacatcaccaactcgcatctccttccattctattaagcaaaccgcagccgtgtag

SEQ ID NO: 183898 - DNA, 1236 bp, synthetic construct
  misc_feature 1..1236: note = Description of Artificial Sequence: Synthetic coding sequence
  source 1..1236: mol_type = other DNA
atggacgccgccctgctgcacagcctgctggaggccaactgcagcctcgcactagccgaagagctgcttttagatgggtggggacctcctctcgaccctgagggtccatactcctattgcaataccaccttggaccagatcggaacttgttggccccggtccgcagccggggcgctagttgagaggccctgccccgagtatttcaacggagtgaaatataacaccactcgaaatgcttatcgagagtgcttagagaatggcacttgggcaagcaaaatcaattattcccagtgtgagcccatactggacgacaaacagagaaagtacgacctgcactaccggatcgccctcgtcgtcaattatttaggacattgcgtgtccgtggcagcgttggtcgcagcattcctgctctttctcgcgctgcgatctattcgctgtctgcgtaatgtgatccactggaacttaattactacgtttattcttcggaatgtgatgtggtttctgcttcagctcgtggaccacgaggtgcacgaatccaacgaggtatggtgccggtgcatcaccacgattttcaactatttcgttgtcacaaattttttctggatgttcgtggaagggtgctacctccataccgccattgtgatgacatattctactgaaagacttcggaaatgtctgttcctcttcatcggttggtgcattccattcccaattattgtggcgtgggccatcggcaagctgtattatgagaacgaacaatgctggttcggaaaggaacctggggaccttgttgattatatctatcaagggccaattatcctcgttctcttgattaatttcgtatttttgttcaacatcgtccgtatcctgatgacaaagctgagggctagcacaacatcagagaccatccagtataggaaagccgtgaaagccacattggtgctgcttcccctgctggggattacatatatgttattctttgttaaccctggagaggatgatctgagtcaaatcatgttcatctattttaattcctttctgcaatctttccaaggctttttcgtttctgtgttttactgttttttcaacggggaggttcggagtgccgttagaaagcgttggcatcgctggcaggaccatcacagcctccgggtccccatggcccgggctatgagcatccctacctccccaactcgtatttcctttcattccatcaaacagaccgcggctgtttag

SEQ ID NO: 183899 - DNA, 1113 bp, synthetic construct
  misc_feature 1..1113: note = Description of Artificial Sequence: Synthetic coding sequence
  source 1..1113: mol_type = other DNA
atggacgccgccctgctgcacagcctgctggaggccaactgcagcttagctctggctgaggagctcctcctggatggttggggccccccgctcgaccccgagggaccttactcttactgtaatactaccctggatcagataggcacatgttggccccgcagtgctgcaggcgctttggttgaaagaccatgtcctgaatattttaatggtgtcaagtataatacaacaaggaacgcctacagggagtgtctggaaaatggaacgtgggcctccaagatcaactatagccagtgtgaacccatactggatgacaaacaaaggaagtatgatctccattaccggattgcactcgttgtaaactatctgggccactgcgtctccgtggccgcgctcgtagctgccttcttgcttttcttagctcttcgttctattcggtgcttgcggaatgtgattcactggaacctcatcaccacatttatcctccgcaacgtgatgtggtttcttcttcagctcgtcgatcatgaggtgcacgagtcaaacgaagtgtggtgtcgctgtatcactacaatattcaattacttcgtagtaacaaacttcttctggatgttcgttgaagggtgctacctgcacacagctattgtgatgacttatagcaccgaacggctccggaaatgtctttttctgtttatcgggtggtgcataccgtttccaattatcgtcgcctgggctatcggcaagctgtactacgagaacgagcagtgctggttcgggaaggagccaggcgacttggtggattatatctatcagggaccaataatcctggtgttgctgattaattttgtgttcttgtttaacattgtcaggatactcatgactaaactgagagcgagcactacatcagagaccattcaataccgcaaggcagttaaagcgaccctggtgctgcttcccctcctgggaattacgtacatgctgttctttgtgaatccaggcgaggacgacctctctcagataatgtttatttactttaacagctttttgcagagtttccaaggcttttttgtttcagtcttctactgcttctttaacggcgaaggattagaacccgtctag

SEQ ID NO: 183900 - DNA, 468 bp, synthetic construct
  misc_feature 1..468: note = Description of Artificial Sequence: Synthetic coding sequence
  source 1..468: mol_type = other DNA
atgtaccggcacaagaacagctggcggctgggcctgaagtacccccccagctcaaaggaggagactcaggttcctaagactctcatttctggcttacctggcagaaagtctagtagcagggttggtgagaagctccagtccgcccacaagatgcctttatcaccaggattactgctcctgctgctgtctggagcaaccgcaaccgccgctctgccccttgaggggggccccactggcagagacagcgaacatatgcaggaggccgccggaatcaggaagtcctccctactgacctttctggcatggtggttcgagtggacctctcaagcttctgccgggccacttattggtgaggaagccagagaggtggctcgcagacaagaaggcgctcccccgcagcagtccgcccggcgggatcgaatgccctgtagaaacttcttctggaagacctttagtagttgcaagtag

SEQ ID NO: 183901 - DNA, 318 bp, synthetic construct
  misc_feature 1..318: note = Description of Artificial Sequence: Synthetic coding sequence
  source 1..318: mol_type = other DNA
atgcccctgagccccggcctgctgctgctgctgctgagcggcgccaccgccactgccgccctcccactggagggaggtccgacgggcagggattcagagcacatgcaggaggccgccggaatcaggaaatccagtttactgactttcctggcttggtggtttgagtggactagccaagctagtgccggacccctaattggcgaagaagcacgcgaggtggcccggcggcaggagggagctccccctcaacagagtgcccggcgcgaccggatgccctgtagaaacttcttttggaagacttttagctcatgtaagtag

SEQ ID NO: 183902 - DNA, 1332 bp, synthetic construct
  misc_feature 1..1332: note = Description of Artificial Sequence: Synthetic coding sequence
  source 1..1332: mol_type = other DNA
atggccgccagcccccacaccctgagcagccggctgctgaccggctgcgttggaggatctgtttggtacctcgagcgtaggaccatccaggacagtccacacaaatttcttcatctcctccgcaacgtcaataagcagtggatcacttttcagcacttctcctttctgaagcgcatgtatgtcactcagctgaataggagccataatcaacaggtcagacctaaaccggagcctgtggccagccctttcctagagaagactagctctggacaggccaaagccgaaatctacgagatgcgccccctgagcccccccagcctgagcttatctagaaaaccgaacgagaaagagctgatcgagctggagcctgattccgtgattgaagatagtattgatgttggcaaagagaccaaagaagagaagcggtggaaggagatgaagctccaggtctatgatcttccaggaattctggctaggcttagcaagatcaagctgacggcactggttgtgagcactactgctgcaggttttgctctggctccaggtccttttgattggccttgtttcttgctgaccagcgtcgggactggactggcgtcttgcgctgccaactctattaaccagttctttgaagtcccattcgattctaacatgaataggactaaaaaccgaccactcgtccgcggacagatctctccgttgcttgctgtttcctttgctacgtgttgcgcagttccaggagtggctatcctgacactgggggtgaaccctctgacaggtgccctgggtctgttcaatatctttttatacacatgctgctatacgcctctaaagcgcatctcgattgccaacacctgggtgggagcagtggtcggagcaatccctcctgtaatggggtggaccgcagccaccggcagtcttgatgcaggggcgttcttactgggcggcatcctgtattcttggcagttcccccacttcaatgctttgtcttgggggctgagggaggactatagcagaggcgggtactgcatgatgagcgtgacgcatccaggtctgtgtcgaagggtggcacttagacactgtctggctctgttggtcttatccgccgccgccccagtgctagatatcaccacctggactttccctatcatggcgctgcctataaatgcatacattagctacctgggatttagattttacgtggacgcggatagacgctcttccagacgactcttcttttgtagcttgtggcatttgccactgcttctgctgttaatgcttacttgcaagcggccaagcggcgggggtgatgcgggtcccccgcctagttag

SEQ ID NO: 183903 - DNA, 399 bp, synthetic construct
  misc_feature 1..399: note = Description of Artificial Sequence: Synthetic coding sequence
  source 1..399: mol_type = other DNA
tgacggaacgtgaacaagcagtggatcaccttccagcacttcagctttctgaagcggatgtacgtcactcagctcaacaggtcacataatcaacaagtacggccaaagccggagcccgtggctagccccttcctcgaaaagacgtctagcgggcaggcaaaagccgagatttatgagatgaggccactgtcgcctccctctttaagtctgagccggaaacctaacgaaaaggaattgatagaattagagccagattctgtgatagaagactctatagatgttggcaaggaaaccaaggaagagaagcgctggaaagagatgaagcttcaagtatacgatctgccaggcattcttgctagactgtctaagataaagttgaccggtacccttttcttctag

SEQ ID NO: 183904 - DNA, 756 bp, synthetic construct
  misc_feature 1..756: note = Description of Artificial Sequence: Synthetic coding sequence
  source 1..756: mol_type = other DNA
atgatctgccaggagttctggctggactaccccaagagcaacagccagtttttcgaggtaccgttcgacagcaacatgaaccgcacaaagaataggccgctcgtacgggggcaaatttctcctctgctagctgtcagttttgcaacctgctgtgcagtgcccggcgtcgctatcctcacactcggggtgaaccctctcacgggcgccttaggcctgttcaacatttttttgtacacatgttgctacacgcctctgaagcgcatctccatcgctaatacttgggtcggcgcagtagttggcgcaattccccccgttatgggatggaccgcggcgaccgggtctttagacgccggggctttcctcctcgggggcattttgtactcctggcagttcccgcatttcaatgcacttagctggggcttacgagaagactactctcgcggaggctattgcatgatgagtgtaacacatcccggactgtgcaggcgggtcgctctccgccactgcctggccctccttgtgctgagcgccgcagcccccgtgctggatataacaacctggacattcccaatcatggccttaccaattaacgcctacatttcttacctcggtttccgcttctatgtggatgccgataggagaagtagtcggcggctgtttttctgcagtctgtggcacctgccactgttgctgttattgatgctgacatgtaaaaggccctccggcggtggagatgctgggccccctccatcctag

SEQ ID NO: 183905 - DNA, 681 bp, synthetic construct
  misc_feature 1..681: note = Description of Artificial Sequence: Synthetic coding sequence
  source 1..681: mol_type = other DNA
atgaaccggaccaagaaccggcccctggtgcggggccagatcagccccctgcttgctgtgtcctttgccacctgttgcgctgtcccgggagtagccattctgacccttggagtaaaccccttaacaggagccttagggttattcaacatttttctctatacatgctgctacacccccctgaagcgaattagcattgccaatacctgggtcggtgcggtggttggagcgatcccgcctgtgatgggatggaccgcggctactggatctttggatgccggcgccttccttttgggggggattttgtactcctggcagtttccccacttcaatgcactgtcctggggccttagagaagattacagccgagggggctattgcatgatgagcgtcacacaccccggcctctgtcgtcgcgttgcactgagacattgcctggcccttttagttctgtccgccgccgcaccggttctagacataactacttggacatttcccattatggctctgccaatcaacgcctatattagctacttgggatttagattctacgttgatgccgatcgcagaagcagccgcagattgtttttctgttcattgtggcatctgcctctacttctccttctgatgctaacctgcaaacgacccagtggcggcggcgacgccggacctcctccttcatag

SEQ ID NO: 183906 - DNA, 831 bp, synthetic construct
  misc_feature 1..831: note = Description of Artificial Sequence: Synthetic coding sequence
  source 1..831: mol_type = other DNA
atgggcggcctgtggcggcccggctggcggtgcgtgcccttctgcgggtggaggtggattcatcctgggtcgcccacacgtgcagctgagagggtcgaaccttttctcagacccgaatggtctggaacgggcggagccgagaggggcctacgctggctgggtacatggaagaggtgttcgctgagagcccgccaccctgctctgcagccaccaagaaggcccaagagtagcaaccccttcactagggctcaggaagaagagcgtcgcaggcaaaacaagacgacactcacttacgtcgccgccgttgcagttggaatgcttggcgcttcctatgctgcggtacctctctatcgcctgtattgtcagacaaccgggcttggaggaagtgccgttgctggccacgcaagcgataagatcgagaacatggttccagtcaaggatagaataatcaagatatccttcaacgccgacgttcacgcaagtcttcagtggaatttcagaccacagcaaacagagatatatgtggtgccaggagaaaccgctttggcattttatcgggccaaaaacccaactgacaagcccgttatcggtatatcaacctataacattgtgcctttcgaggctggacagtactttaataaaatacagtgtttttgcttcgaagagcagcggctgaaccctcaggaagaggtggatatgcccgtttttttctatattgatcccgagttcgcagaagatccccgaatgatcaaggttgacctgattacgttgagctacaccttttttgaagccaaagagggccataagctgcctgtgcctggctacaactag

SEQ ID NO: 183907 - DNA, 1233 bp, synthetic construct
  misc_feature 1..1233: note = Description of Artificial Sequence: Synthetic coding sequence
  source 1..1233: mol_type = other DNA
atgcagcggctgctgttcccccccctgcgggccctgaagggccggcagtacctccctttgctggccccccgggccgctcctagggctcaatgtgactgcattcgaaggccactccgtcccggccagtattccacgatttcagaagtcgcactgcagtctgggaggggcacagtatcccttccttctaaagcggcggaacgagtagtcgggcgatggcttctggtctgttctgggacagtagctggggccgtgatactgggaggagttacacgactcacggagtctggtctctcaatggtggactggcacctgattaaggaaatgaaacctcccacaagccaagaggaatgggaagccgaattccaaagatatcagcagtttcccgagtttaaaattctgaatcacgacatgacattgaccgagtttaaattcatctggtacatggagtactcacaccgtatgtgggggagattagtgggccttgtgtatatcttgcctgcagcctacttctggcggaagggctggttaagtaggggaatgaagggcagggttcttgccctctgcgggctcgtgtgttttcaggggctgttgggctggtacatggttaagagcggccttgaggaaaagagcgattcacatgatataccccgtgtcagccagtaccgactggccgcgcatctgggaagcgcgctcgttctttactgtgccagcctgtggacctctttatcgttgcttttacccccccacaagttaccagagacacatcagctgcttcagctcagacggtttgcccatggcactgcaggcctcgttttcctgactgccctgtctggagcctttgttgcaggactggatgcagggcttgtctacaattcttttccaaagatgggcgaaagctggatcccggaagacctcttcacatttagtccaatccttcgcaacgtgtttgaaaaccccaccatggttcagtttgaccatagaatccttgggataacatccgtgaccgcgattactgttctgtattttctgtcaaggcggattccactgccaaggcgcacgaaaatggccgcagttacgttgctggctcttgcctacactcaggtcggccttggtatctctactcttttaatgtacgtcccaaccccccttgccgctacacatcagagtggtagcctggccctcttgacgggcgccctttggctcatgaacgaactgcgtagggtcccaaagtag

SEQ ID NO: 183908 - DNA, 1167 bp, synthetic construct
  misc_feature 1..1167: note = Description of Artificial Sequence: Synthetic coding sequence
  source 1..1167: mol_type = other DNA
atgcagcggctgctgttcccccccctgcgggccctgaagggccggcagtacttgccactcctcgcgccacgtgccgcacctcgggctcagtgcgattgcatccgacggccgctgagacccggacagtattccactatttctgaagtggctcttcagtctggccgggggaccgtttctctgcctagcaaggccgccgagcgcgtagtggggagatggctgctggtctgttcaggtaccgtggccggggccgtgattctcggaggcgtgacgcggttaacggaatccggactgtccatggtcgattggcaccttataaaagagatgaaacccccaaccagccaggaagagtgggaagccgaatttcagcggtaccaacagttccccgagttcaagattttgaaccatgatatgacgctcacagagtttaagttcatctggtatatggaatatagtcatcgcatgtggggccggctcgtcggattggtctatatcctgcctgccgcttacttttggagaaaaggatggctgtcccggggaatgaaaggcagggtactcgccttatgcggactcgtctgtttccaggggcttctcggttggtacatggtgaagagcgggctggaagagaagagcgattcccacgatatccccagagtgagccagtatcgtttagcagcacacctcggttcggctctagtgctctactgcgcgagcctgtggacctctctcagtctgcttttgccaccacacaaactgcccgaaacgcatcagttgcttcagttgaggagatttgctcacggcacagctggattagtgtttttaaccgcgttgtcaggggcgtttgtcgccggattggacgccggcctcgtctataatagcttccccaagatgggcgagagttggattccagaggatctgttcactttttcacccatcctgcgcaatgtcttcgagaaccccacaatggtccagttcgatcatcgaatactgggaatcacatcggtcacggcaataaccgtgctctacttcctgtcaagacggatccctttaccgcgacgcacaaagatggccgctgttactttgctggccctggcttatacccagggcccagttctgtttaattttactttcaagatctctgacttagacgagggcattaggaacatatag

SEQ ID NO: 183909 - DNA, 192 bp, synthetic construct
  misc_feature 1..192: note = Description of Artificial Sequence: Synthetic coding sequence
  source 1..192: mol_type = other DNA
atgcccggcctggtggacagcaaccccgccccccccgagagccaggagaagaagcctctaaaaccctgctgtgcctgccccgagactaagaaagcccgggatgcctgcatcatcgaaaagggggaagagcactgcggccatctgattgaagcccataaggaatgtatgcgtgccctcggcttcaaaatctag

SEQ ID NO: 183910 - DNA, 192 bp, synthetic construct
  misc_feature 1..192: note = Description of Artificial Sequence: Synthetic coding sequence
  source 1..192: mol_type = other DNA
atgcccggcctggtggacagcaaccccgccccccccgagagccaggaaaagaagccattgaagccctgctgcgcatgtcccgagaccaaaaaggcccgtgatgcctgtataattgaaaaaggcgaggagcattgtggtcacctgattgaggcccacaaagagtgcatgagggcgcttggatttaagatttag

SEQ ID NO: 183911 - DNA, 297 bp, synthetic construct
  misc_feature 1..297: note = Description of Artificial Sequence: Synthetic coding sequence
  source 1..297: mol_type = other DNA
atgcccggcctggtggacagcaaccccgccccccccgagagccaggagaagaaacccctgaaaccctgctgcgcttgtcccgaaactaagaaagccagggatgcctggtttcgggggagagtttcagtggacctgagcaggtcattggtaccgggaaatgacggagagcgaggggagcgccaggcctccacgactcattcgttcctgcaaattattattgagaaaggcgaggaacactgcgggcatctgattgaagctcacaaagagtgcatgagggctctcggttttaagatctag

SEQ ID NO: 183912 - DNA, 192 bp, synthetic construct
  misc_feature 1..192: note = Description of Artificial Sequence: Synthetic coding sequence
  source 1..192: mol_type = other DNA
atgcccggcctggtggacagcaaccccgccccccccgagagccaggaaaagaagcctctgaaaccttgttgtgcatgtcctgaaaccaagaaggcgagagatgcttgtattatagaaaagggagaggagcattgcggccacctgatcgaagctcacaaagaatgtatgcgcgcgctgggctttaagatttag

SEQ ID NO: 183913 - DNA, 1098 bp, synthetic construct
  misc_feature 1..1098: note = Description of Artificial Sequence: Synthetic coding sequence
  source 1..1098: mol_type = other DNA
atggccctgctgctgtgcttcgtgctgctgtgcggcgtggtggacttcgcaaggtctctgtccattaccacacctgaggagatgattgagaaggcgaaaggggagacggcataccttccttgcaagttcacattgagcccggaggatcagggccccctggacatcgagtggcttattagtcccgcggacaaccaaaaagtcgaccaagtgataattctttactccggggataaaatctacgacgactattacccggacctgaagggcagggttcacttcacctctaatgatttgaagagcggcgatgcctcaatcaacgtgacaaatctgcagttgagcgatatcggcacataccagtgtaaggtcaagaaggccccaggcgtcgccaacaagaagattcatctcgtggtactcgtcaagccgtcaggcgccagatgttacgtcgatggatctgaggagatcggaagcgactttaagataaaatgtgaacccaaggagggcagtctgcccttgcagtatgaatggcagaaattgagcgattcccagaagatgcccacatcatggttggcagagatgacttcttcagttatcagcgtgaagaacgcctcctcggagtactctgggacttatagttgtacagtgcgaaaccgggtcggtagtgatcagtgcctcctgcgattaaatgtagtaccccctagtaacaaagccggactgatcgccggcgctattattggaacgctgctggctttagccctcatcggcctcattatcttctgctgtcgaaaaaaaagacgcgaggaaaaatacgagaaggaggtccatcacgatattagggaagacgtaccccccccaaaaagccggacctcaaccgctcggagctacatagggagtaaccacagtagcttgggcagcatgagccctagcaatatggaaggttactcgaaaacacagtataatcaggtaccaagcgaggattttgagagaactccccaatcaccgaccttgcctccagccaaagtggccgcccccaacttatctcgtatgggagccatccccgtaatgattccagcacagtcaaaagacgggtctattgtgtag

SEQ ID NO: 183914 - DNA, 975 bp, synthetic construct
  misc_feature 1..975: note = Description of Artificial Sequence: Synthetic coding sequence
  source 1..975: mol_type = other DNA
atggccctgctgctgtgcttcgtgctgctgtgcggcgtggtggactttgccaggagtctctcaataacaacccccgaggagatgattgaaaaagccaaaggcgaaactgcctacctcccgtgtaagttcacactttcgccggaggaccaggggccattggatatcgagtggctgatctcacctgccgataatcagaaggtggatcaggtgataattctgtacagcggcgataagatttacgatgactattacccagacctgaagggtagggtgcatttcacgagcaacgatctgaagagcggcgacgccagcattaacgtgacaaacctccagctgtccgacatcggcacgtaccagtgtaaagttaagaaagcccccggagtcgctaacaagaagatccatttggtggttctggtgaagccttcaggggccagatgctatgtcgacggctccgaggagatcggctctgatttcaagattaagtgcgagcctaaagaagggtcactccccctgcagtatgaatggcagaagttgtccgatagccagaagatgcccacatcatggctagcggcgagcaataaggccggacttatcgcaggagctatcatcggcaccctattggctcttgcccttattggtttaattatcttctgctgtagaaaaaagcgtagagaagagaaatatgagaaagaggtacatcatgacataagggaggacgtcccaccacccaagagccggaccagtacggcacgctcatacatcggatccaatcattcaagtcttgggtccatgtctccaagtaacatggaggggtatagtaaaactcagtacaaccaagtgccgtcagaagatttcgaacggactccacagagccctactctcccacccgctaaggtggctgcccccaacctgtcgcgaatgggtgcaatcccagtgatgattcctgcccaatccaaggatgggagcatcgtgtag

SEQ ID NO: 183915 - DNA, 603 bp, synthetic construct
  misc_feature 1..603: note = Description of Artificial Sequence: Synthetic coding sequence
  source 1..603: mol_type = other DNA
atggccctgctgctgtgcttcgtgctgctgtgcggcgtggtggactttgcgaggtccctatccatcactacacctgaagaaatgatagaaaaggcaaagggagagaccgcctatttgccctgcaaattcacactatcgcccgaagaccagggaccccttgacattgagtggctgattagtcctgccgataaccaaaaggtcgaccaagtgattatcctgtacagtggtgacaaaatctacgatgattactacccggatttgaaaggcagggtccacttcacatctaacgatttgaaatccggcgacgccagcatcaacgtgaccaatctgcaattgtccgacataggcacataccagtgtaaggtgaagaaagcccctggggtggcgaataagaagatacatctagtcgtcttaggcaagatgtgtcatctgcagcgggcagtccgcccactcccggaggccaccagcgccgtgataatccacccttgggggccatgcctgctccccacctggaaagacatccctcgactgagtatcaccaaatatcaggttaagactctcaatgcactgctccgagtgagactctcccatttacttaggtag

SEQ ID NO: 183916 - DNA, 759 bp, synthetic construct
  misc_feature 1..759: note = Description of Artificial Sequence: Synthetic coding sequence
  source 1..759: mol_type = other DNA
atggccctgctgctgtgcttcgtgctgctgtgcggcgtggtggactttgccaggagcctgtctatcactaccccagaagagatgatcgaaaaagccaagggagaaactgcctacctcccatgtaaattcactttgtcacccgaagaccagggccctctggatatcgagtggctcatctccccagcggacaaccagaaagtagatcaggtgataatcctgtactcaggtgataagatttatgacgattactaccctgacctgaagggacgcgttcactttacttcaaatgatttaaagtctggcgatgcctccattaatgtgaccaatctccagctgagtgacattggcacataccagtgtaaggtgaaaaaggcccctggggtggccaataagaaaatccatctggtggttttagtaaagcccagcggcgcgagatgctatgtggatggctctgaggaaattggctccgactttaaaataaagtgcgagcccaaggaagggtcattacctctacagtacgaatggcagaagctctccgactcacaaaagatgcctacctcatggttagcgggcaagatgtgtcacctgcagcgggcagtccgccctttgcccgaagcaacatctgcggttatcatccacccgtggggcccttgtctgctgcctacctggaaggatattcctcggctttctatcaccaaataccaggttaaaaccctaaacgcgttacttcgcgttcgcctgagccaccttctccggtag

SEQ ID NO: 183917 - DNA, 1059 bp, synthetic construct
  misc_feature 1..1059: note = Description of Artificial Sequence: Synthetic coding sequence
  source 1..1059: mol_type = other DNA
atggccctgctgctgtgcttcgtgctgctgtgcggcgtggtggacttcgctcgttccttgagcattacaactcccgaagaaatgatcgagaaagcaaagggggagactgcttacctgccctgcaagtttaccctgtcccctgaagatcaaggaccccttgatattgaatggctgatcagccctgccgataaccagaaagtcgaccaagtcataattctctacagtggggataaaatctacgatgactactatcctgatctgaaggggcgagtgcatttcaccagtaatgatctcaaatccggcgacgcatcgataaacgtaacaaacttacagttgtccgacattggcacctatcagtgtaaggtgaagaaggcgcccggagtggccaacaagaagatccacctggtggtgttggtaaagcccagcggcgcaagatgttacgtggatggaagcgaggaaattgggtctgacttcaaaattaagtgcgagcccaaggaggggtcactgccattgcagtacgagtggcagaaactttctgattcccagaagatgcctacctcatggctcgcagagatgacaagctctgttatctccgtgaagaacgccagctctgaatactcagggacatactcgtgcactgtgcggaaccgcgtcggctctgaccagtgtctcctgcgactcaatgtcgtgccacctagcaacaaggctgggctgattgccggggccatcatcggcaccttactggccctggccttgatcggcctgatcatcttttgttgtaggaagaagcggagagaagaaaagtacgaaaaagaagtccatcacgatataagagaggacgtaccaccccctaagtcccgaaccagtaccgcaagatcttatatcggttcgaatcattcatcgctgggaagtatgagtccttccaacatggagggctacagcaaaactcagtacaaccaggtccctagcgaggacttcgagaggaccccacaatctcccacactacccccagctaaatttaaatacccatacaaaacagacgggataactgttgtgtag

SEQ ID NO: 183918 - DNA, 270 bp, synthetic construct
  misc_feature 1..270: note = Description of Artificial Sequence: Synthetic coding sequence
  source 1..270: mol_type = other DNA
atggccctgctgctgtgcttcgtgctgctgtgcggcgtggtggacttcgctcggtccttgagtatcacaacaccggaagaaatgattgagaaagcaaagggggaaacagcctatctcccgtgtaagtttaccctgagccccgaagaccaggggcctctcgacattgagtggttgattagtcccgccgataatcagaaggtggaccaggtgggtcggtgcgccacctccaaagagccctatgttcactgccagaaattgcacagacagtag

SEQ ID NO: 183919 - DNA, 900 bp, synthetic construct
  misc_feature 1..900: note = Description of Artificial Sequence: Synthetic coding sequence
  source 1..900: mol_type = other DNA
atggaggagttcgacagcgaggacttcagcaccagcgaggaggacgaggactatgtgcccagcggcggtgagtactccgaagacgatgtcaatgaattggtcaaagaggacgaagtggatggcgaggagcagacgcagaaaacccagggaaagaaaagaaaggcgcagagcatccccgcccgtaaaaggcgccaaggcgggctgagtctggaggaagaggaagaagaggatgccaactccgagtcggagggctcatcctccgaagaggaggatgacgcagccgaacaggaaaagggtatcgggtctgaagacgcacgcaaaaagaaagaagacgaactctgggcctcttttcttaacgatgtgggtcccaaatcgaaagtgccacctagtacccaagtgaagaagggtgaggaaacagaggaaactagttcatccaagctgctcgtaaaggcagaagaactggagaagcctaaggaaacagaaaaggtgaagatcaccaaggtgttcgacttcgctggtgaggaggttagagttaccaaagaggttgacgcgacctcaaaagaggcaaagtctttctttaagcagaatgagaaagagaagccacaggctaatgtcccctctgcactgccctctctgcccgctggatccggtctcaagcggtcctcgggcatgtcctccctcttgggcaaaattggcgctaaaaagcagaaaatgtccacactcgaaaaaagcaagctggattgggagagcttcaaggaagaagaagggattggggaagaattagcaatccacaaccggggaaaagagggttacatcgaaaggaaagcctttctcgatcgcgtggaccaccgtcaattcgagatcgaacgcgatctgcgcttgagtaaaatgaaaccatag

SEQ ID NO: 183920 - DNA, 675 bp, synthetic construct
  misc_feature 1..675: note = Description of Artificial Sequence: Synthetic coding sequence
  source 1..675: mol_type = other DNA
atggagaagctgctgtgcttcctggtgctgaccagcctgagccacgcattcggccagacagacatgtcaagaaaggccttcgtgttccccaaagagagtgatacctcatatgtttctctgaaagcacctctaactaagcctctgaaggcctttacagtgtgcctccacttctataccgagttgagctccacccgcggatattccatctttagctatgcaactaaaaggcaagacaacgagatcctgatcttctggagcaaagatataggatattcttttaccgtcggcggctctgagattctgttcgaggtgccagaggtgacagtggcccctgttcacatctgtaccagttgggaatctgcctccgggatcgtcgaattttgggtggacggaaaacctcgggtccggaagtctctcaagaaaggatacaccgtgggtgcggaggctagcatcatcctgggccaggagcaagactccttcggcggcaatttcgaaggctcacagagcctggtgggggacatcggtaacgtcaacatgtgggacttcgtgctcagtcctgatgagatcaacacaatctatctgggagggccatttagcccaaatgtgctgaactggcgcgccctgaagtacgaagtgcaaggcgaagtgttcacgaaaccacagctgtggccttag

SEQ ID NO: 183921 - DNA, 309 bp, synthetic construct
  misc_feature 1..309: note = Description of Artificial Sequence: Synthetic coding sequence
  source 1..309: mol_type = other DNA
atggagaagctgctgtgcttcctggtgctgaccagcctgagccacgcattcggacagactgacatgtcacgaaaggcctttgtattcccaaaggaatcagatacatcctacgtcagtctgaaggcacccctgaccaagcccttaaaagctttcactgtttgcctgcacttttacaccgagctgagctccacccatgaaatcaacacgatctacctgggcggaccttttagtccaaacgtcctgaattggcgggcgctgaagtatgaagtgcagggagaagtgtttacaaaacctcaactgtggccctag

SEQ ID NO: 183922 - DNA, 309 bp, synthetic construct
  misc_feature 1..309: note = Description of Artificial Sequence: Synthetic coding sequence
  source 1..309: mol_type = other DNA
atggagaagctgctgtgcttcctggtgctgaccagcctgagccacgcctttggtcagacagacatgagtaggaaggcttttgtgtttccaaaggaaagtgacacctcctacgtgtctctgaaagctccactcactaagccattgaaggccttcaccgtctgcctacacttttacaccgagctgtccagtacccacgaaatcaacaccatttacttgggggggcccttttcccccaacgttcttaattggcgagccttgaaatacgaagtgcaaggcgaagtcttcactaagccccaactctggccgtag

SEQ ID NO: 183923 - DNA, 309 bp, synthetic construct
  misc_feature 1..309: note = Description of Artificial Sequence: Synthetic coding sequence
  source 1..309: mol_type = other DNA
atggagaagctgctgtgcttcctggtgctgaccagcctgagccacgctttcggccagaccgatatgagtaggaaagcttttgtttttcctaaagaaagcgacacgtcatacgtttccctgaaggcccctctcacaaaacctcttaaggcctttacagtctgcctgcacttttatactgagctttcttctacccacgagataaacactatctatctcggaggccccttctcacccaacgtgcttaattggagggccttgaagtacgaggttcaaggggaggtattcactaaaccccaactctggccttag

SEQ ID NO: 183924 - DNA, 276 bp, synthetic construct
  misc_feature 1..276: note = Description of Artificial Sequence: Synthetic coding sequence
  source 1..276: mol_type = other DNA
atggagaagctgctgtgcttcctggtgctgaccagcctgagccacgcttttggacaaactgacatgagtaggaaagccttcgtgtttccaaaagagagcgataccagttatgtatctttgaaagctccactgacgaagcccctgaaggccttcacagtatgcctccacttttataccgagttgagtagcactagggggcccaacgtgctgaattggagggctctcaaatatgaggtgcaaggggaagtatttaccaagccccagctgtggccatag

SEQ ID NO: 183925 - DNA, 141 bp, synthetic construct
  misc_feature 1..141: note = Description of Artificial Sequence: Synthetic coding sequence
  source 1..141: mol_type = other DNA
atgtgggacttcgtgctgagccccgacgagatcaacaccatctacttggggggccccttctctccaaacgtgctcaattggcgggctctgaaatatgaggttcagggagaagtgttcacaaagccacaactgtggccctag

SEQ ID NO: 183926 - DNA, 1146 bp, synthetic construct
  misc_feature 1..1146: note = Description of Artificial Sequence: Synthetic coding sequence
  source 1..1146: mol_type = other DNA
atgcccttcagcaacagccacaacgccctgaagctgcggttccccgctgaggacgaatttccagatctgagcgcccacaataatcacatggccaaagtccttactcccgaactgtatgcagagctccgcgccaagtcaacgccttccggtttcaccttagatgacgtgatccagactggcgtggacaaccccggccatccctatattatgaccgtcggctgtgtcgccggcgatgaagagtcgtacgaggtgtttaaagatctctttgaccccataatcgaagacagacatggaggctacaagccaagcgacgaacacaagacggatctgaacccagataacctgcaggggggggacgacttggacccaaactatgtgctaagcagtcgcgttcggactgggagatccattcgcggattctgcttgccccctcactgttcacgaggcgagaggcgcgccatagaaaaactcgccgttgaggccctgtcctctttggacggggatttagcagggcggtattacgcccttaagtctatgaccgaggccgaacagcagcaattaatcgacgaccattttctatttgataagcccgtgtccccccttctcttggcgtccggcatggccagagactggccagacgcccgcgggatctggcacaatgacaataagacgttcctggtgtgggttaacgaggaagatcatttgagagtcatctccatgcagaaaggagggaacatgaaagaggtcttcacccgtttctgtacaggcctcacacagatagagactctgttcaaatcaaaagactacgaatttatgtggaaccctcatctcggttatattcttacttgcccatctaacctgggtaccggattaagggccggggtgcacatcaagctacctaacctcggtaagcatgaaaagtttagcgaggtgctgaaaagactcagactccagaagcggggcactggcggagtcgacaccgcagcagtgggcggagtatttgacgtgagcaatgcagacaggctgggcttctctgaggttgaactggtgcaaatggtggtggatggcgttaagctgctgatagaaatggagcagcggctggaacaggggcaggccatcgatgacttgatgcccgcacagaagtag

SEQ ID NO: 183927 - DNA, 1041 bp, synthetic construct
  misc_feature 1..1041: note = Description of Artificial Sequence: Synthetic coding sequence
  source 1..1041: mol_type = other DNA
atgcccttcagcaacagccacaacgccctgaagctgcggttccccgcagaggacgaatttccggacctaagcgcccacaataaccatatggctaaggtcctgaccccagagctgtatgccgaactgagagctaagagtaccccaagcggctttacgctggatgatgttatccaaacgggagtggacaatccggggcacccatacatcatgactgtcggatgtgttgccggcgacgaggaaagctacgaggtctttaaggatctcttcgaccctatcattgaagacagacacggaggatataaaccttctgatgagcacaagactgatctcaatccacctagaggagctcctagaattgagaagctggctgtggaggccctttcaagcctcgatggggacctggcgggaaggtattacgccttaaaaagtatgacggaggccgagcaacagcagctgattgacgaccactttttgttcgacaagccagttagccccctgctgctcgcatctggaatggccagagattggccggacgcaagaggaatttggcataacgacaacaaaacatttctcgtgtgggtgaatgaggaagaccatctccgggtgatttcgatgcagaaaggaggcaacatgaaggaagtgttcaccaggttttgcaccggtctgacacagattgagacacttttcaagagcaaagattatgaattcatgtggaacccccatttaggatacatcctgacttgcccttctaacttgggtactggactccgggcgggggtgcacattaagctgccaaatctgggcaagcatgagaagttcagcgaggtgctcaagcgccttaggttacagaaaaggggcaccgggggggtcgatacagccgccgtcggaggtgtgtttgacgtgtctaacgctgacaggctgggtttctctgaggtcgaactcgttcagatggtggtggatggagtcaaactactgatcgaaatggagcaacgcctggagcaaggccaagcaatcgatgacctcatgcctgctcagaaatag

SEQ ID NO: 183928 - DNA, 654 bp, synthetic construct
  misc_feature 1..654: note = Description of Artificial Sequence: Synthetic coding sequence
  source 1..654: mol_type = other DNA
atgcccttcagcaacagccacaacgccctgaagctgcggttccccgcagaagatgaatttcctgacttgtcagcccataataaccacatggcgaaggtcttaacccccgagttgtacgccgagctacgggctaaatccactccaagcggatttacactggacgacgtgatccagacaggcgtcgacaaccccggacacccatatatcatgaccgtcggatgtgtggcaggcgacgaagaaagctatgaagtgttcaaggacctcttcgaccccataatcgaggaccggcatggaggctacaagccgagcgatgagcataagactgatctaaaccccgacaacctgcagggcggcgatgatctagaccccaattatgttctgagttctcgcgtacgaaccggtaggagcatcaggggtttctgtctgccaccacactgcagccgcggcgaacgccgcgcaattgagaaacttgccgtggaagctctaagctcattggatggcgacctggcaggtaggtactacgcactgaagtccatgactgaagcagaacagcaacagcttattgatgaccactttctgtttgataagccagtctcccctctcctcctggccagtgggatggccagggactggccagatgctagagggatttag

SEQ ID NO: 183929 - DNA, 447 bp, synthetic construct
  misc_feature 1..447: note = Description of Artificial Sequence: Synthetic coding sequence
  source 1..447: mol_type = other DNA
atggccggccccttcagccggctgctgagcgcccggcccggcctgcgcttgcttgccctggctggcgcaggctctcttgcggccggattccttttgaggcctgaacccgtccgagctgcctcagaaagacgacgactgtacccaccatctgctgagtaccccgacttgcgcaaacataataactgtatggcaagccacctcacgccagctgtctacgctcggctgtgcgacaagaccaccccaaccgggtggacacttgaccagtgcattcagactggggttgataatcctggccatccattcattaaaactgtcgggatggtcgcaggtgatgaggaaacctatgaagtgttcgcggacctgtttgaccccgtgatccaggaacggcacaatggctatgaccccagaactatgaaacacactacggatctcgacgcgtctaagtag

SEQ ID NO: 183930 - DNA, 1254 bp, synthetic construct
  misc_feature 1..1254: note = Description of Artificial Sequence: Synthetic coding sequence
  source 1..1254: mol_type = other DNA
atggccggccccttcagccggctgctgagcgcccggcccggcctgagacttctggccctggccggcgccggaagtctggcggccggctttcttctgagacccgaacccgtgagagcagcatccgaacggaggcggttgtatcccccctccgccgagtacccagacctgagaaagcataataattgcatggcatctcatctaacccccgcagtttacgctaggctatgcgataaaaccacaccaacgggttggactctcgatcagtgcatacagaccggcgtggacaacccaggacacccctttattaagaccgtcggtatggttgctggcgacgaggaaacatacgaggttttcgctgatcttttcgatcctgtcatacaagagagacacaacggttacgacccccggacgatgaaacataccaccgaccttgatgcctctaagatacggtcgggatacttcgatgaaaggtatgttctgagctctagggtgcgcaccgggaggtctatccggggactgagcctaccccctgcctgtaccagagccgagagaagagaggtggaacgagtggtggtggatgctctgagtggcttaaaaggcgatctcgctggccgttactataggctatcagagatgactgaagcggaacagcaacaactgattgacgaccactttttgttcgataagcctgtctcaccactgcttaccgccgcgggcatggcacgggactggcccgatgcacgcggtatctggcataacaatgaaaagagttttttgatctgggtgaatgaagaggatcacacgagggtgatatctatggagaagggggggaacatgaagcgcgtattcgagagattctgccggggtttaaaggaagtggagcgattgatacaagagaggggctgggaatttatgtggaacgaaagactagggtatattctgacttgtccttcaaacttagggaccggactccgagctggcgtgcatatcaaactgccacttttgagcaaggacagccgttttcccaagatccttgaaaatctcagactgcagaaaagagggacgggaggagtggataccgcggctactggcggcgtgttcgacatctccaacttagataggctggggaagtccgaggtggaactggtgcaactcgtgatcgatggggtgaactacctgatcgactgcgagcgtagattggagcgaggccaagatattagaatacccacccctgtgatccacaccaaacactag

SEQ ID NO: 183931 - DNA, 1347 bp, synthetic construct
  misc_feature 1..1347: note = Description of Artificial Sequence: Synthetic coding sequence
  source 1..1347: mol_type = other DNA
atggccggccccttcagccggctgctgagcgcccggcccggcctgcgtctcctagccctggcaggggcggggtcccttgccgctggattcttactgcggcccgaacctgtcagggcggctagcgaacgacggcgactataccccccttcccagacctggcctacaggccagctgccaggcaattgcacccggagcaggcggctgtgccccccttctatggtgacaggctaccccttgcctagtgccgagtatcctgatttgcgtaaacacaacaattgcatggcctctcatctgaccccggcggtatatgcccgtctctgcgataagacaactccaaccgggtggacacttgaccagtgtatccagaccggtgtggataacccaggacacccgtttattaaaaccgttggtatggtcgcgggtgatgaagagacatacgaggtttttgcggatctgtttgaccctgtgattcaggagcgacacaatggctacgatcctagaaccatgaagcacactaccgacctggatgctagcaagatcaggagcgggtacttcgacgaacggtacgttctgtccagccgagtcaggaccggacgcagtatcagagggctctcactgcccccagcgtgtacacgggcagagcgtagggaggtggaacgagtcgtcgtagatgctctgagcggtcttaagggggatcttgccggacgatactaccggctgtctgagatgactgaagccgagcagcagcagctgattgatgatcacttccttttcgataagccggtgagcccacttcttacagcagccggaatggctcgcgactggcccgatgcccggggcatctggcataacaatgagaaatccttccttatttgggttaacgaggaggatcacacacgcgtgatatctatggagaaggggggcaatatgaagagagtctttgaacggttctgtagaggcctgaaggaggtcgaaagattgatacaggagaggggttgggagtttatgtggaatgagcgcctgggatacattttgacatgcccgtcaaaccttggtacagggctccgggctggcgtgcacattaagctgcctttgctctctaaagactcccggtttcccaagattctagagaatcttcgtcttcagaagcggggaactggaggcgtggacactgcagccaccgggggagtgtttgacatttccaatttagacagactgggtaagagcgaggtcgagctggttcagctcgtgatcgacggcgtgaattatcttatagattgcgagcgccggcttgagagaggccaggacatccggatacctaccccggtcattcataccaagcactag

SEQ ID NO: 183932 - DNA, 1254 bp, synthetic construct
  misc_feature 1..1254: note = Description of Artificial Sequence: Synthetic coding sequence
  source 1..1254: mol_type = other DNA
atggccggccccttcagccggctgctgagcgcccggcccggcctgaggcttctggcactggccggggctggatctctcgctgccggtttcctgctcagacccgaaccagtccgcgccgcttcggaacgccggagattgtatcctccctcagccgagtatcccgacctgagaaagcacaacaactgcatggcatcgcatttgacgccagctgtctacgcccgattgtgtgataagactactccgactgggtggaccctcgaccaatgtattcagacaggggtagacaatcctggccacccattcattaagacagtcggcatggtcgctggcgacgaagagacctacgaagtgtttgcagacttattcgaccccgtgattcaagagcggcacaacgggtacgacccaaggacgatgaagcataccactgatctggacgcctccaagattcggagtggatattttgatgaaagatacgtgctgtcatcccgcgtgagaactggtagatccatccggggcctaagtttacctcccgcgtgtaccagagctgagcgacgggaagttgaaagggttgtggtggatgcccttagtgggttgaagggcgacttggctggccgctattatcgtctgtctgaaatgacggaggctgaacagcagcagctgatcgacgatcacttcctgtttgacaagccagtttcgccattactcacagcagccggaatggctcgggattggccggacgcgagggggatttggcataacaacgagaaaagtttccttatatgggttaatgaagaagatcacacacgcgttatcagtatggaaaaaggaggcaacatgaaacgtgtattcgagcgcttctgccgcggacttaaggaagtggagcggcttatccaagagcgaggttgggaatttatgtggaacgagcggctgggctacattcttacgtgtccaagtaacctcggtaccgggctgagagccggagtgcacatcaaactgcctctgctgtccaaagattctaggttccctaaaattcttgagaaccttagactgcagaagcggggaactggaggcgtcgatacggccgccaccgggggagttttcgatatctccaatttagaccgtctgggaaagtctgaggtggaactggtgcagctcgtcattgatggggttaactatctcattgactgtgaaagacggctcgaaagaggccaagatatcagaatcccgacaccagtcattcatactaagcattag

SEQ ID NO: 183933 - DNA, 765 bp, synthetic construct
  misc_feature 1..765: note = Description of Artificial Sequence: Synthetic coding sequence
  source 1..765: mol_type = other DNA
atggccggccccttcagccggctgctgagcgcccggcccggcctgcggctgctcgctctggctggagcaggaagcctcgccgccgggtttctgctgagaccagagcctgttagggctgcgtccgaacggagacgcctatacccaccgtccgctgagtacccagacctgcggaaacacaataactgtatggcgtctcatctcacaccagcagtgtacgcgcgactgtgtgataaaaccactcccacggggtggacattggaccagtgcatccagacaggggtagataaccctggtcatccatttatcaaaaccgtcggcatggttgctggggacgaagagacctacgaggtgtttgccgacctgttcgaccccgtcatcagaggcctaagtctgcccccagcttgtaccagggccgagcgaagagaggtggagcgggtggtggtcgatgccctgagcgggttaaagggggacctggcggggagatactacagactgtcggagatgactgaggccgagcaacagcagctgattgacgaccattttctgtttgacaagccagtcagtcccttactcacagccgcggggatggcacgggactggcctgatgccagaggcatctggcataacaatgaaaaatccttcttaatttgggtgaacgaagaggaccacacccgcgttatttcaatggaaaaggggggaaacatgaagagggtgtttgaacgattttgcagggggctgaaggaagtcgtcgttggaatcaagtag

SEQ ID NO: 183934 - DNA, 1254 bp, synthetic construct
  misc_feature 1..1254: note = Description of Artificial Sequence: Synthetic coding sequence
  source 1..1254: mol_type = other DNA
atggccggccccttcagccggctgctgagcgcccggcccggcctgcgcctgctggccctcgccggagccgggagtttagccgcgggctttctgttacgccccgagcctgttcgggcagccagcgagcgccggaggctttaccccccttctgcagagtacccagacttgcggaaacacaacaattgtatggccagccacctcactcccgccgtgtatgctaggctctgtgacaagaccacacccacaggctggacattggaccagtgcattcagaccggcgtagataaccccgggcatccctttattaagacagtgggcatggtcgccggagacgaggagacttacgaggtctttgcagacctgtttgatcccgtcatccaagaaaggcataatggctacgatcccaggacaatgaagcatacaacagatttggacgcatctaagattagatctgggtattttgatgagcgatacgttctgagctcaagggtgagaaccggaaggagtattagaggtctcagtttacccccagcatgtacaagggctgaaaggcgcgaagttgagcgcgtcgtagtcgatgccttgtccggcctaaaaggggatctggccgggcggtattacagactgtccgagatgaccgaagccgaacagcagcagttaatcgatgaccactttttattcgacaaaccggtaagccctctgttaactgcagccggcatggcaagggattggccagacgcaagaggcatatggcataacaacgaaaaaagttttctaatctgggtgaacgaagaggatcatacacgagtgatttcaatggaaaaagggggcaatatgaaacgtgtattcgaacgtttctgtagagggctgaaggaagttgagaggctgattcaggaaaggggttgggagttcatgtggaacgagcggctggggtatatcttgacctgcccttcaaacttggggactgggctgagggctggcgtacatattaaacttccactgttgtccaaggattctcgatttccgaagatcctcgaaaacctgcggctgcagaagcggggtacagggggcgtagatacagctgccaccgggggtgtcttcgatatcagtaatctcgaccgcctgggaaagtccgaggtggaactggttcagcttgttatagacggggtaaactaccttatcgattgcgagcgacggctcgagagagggcaggacatccggatcccgacacccgtgatccacactaaacactag

SEQ ID NO: 183935 - DNA, 441 bp, synthetic construct
  misc_feature 1..441: note = Description of Artificial Sequence: Synthetic coding sequence
  source 1..441: mol_type = other DNA
atgcccgtgaaggtgcggaccggccggagcatccggggcctgagccttcccccagcgtgcactcgggccgagcgccgggaggtagagcgagttgtggtggacgctttatcaggcttgaaaggagatctagccgggcggtactataggttgtcggagatgactgaggcagagcaacagcagctcattgatgatcactttctgttcgataaaccggtgtctcccttgctgacggcggccggaatggctcgcgactggcccgacgcaagaggaatttggcataataacgaaaagtcgttcctcatctgggtgaatgaagaagatcatacacgggtcatctctatggaaaagggcggcaacatgaaacgcgtgttcgaacggttttgccggggactgaaggaagttagagaggattgcgtgggcgaactgggagggcgtacttag

SEQ ID NO: 183936 - DNA, 507 bp, synthetic construct
  misc_feature 1..507: note = Description of Artificial Sequence: Synthetic coding sequence
  source 1..507: mol_type = other DNA
atgaagcacaccaccgacctggacgccagcaagatccggagcggctacttcgacgagcggtacgtgctcagttcccgggttaggaccggccgtagcatccgcgggctcagtctcccaccggcctgcacacgggccgaacgcagggaagttgagcgggttgtggtggacgcactttcaggcctcaagggtgatctggctggacggtactaccggctcagtgaaatgactgaggcagaacagcaacaacttattgatgaccattttttattcgataagccagtgagcccacttctcaccgccgctgggatggctagggactggccagacgctcgaggcatctggcacaacaatgagaagagctttttaatttgggtgaacgaggaagaccacactcgtgtgatttctatggagaaaggcggcaacatgaaacgcgtgttcgaacggttttgcagaggtctaaaagaagttagggaggactacgtcggagagctggggggccggacctag

SEQ ID NO: 183937 - DNA, 312 bp, synthetic construct
  misc_feature 1..312: note = Description of Artificial Sequence: Synthetic coding sequence
  source 1..312: mol_type = other DNA
atggccggccccttcagccggctgctgagcgcccggcccggcctgaggcttctggcgctcgctggagccgggagcctggccgccggcttcctcttgcgcccggagcccgtgcgggccgcttcggagcgccgccgcctttaccccccttcagccgagtaccccgacctgcgtaagcacaacaactgtatggccagtcatctgaccccggccgtgtatgcgcggctgtgtgacaagacgactcccacgggatggacgctcgatcaatgcattcagaccggcgtggataacccgggacaccccttcattaagtag

SEQ ID NO: 183938 - DNA, 390 bp, synthetic construct
  misc_feature 1..390: note = Description of Artificial Sequence: Synthetic coding sequence
  source 1..390: mol_type = other DNA
atggccggccccttcagccggctgctgagcgcccggcccggcctgcgccttttagcactggccggcgcagggagcctcgccgccggatttctgttgcggccagagcccgtacgcgctgcgagcgagaggcggaggttgtaccccccctcagccgaatacccagacctccgcaagcacaataactgcatggcttcacacctcacacccgctgtctacgctaggctctgtgacaaaactaccccgacgggatggactcttgaccagtgtattcagacaggagtagacaaccccggccaccccttcatcaaaaccgtgggcatggtagctggagatgaagagacctacgaggtatttgctgacctgttcgatcccgtaatccaagaacgctag

SEQ ID NO: 183939 - DNA, 1017 bp, synthetic construct
  misc_feature 1..1017: note = Description of Artificial Sequence: Synthetic coding sequence
  source 1..1017: mol_type = other DNA
atggccggccccttcagccggctgctgagcgcccggcccggcctgcggttattagccctggcaggtgccggaagccttgccgcaggtttttgctctgacaggaatctctatgagctccccgtgaatgacggcggttgcatcccaagggagcagtcccagacatggcccaccgggcaacttcctggcaattgcacccgttcgaggagactgtgtccacccagcatggttaccggctacccgcttccatctgccgagtacccggatctccgcaagcataataattgtatggcatctcacctgacccctgccgtgtatgccaggttgtgcgataagacaaccccaaccggttggacccttgatcagtgcattcagaccggggtggataatcccggtcacccctttattaaaacagtgggcatggtggctggggacgaagagacctacgaggtatttgccgatctgttcgacccagtgatccaagagagacataatggatatgatccccgcaccatgaaacacaccaccgacctggatgcttcgaagatcaggagcgggtatttcgatgagcgctatgttttgtcctcgcgtgtaaggaccgggcgatccatacgcggactgtctctgccgccagcctgtaccagggccgaacgtcgcgaagttgaaagggtggtcgtggatgccctgtcaggactgaagggggacttggctgggaggtattacaggctgtccgagatgacagaggccgagcaacagcagttaatcgatgatcatttcctgtttgacaagccggtgtctcctttactgaccgcggctgggatggctagagattggccagacgcaaggggaatctggcacaacaacgagaagagcttcctgatctgggtgaatgaggaggaccatactagggtaatctcaatggagaaaggggggaatatgaagcgggtgttcgagaggttctgccgaggattgaaagaagtgcgcgaagactatgtcggagagctcggtgggagaacatag

SEQ ID NO: 183940 - DNA, 1254 bp, synthetic construct
  misc_feature 1..1254: note = Description of Artificial Sequence: Synthetic coding sequence
  source 1..1254: mol_type = other DNA
atggccggccccttcagccggctgctgagcgcccggcccggcctgcggcttctggcactggccggcgctggatctttggcagctggatttctgctgaggcctgagccagttcgcgccgcgagcgagcgacggcggctttatccccccagtgcagaataccctgatctgcggaaacacaacaattgtatggccagtcacctcacccccgctgtgtacgcccgcctttgcgacaaaacaacacctaccggctggaccctggatcaatgcatccagacaggcgttgacaatccggggcacccatttatcaagactgtcggaatggttgccggagacgaagagacctatgaggtcttcgccgatctattcgaccctgtcatccaggaacgccataacgggtacgacccccggacaatgaagcacacgactgacctcgacgctagcaaaatacgctccggatattttgatgagcggtacgtgctcagtagtcgcgtgcgcaccggtcgatccattagaggcctgtctctgcctcctgcgtgtactcgagccgaaagacgcgaagtggagcgagtggtagttgatgcccttagcggactcaagggagacctggctggccgatattaccggcttagcgaaatgacggaggcggagcaacagcagcttattgacgatcattttctgttcgacaagcctgtgagcccgctgcttacagctgcgggcatggcccgggactggcctgatgctcggggcatctggcacaacaatgaaaaatcttttttaatatgggttaacgaagaagatcacacccgcgtgatatccatggaaaaggggggtaacatgaagagagtgttcgaacgcttctgtaggggacttaaagaggtggaaaggcttatccaagaacgaggctgggagttcatgtggaatgagcgtctcgggtatattctgacatgcccaagcaacctggggactgggctgcgcgcaggagttcacattaagttgccgcttttaagtaaggactcccgatttcctaaaattctagaaaacctccggttacaaaagaggggtaccgggggtgttgataccgctgccactggcggggtgttcgatatttctaacctggacaggctcggaaagtccgaggtcgagctcgtccagcttgtcatcgacggtgtcaactatctgatcgactgcgagaggaggttggagcgtgggcaggacattcgtatccctaccccagtgatccatacaaaacactag

SEQ ID NO: 183941 - DNA, 774 bp, synthetic construct
  misc_feature 1..774: note = Description of Artificial Sequence: Synthetic coding sequence
  source 1..774: mol_type = other DNA
atggtgaccggctaccccctgcccagcgccgagtaccccgacctgaggaaacacaataattgtatggctagccatctcacgcctgccgtctatgccaggctgtgtgataagactacgccaactggttggacactcgaccagtgtatacaaacgggtgtggacaatcccgggcacccctttattaagacggtgggtatggttgctggagatgaagaaacatacgaagtgtttgccgacctctttgaccctgtcatccaggagcggcacaacggatacgatcccaggacaatgaaacacaccacagatctggatgcttccaagatcagatcaggctacttcgatgagcggtatgtgttgagcagccgagttcggacaggtcgcagcattaggggcctttcactgccgcccgcttgtactagagcagagagacgagaagtcgagagggtcgtcgtggacgccctaagtgggctcaagggggacctcgcgggaagatactatcgcctgagtgaaatgaccgaggcagaacaacagcaacttattgatgatcacttcctgtttgacaaacccgtctccccccttttgaccgctgctggcatggctagagactggcccgatgcgcggggaatatggcacaacaacgaaaaatctttcctgatctgggttaacgaggaggatcacacaagggtcatatcaatggaaaaggggggaaatatgaagcgcgtcttcgagagattctgcagaggactgaaggaagtcgttgtggggatcaaatag

SEQ ID NO: 183942 - DNA, 726 bp, synthetic construct
  misc_feature 1..726: note = Description of Artificial Sequence: Synthetic coding sequence
  source 1..726: mol_type = other DNA
atggccggccccttcagccggctgctgagcgcccggcccggcctgcgcttgcttgcactcgcaggggctgggtcgctggccgctggatttctgctgagacccgaacccgtccgagccgccagcgagcgccggcgcctgtacccaccatccgcggaataccccgacctccgcaaacacaataattgcatggcaagtcacctgacaccagcagtctatgccaggttgtgcgacaagaccaccccaacagggtggaccctggaccagtgtatacagaccggagtcgataatccaggtcatcccttcataaaaactgtcggcatggtggctggtgatgaagagacttacgaagtattcgctgacctgtttgatcccgtaatccaggagaggcataacggatacgacccccggaccatgaaacatacaacggatttagacgccagcaagatacgctctggctatttcgatgagaggtatgtgttgtcgagtcgggtgcgcactggtagaagtattagggggctgtccctgccgcctgcatgtacaagggctgagaggcgggaggtggaacgagttgtagtcgacgcgctttctggcttaaagggagacttggctgggcggtattacaggttgagtgagatgacagaggccgaacagcagcagttaattgatgaccacttcctgttcgacaagccggtttcccctttgctgactgcggcagggatggcatag

SEQ ID NO: 183943 - DNA, 1260 bp, synthetic construct
  misc_feature 1..1260: note = Description of Artificial Sequence: Synthetic coding sequence
  source 1..1260: mol_type = other DNA
atggccagcatcttcagcaagctgctgaccggccggaacgccagcctgctgttcgctacaatggggacctccgtcctgacaacagggtatttgcttaacagacagaaggtttgcgccgaggtgagggagcagcctaggctttttcctccatccgctgactaccctgatctgaggaagcacaacaactgcatggcagaatgcctgacacctgctatttacgcaaaactgcgcaataaggttactcctaacggctatactcttgatcagtgcatacagaccggagtcgacaatcctggacatcccttcattaaaacggttggcatggtcgccggcgacgaagaaagctacgaggttttcgccgacctcttcgaccccgtcatcaagctccggcataacggctatgatccaagagttatgaagcatacaaccgacctcgatgcttcaaagatcacacaagggcaatttgatgagcactatgtgctgagttctagggtcagaaccggaaggagtatccgcgggctgtctcttcccccagcctgcactcgagccgagaggagagaagtggaaaatgtggccattaccgctcttgaggggctgaagggtgacctggcagggcgttattacaagctttcggaaatgacggagcaggaccagcagagactgattgacgaccacttcctctttgataagccggtcagtccactgttgacctgtgcaggaatggcccgggattggccagacgccaggggaatttggcacaattatgacaagaccttcctgatatggataaacgaagaagatcacacccgggtcatttcaatggagaaagggggcaacatgaagagagtgtttgaaaggttctgccgtggtttgaaggaagtggaacggctgatccaggagagggggtgggagtttatgtggaacgaacggctcggttatatcctgacttgcccatcaaatcttggcacgggactcagagcgggggtgcacgtcaggatccccaaactgagcaaagatccccgatttagtaaaatccttgagaatttaaggctacaaaagagagggacaggcggcgtcgacactgccgccgtggcagacgtttacgacatttccaatatcgataggattggtaggtctgaggtggagctggtgcagattgtcattgacggagtaaattacctcgtcgattgcgagaagaagcttgagcggggtcaggacataaaagtgcctccgccccttccccagttcgggaagaaatag

SEQ ID NO: 183944 - DNA, 1260 bp, synthetic construct
  misc_feature 1..1260: note = Description of Artificial Sequence: Synthetic coding sequence
  source 1..1260: mol_type = other DNA
atggccagcatcttcagcaagctgctgaccggccggaacgccagcttgctttttgccaccatgggtacttccgtgctgaccaccggatacttgcttaacagacagaaagtctgcgccgaggtgcgcgaacaaccaaggctgttcccaccctccgcagattatcctgatttgcgcaaacacaacaactgcatggcagaatgtctgacaccagcaatctacgcaaagctccgaaacaaggttactccaaatggctacaccctagatcagtgtattcagaccggtgtggacaatcccgggcacccatttatcaaaaccgtcggaatggtggctggggacgaggaaagctacgaggtgtttgcagacctctttgaccccgtcatcaaactacgccacaatggttatgatcctcgagtcatgaaacacacaactgacttggacgccagcaaaatcacccagggacagttcgacgagcactatgtgctgagttcgagggtacgcacaggccggtcgatacgcgggctgtcactgcccccggcttgcaccagagccgagcgacgcgaagtggagaacgtcgccataaccgccctcgagggcttaaagggagacctggctggcagatactataagttatcagaaatgaccgaacaagaccagcagagattaattgacgatcacttccttttcgataaacctgtgtccccactgttgacatgcgctgggatggctcgggactggccagacgctcgcggaatctggcataattatgataagacctttctgatctggatcaacgaagaggatcatacaagggtcattagcatggagaagggtgggaatatgaaacgcgtgttcgagcgcttttgtcgggggctgaaggaagtcgaacggctgatccaggaacgtggttgggaattcatgtggaatgaacggctcggctatatactcacatgtccctcaaatttgggaacagggttgcgcgcaggcgttcatgtacggatccctaaactttcgaaagatccacggttctcaaaaatcctggaaaatctcagactgcagaaacgtgggaccgggggcgtggatactgctgcagtggctgacgtatacgacattagcaatatcgatagaatcggcaggtctgaagtggaacttgtacagatcgtcattgacggcgttaattacttagtagactgcgagaaaaagctcgagcggggacaagatattaaagtccccccccctctaccgcagttcggaaagaagtag

SEQ ID NO: 183945 - DNA, 1260 bp, synthetic construct
  misc_feature 1..1260: note = Description of Artificial Sequence: Synthetic coding sequence
  source 1..1260: mol_type = other DNA
atggccagcatcttcagcaagctgctgaccggccggaacgccagcctccttttcgccacaatgggaacaagcgttttaacaacaggatacctgctgaatcgccaaaaagtgtgtgcagaggtgcgcgagcagccacgactgttccctccaagcgccgactacccggatttacgcaagcacaacaattgcatggcagaatgcctcacacccgcgatatatgccaagctgcgcaataaggtgacccctaatggatacactttggaccagtgtattcagaccggggtggacaatcctgggcatccatttattaagacagtgggcatggtggccggggacgaggaatcatatgaagtgttcgccgacctgttcgatcccgtgataaaactgaggcacaacggctacgatcctagagtgatgaaacataccactgacctcgatgcctccaagatcacccagggccagttcgacgaacattacgtcctgagctctcgcgtgcgtacaggcaggtccatccgcggcctgtcgctgccccccgcctgtactcgcgccgagcgacgagaagtggaaaatgtcgctatcacggcccttgaagggctgaaaggggacctcgccgggaggtactataaactgagcgagatgaccgaacaggatcagcagaggttgatcgacgatcactttctgttcgacaagccagtttcaccgctgctcacgtgcgccggcatggccagggactggccagacgctcgcgggatttggcacaattacgataagaccttcttgatatggatcaatgaggaggaccatacaagagtcatctctatggaaaaggggggcaacatgaaaagggtgttcgagagattctgtaggggcctaaaggaagtggagcgcttgattcaagaacgcgggtgggaattcatgtggaatgagcggcttggctatatcctgacatgcccatccaaccttggtaccggtttacgagccggcgtgcatgtcagaattcccaaactgagcaaggatccgcgatttagtaaaatcttggagaatctcaggctgcagaaacgcgggaccggtggggtggatacagccgccgtcgctgacgtgtacgacatcagcaacatcgacaggattggtaggagcgaagtggagctagtccaaatcgtgattgacggcgtgaactatctcgtcgactgcgaaaagaaacttgagcgagggcaagatattaaggtccctcctcctctgccacagtttgggaaaaaatag

SEQ ID NO: 183946 - DNA, 513 bp, synthetic construct
  misc_feature 1..513: note = Description of Artificial Sequence: Synthetic coding sequence
  source 1..513: mol_type = other DNA
atggccagcatcttcagcaagctgctgaccggccggaacgccagcctcctcttcgcaaccatgggcacatctgtcctcactaccgggtacctccttaacagacaaaaggtgtgtgccgaagtcagagaacagccacggctgttccctccttcagccgactaccccgatctacgtaagcacaacaattgcatggccgagtgtttaaccccagccatttatgccaagttgcggaataaagtgacaccgaatggttacacactggaccagtgcattcaaaccggcgttgacaatccaggccatcctttcattaaaacggtcgggatggtggccggggacgaagaatcctatgaagtgttcgctgacttattcgacccagtcatcaaacttaggcataatggatacgatccacgtgtgatgaaacacacaactgaccttgacgcctccaaaatcacccagggtcagttcgacgaacattacgtcctgagttcccgggtgcgcactggcagatcctag

SEQ ID NO: 183947 - DNA, 1098 bp, synthetic construct
  misc_feature 1..1098: note = Description of Artificial Sequence: Synthetic coding sequence
  source 1..1098: mol_type = other DNA
atgggcgtgccccggccccagccctgggccctgggcctgctgctgttcttgctcccaggcagtttgggcgccgaatctcacctgtctttactttatcacctgacagcggtgtcaagcccggcccccggtacccccgctttttgggtgtcaggttggctgggacctcagcaatacctctcgtataattctttgaggggcgaggctgagccgtgtggagcttgggtctgggaaaaccaagtgagctggtactgggaaaaagagacaacggatctccgcataaaggaaaaactttttcttgaagcttttaaagctctgggaggcaagggtccatacacgcttcagggactgcttgggtgcgaactgggtccggacaacacttctgtacctacagccaaattcgccttgaatggcgaagagttcatgaactttgatttaaaacagggaacctggggcggagactggcccgaagcgctggctatctcccagcgctggcaacagcaggacaaagccgcaaataaggagttgacattcttgctgttttcctgccctcatagactgcgcgagcacttggagcgagggagaggaaacctcgagtggaaggaacctccatctatgcgcctgaaagcccgcccctcctcgcctgggtttagtgtgctgacctgtagcgccttctcgttctaccccccagaattacagctgaggtttctgaggaatgggctcgccgctggcaccggtcagggggattttggaccgaattctgacggctcctttcacgcctcttcgtctctgacggtcaagtctggcgatgaacaccactactgctgtatagtgcaacatgccggcttagcccagcctctccgggttgagcttgaatccccggccaaaagcagtgtcctagtggttgggatcgtgattggtgtcctgctgcttaccgctgccgccgtggggggagccctcttatggcgccggatgagaagtggcctgcccgcgccttggatttctttgcggggcgatgacaccggcgtgttgctccccactcccggagaggcccaggatgccgacttgaaggacgtgaatgttatcccagctaccgcatag

SEQ ID NO: 183948 - DNA, 7329 bp, synthetic construct
  misc_feature 1..7329: note = Description of Artificial Sequence: Synthetic coding sequence
  source 1..7329: mol_type = other DNA
atggccgagaacctgctggacggcccccccaaccccaagcgggccaaactaagctctcccggcttctcagccaacgatagcaccgactttgggtcgctttttgacctggagaatgatctacctgatgaactaatacctaacggtggcgaactgggcctgctcaattccggtaatctggtacccgacgccgcctccaagcataagcagctgtctgagctgttacgaggcggaagtggatcctctatcaaccctggcattgggaacgttagcgccagcagccctgtgcagcagggcctgggaggacaggctcagggtcagcccaactccgcgaacatggcgtcactgagcgctatgggaaaaagcccgctatcccaaggagatagcagcgccccgtcactgcctaaacaagctgccagcacgagtggaccaactccggccgcctctcaagcactcaacccccaggcccaaaagcaggtcgggctcgccacttcatcacccgccacaagccagactgggcccgggatttgcatgaacgctaatttcaaccagacccacccaggcctcctcaacagcaatagcggacactcgctcattaatcaagcaagccaggggcaagcccaggtaatgaacggttcactgggggccgctggtcggggccgtggcgccggcatgccctaccctacacctgctatgcagggcgccagctctagcgtcttggctgaaactcttacccaggtgtctccacagatgaccggtcatgcaggcctgaacacggcgcaggccgggggcatggcaaagatgggcattaccggaaacactagtccattcggacagcccttctctcaggccggtggacaacccatgggggcgaccggggtgaaccctcaattagcctctaagcagagtatggtcaactcactgccaacttttccaacagacataaagaacaccagcgtgaccaacgttccaaacatgtcccagatgcagacctcggtaggaatcgttccaactcaggctatcgctactgggccaaccgccgatcctgagaagcgcaaactgattcaacagcagttagtgctgctcctgcacgctcacaaatgtcagagacgcgagcaggctaatggcgaagtaagagcttgttctctcccccattgccgcactatgaagaacgtcttaaatcatatgacacactgtcaggcaggaaaggcttgtcaggtcgctcattgcgcgagtagcaggcaaatcatttcacactggaaaaattgtactcggcacgactgtccagtgtgtttacctcttaagaacgcatccgataagcggaaccagcaaaccatacttggctcacccgcaagtggaattcagaacacgattgggtcagtgggcaccggccagcagaacgcaacctctttgagcaatccaaacccaatcgacccaagttccatgcagcgcgcatacgccgccctcggattgccctacatgaaccagccccagacacagctgcagcctcaggtacccgggcagcaacctgcacagcctcaaacccaccagcagatgagaactttgaacccactgggaaataaccctatgaacatacctgccgggggcataacaacagaccaacaaccacccaacctgatcagcgagagcgcgctgccaacatctctgggagcaacaaacccactgatgaatgacggctccaacagtggcaatatcgggacattatctactattcctactgcggcaccaccttcttcgaccggggtgcgaaagggttggcatgaacacgtcacacaggacctgcgatctcacttggtgcacaaactagtccaggctattttccccacccctgacccagcagcactgaaggatcgccgaatggaaaatcttgtcgcatatgcaaaaaaggttgagggcgacatgtacgaatcggcaaactctcgcgacgagtactatcatctgctcgcagagaagatctacaaaatccaaaaagaattggaagagaagcgccggtccaggctccacaaacagggcatcctcggcaatcagccagctctgccagcccccggtgctcagcccccggtgatccctcaagcgcaacctgtaaggcctcccaatgggcccctgagtttaccagtaaaccgcatgcaggtgtctcaggggatgaactctttcaatccaatgtcgctaggcaacgtccagttaccccaggcgcccatggggcctagagctgcttccccaatgaatcactccgttcaaatgaattccatgggaagcgtcccaggcatggccattagcccttcccgcatgcctcagcctccaaatatgatgggcgctcacacaaacaacatgatggctcaggctcctgctcaatctcaattccttcctcagaaccaattcccttcctcaagcggagcaatgagcgttgggatgggccaaccacctgctcaaacaggggtgtctcaggggcaagtgccaggagctgccctgccaaacccgttgaacatgctaggccctcaggcctcccagttgccttgtccccctgtcacccagagcccgcttcatccaacaccccctccagcctcaaccgccgccggcatgccctcactccagcacaccaccccaccgggaatgactcctccccagcccgctgccccgacacagcccagcactccggtgagtagttccggccagacgcccactccgacaccaggatcagtgccaagcgccacccagacccagtcaacaccgaccgtgcaggcagccgcccaggctcaggtgacgccccaaccccaaaccccagtgcaacccccctctgtcgccacgccacaatcttcacaacagcagcccacccccgttcatgcccagccccctggaacccctttgtctcaagctgctgcgtctatcgataatcgggtcccaaccccatcatctgtggcgtctgctgagactaattctcaacagcctggcccagacgtgccagtgctagagatgaaaacagaaacacaggctgaagacactgagcccgatcccggcgaaagcaagggtgaacccaggtccgagatgatggaagaggatctgcagggagccagccaggttaaagaagagacggatatcgccgaacagaaaagtgaacccatggaagttgacgaaaaaaagcccgaagttaaagtagaggtaaaggaagaggaggaatcatccagcaacggtacagctagccaatctactagccccagtcagccacggaagaagatattcaagccagaagagttgcggcaagcactgatgcccaccttggaagccctctatcggcaggatcccgaaagtctgccctttcgacaacctgtggacccacagctcctcgggatcccggactattttgacattgtgaaaaatccaatggacctctctaccataaaaagaaaactcgatactggacagtaccaagaaccatggcaatacgttgacgacgtgtggttgatgttcaataatgcctggctttacaaccggaaaaccagtagggtatataaattctgttccaagttggcagaggttttcgaacaggaaatcgacccagttatgcagagtctgggttattgttgcgggaggaaatatgagttcagcccacagaccctctgttgctacgggaagcagttgtgcactattcctagagatgctgcctattactcttatcagaaccgttatcacttttgtgagaaatgttttacagagatccagggagaaaatgttacccttggcgacgacccctctcagccgcagactaccatatcgaaggatcagtttgagaaaaaaaaaaacgatactcttgatcctgaacctttcgtcgactgcaaagaatgcggtcgcaagatgcaccagatctgcgttctgcactatgatattatttggccctccggatttgtctgtgacaactgcctgaagaagaccggtcgccctaggaaggagaataaattcagcgccaaacggctgcaaaccacgcgcctggggaaccatttggaggatcgcgtgaacaagttcctgcggagacaaaatcatcccgaagctggtgaagtatttgtgcgggtggtggctagtagcgataaaacggtggaggttaagccagggatgaaatcgagatttgttgactcgggagaaatgagcgagagttttccgtatagaacgaaggcactctttgcgttcgaagagattgacggcgtggatgtgtgttttttcgggatgcacgtgcaggaatatggcagtgactgcccccctcctaataccagacgggtttacatctcgtatctggacagcattcacttcttccgacctagatgcttacgcacagccgtgtaccacgaaatactgatcggataccttgagtacgtgaaaaaactgggatatgtaacaggtcacatctgggcatgccccccgtccgagggggatgattacatattccactgtcatcccccagatcagaagattcctaaacccaagaggctgcaggagtggtacaagaaaatgctggacaaagcattcgctgagaggatcatccacgattacaaagatattttcaagcaggcgacagaggatcggctgacgtccgcaaaggagctcccctacttcgaaggtgatttctggcccaacgtcctggaggaatcaatcaaggagctggagcaagaagaggaggagagaaagaaggaggagtccacagcagcatcagaaaccaccgagggctctcagggggactctaaaaatgctaagaagaagaataataagaaaacaaataaaaataaatctagcatttctcgagcgaataaaaaaaagccatcaatgcctaatgtttctaacgacttgtctcagaaattgtacgctaccatggagaaacataaggaggtattttttgtgattcacctccatgctggacctgtaataaatactctgcctcctattgttgatcctgatcccttactgtcttgtgacctaatggatggccgggatgcctttctgacgctggcaagggataaacactgggagttcagctcactgcgaagaagcaagtggtccaccttgtgcatgttggtcgaactccacactcagggccaggatcgcttcgtctacacatgcaatgagtgcaagcatcacgtcgagacacgctggcattgcactgtctgcgaagattacgatctctgcatcaactgttataatactaagtcccacgcccacaagatggtaaagtggggactggggttggacgatgaaggcagttcacagggcgaaccacagtccaaatctccgcaagaatcaagaaggctcagtatccagcggtgcatacagagtctggtacacgcttgtcagtgtcgcaacgccaattgttctctgccctcgtgccagaaaatgaaacgggtggtccagcacaccaagggctgcaagagaaagacgaatggcggttgcccagtgtgtaagcagctcatcgcactgtgctgctatcatgccaagcattgtcaagaaaacaaatgtccagtgcctttttgtctaaatatcaaacacaagctgaggcagcagcagatccaacaccggctgcaacaagctcagctgatgcggcgtaggatggctaccatgaacacccgaaatgtgccccagcagagcctcccaagcccgactagtgcgcccccaggcaccccgactcagcagccctctacaccacagaccccccagccacccgcacagcctcagcctagtcctgtgtcaatgtcacctgcaggctttccctccgtcgcacgcacacagccacctacaactgtgagcacagggaaacccacgtctcaggtcccagccccaccacccccggcccaacctcctcccgccgcggtcgaagctgccaggcaaatcgaacgagaagcccaacaacagcagcatctctatagggtcaatataaacaactcgatgcctcctggaaggacaggtatgggcacaccggggtctcagatggcccccgtatccttgaatgtccctcggcccaaccaggtgtctggacccgttatgccatctatgccgcccggccaatggcagcaagcgcccctaccccagcagcaacccatgcctggcctgcctcggccagttattagcatgcaggcccaggccgctgtcgctggccctaggatgccaagcgttcagcccccaagaagcataagtccctccgccttacaggatctgttgagaacccttaagagcccctctagcccccagcagcagcagcaagttctaaatatactaaagagcaatcctcagctgatggccgcctttatcaaacagcgaacagccaagtatgtagctaaccagcccgggatgcaaccccagcctggcctgcagagccagccaggcatgcagccacagcctgggatgcatcagcagccgtcactgcaaaatctcaatgccatgcaggctggtgtgccacgacccggggtccccccgcaacaacaggctatgggcggcctgaatccgcagggacaagccctgaatatcatgaaccctggccacaatccaaacatggcttctatgaacccccagtatcgcgaaatgctccggaggcaactgctgcaacagcagcagcagcagcagcagcagcagcagcagcagcagcagcaacaacaagggtccgccggaatggccggcggcatggccgggcatggccaattccagcaacctcagggtccaggcggatacccacccgcgatgcagcagcaacagagaatgcaacagcatctgccgctacagggttcttctatggggcaaatggcagctcagatgggtcaactgggtcagatgggccagcctgggctgggtgcagactccacaccgaacatacagcaggcgttgcagcagcgaatcctccagcagcagcaaatgaaacagcagataggttccccggggcaacctaaccccatgagtcctcagcagcacatgctgtccggacaaccgcaggcctcacacctgccgggccagcagattgcaacctctttgtcaaaccaagtccggagccctgccccagtgcagtctccccgccctcagtcgcagcccccacactccagcccatctccgaggattcagccacagcccagtcctcaccacgtatcaccacaaaccggatcgcctcatccaggcttggctgtgactatggcttcgagtattgatcaaggtcatcttggaaatcccgaacaatctgcaatgttgccccagctcaacacgccaagccgaagcgcactgtccagcgaactgagcttggtcggagatacgacaggggacactcttgaaaagtttgtggaaggactttag

SEQ ID NO: 183949 - DNA, 2934 bp, synthetic construct
  misc_feature 1..2934: note = Description of Artificial Sequence: Synthetic coding sequence
  source 1..2934: mol_type = other DNA
atgcacgtgcaggagtacggcagcgactgccccccccccaacaccaggagggtatacatatcttacttggacagcatacattttttccggcctaggtgtctgagaacggctgtctatcacgagatccttattgggtacctcgagtatgttaagaagcttggctatgtgacaggacacatctgggcatgtcccccctctgagggagatgattacatttttcactgccaccctcctgatcagaagattcccaagcctaagagactgcaggaatggtacaagaagatgctggacaaggcattcgccgaacgaattatccatgactacaaggatatctttaagcaggctactgaggataggttgacatctgcgaaggagctcccgtattttgaaggggacttctggcccaacgttcttgaagagtcaataaaggagttagaacaagaggaggaggagaggaaaaaggaggagtccacagcagcttcagagacaactgaggtcttcttcgtcattcacctgcatgctggtccggtcattaacactttgccccccattgtggatcctgaccctctcctatcctgtgacctgatggacgggcgcgatgctttccttacgttggccagggataagcattgggagttttcttccctccgccggagtaaatggtccaccctgtgcatgctggttgaacttcatacacagggtcaggaccgctttgtgtatacgtgtaatgagtgcaaacaccacgttgaaaccaggtggcactgtactgtctgtgaagattatgatctgtgtattaattgctacaataccaaatcccacgcccataaaatggtgaaatggggcctgggtctcgacgatgagggtagcagccaaggagaaccacagtctaaatctccccaagagtccaggagactgagcatccaaagatgtatacaaagcctggtgcacgcctgccaatgccgaaacgccaattgctctctaccttcctgtcagaaaatgaagagggtggtccagcataccaaaggttgtaagaggaagaccaatggtggatgtccagtgtgcaagcagctgattgcgctatgctgttaccatgctaagcactgccaggagaacaaatgccctgtgccattctgcctcaacattaagcataagttgcgccagcaacagatccaacacagactgcaacaggctcagctgatgaggaggaggatggccactatgaatacccgcaatgtacctcagcagtccctgcctagtcccaccagcgccccgcccgggactcccacacaacagccctctacgccccagacaccacagcctcccgcccagcctcaaccctcgccagttagcatgtctcccgcggggtttcctagtgtggctagaacacagccacctactacggtctccaccggtaaacccaccagtcaggtgccagcccctccccctccagcacagccgccccctgccgctgtcgaagctgcgaggcagattgagagggaggcccagcagcaacaacacctgtatagggttaatattaataattctatgccacctgggcgcaccggtatggggacacccgggtctcagatggctccagtgtctctcaacgtgcctcgcccaaatcaggtgtctgggccagtgatgccctccatgccgcccggccagtggcagcaagctcccttgccccagcagcagccgatgcccggcttaccacgtcctgtgattagcatgcaggctcaagcggcagtggccggaccacgcatgccttctgtgcagcccccacggtcaatcagccccagtgccctacaggaccttctgcggaccctcaaatccccttcgtccccgcagcaacagcaacaggtgctgaatatactgaaaagcaatcctcaacttatggccgctttcattaaacagaggactgccaagtatgtggccaatcaacctggaatgcagccacagcctgggctgcaatctcagccggggatgcaacctcagccaggcatgcaccagcaaccaagtttacaaaatctgaatgcaatgcaggccggcgtgccaaggcccggcgtccccccccagcagcaggccatgggaggcctcaacccacaagggcaagcactgaacattatgaacccggggcataacccgaatatggcttccatgaacccacaataccgtgaaatgctgagaagacagctgttgcagcagcagcaacagcagcaacagcaacagcagcaacagcagcaacagcagcagggctcagcaggaatggcagggggcatggccggtcatggccaatttcagcagccccagggtcccgggggctacccacccgcaatgcagcaacagcagagaatgcagcagcacctgcctttgcagggttctagcatgggccagatggctgcccaaatgggccagcttggtcagatgggacaaccagggttaggggctgactctactccaaacatacagcaagctctccagcagcggattttgcaacagcagcagatgaagcagcagattggttccccgggtcagcccaaccccatgtcaccacagcagcacatgctctctggccagcctcaggcctctcatctgcctggccaacaaatcgccacatcgttatccaatcaggtgcggagtcccgcccccgtgcagtctccacgcccccagtctcagcccccccactccagcccgagtccccgaatccaaccacagcccagcccccaccacgtgtctcctcaaacagggagcccacaccctggtttagcagtgacaatggcttcatcaattgatcaggggcatctgggcaacccagagcagtccgctatgcttccccagctcaacaccccatcaaggtccgctctgtcttctgagcttagcctggtgggagacaccacgggagatacgttggagaagttcgtcgagggactttag

SEQ ID NO: 183950 - DNA, 7215 bp, synthetic construct
  misc_feature 1..7215: note = Description of Artificial Sequence: Synthetic coding sequence
  source 1..7215: mol_type = other DNA
atggccgagaacctgctggacggcccccccaaccccaagcgggccaagctttctagccctgggttctccgccaacgatagcacagacttcggatccctgttcgacctggagaacgatctcccagatgagctcattcccaacggaggtgaattaggtctgctgaactccggtaacctggtgcctgacgccgccagtaaacataaacaactgtcagaactcctcaggggcgggtcaggctcttctataaatcccggcattggtaatgtcagcgcctcatcccccgttcaacagggtctcgggggtcaggcacagggccaacctaatagcgccaatatggccagtctgtcagctatggggaagagtccccttagccagggcgattcttccgccccctcattacccaagcaagctgcctcaaccagtggacccactccggcggcatcacaggctctgaaccctcaggcccagaaacaagtaggcctcgctactagctctcctgctacgagccagaccggcccgggcatttgtatgaatgcgaacttcaatcaaactcacccgggtcttcttaatagtaattcagggcactccttgatcaatcaggcttcacagggacaagcacaagtcatgaatggctcgttaggcgcagctgggaggggtcgcggcgcaggtatgccctaccctactcctgccatgcaaggtgcttcctcttcagtcttggctgaaacacttacccaagtttccccccagatgacaggacacgctggactgaacaccgcacaggcaggaggaatggctaagatggggatcacagggaataccagcccttttgggcagccattctcccaggcgggcggccagcctatgggagccacgggtgtgaatccccaactggcgtctaagcagagtatggtaaacagtcttccaaccttcccaacagacatcaaaaataccagtgtcactaatgtcccaaatatgagccaaatgcagaccagcgtgggaatcgtgccaacgcaggccattgcaactggccctaccgccgatcctgagaagcgaaaactgatccagcagcaactggtcctgctccttcatgcacataaatgccagcggagggaacaggcaaacggagaggtgcgcgcttgtagcctgccacattgcaggacgatgaagaacgtgctcaaccacatgacacactgccaggctgggaaggcctgtcaagctatattaggatccccagcgagcggaatccagaataccatcggaagcgtcggcaccggccagcagaacgcaaccagcctgagcaatcctaatcctatcgacccaagcagtatgcagcgggcatacgcagcccttggtttgccatacatgaatcagccccagacacagctccagcctcaggtccccggtcaacagcccgcacagccacagacacaccagcagatgagaactttaaacccactgggcaacaacccaatgaatattcccgctggcgggattaccacagaccagcagcctcctaacctgatcagcgagtcagccttgccaacctcgctcggggcaacgaacccgctgatgaacgatggttctaactccggcaatatagggaccctgtccacgatcccaacagcggctccaccaagctctaccggcgtgaggaagggctggcatgagcatgtgactcaggatctcagatctcacctcgtgcataaactggtacaggctatttttcctactcccgacccagcggctctaaaagataggagaatggagaatctcgtcgcctatgccaaaaaagtggagggcgatatgtatgaatcggccaactccagagatgaatactaccatcttttggccgagaaaatatataagatacaaaaggaactggaagagaagaggaggtcacggctgcacaaacagggcattctcggaaatcaacctgctctgccagctcctggcgcccagccccctgtgataccccaggcccagcccgtacgacctccaaacggacccctgtccctacccgtgaataggatgcaggtctcccagggaatgaatagcttcaaccccatgtccctggggaacgtacaattgccacaagctccgatgggacctagagcggccagtcctatgaaccactccgtacagatgaacagtatgggttctgtgcctggaatggctatcagcccttcaaggatgcctcagccccctaacatgatgggggcccacacaaataatatgatggcccaagcgcccgcacaatcccagtttctgcctcagaaccagtttccatcttccagcggcgccatgtcagttgggatgggacaaccacccgcccagaccggagttagccagggccaggtgccaggagcagccctgcctaacccccttaacatgctcggtccccaagcatcgcagctgccctgcccccctgttactcagagcccattgcaccccactccacctccggctagtaccgcagccgggatgcctagcttgcagcacaccacaccacctggcatgacaccgcctcagcctgcagcccctactcagccttcgacccctgttagctcttccgggcagacgcccacccctacacccgggagcgttcccagtgcaactcagacccaatccactccgaccgtgcaggctgctgcccaggcccaggtaactccacagcctcagacaccagtgcaaccaccctccgtggcgaccccacagagctcacagcagcagccaacccctgttcacgctcagccacccggcacacccctgtctcaggccgctgcttctattgataatagagtgcctacgccttcctctgtggcaagtgcagaaacgaattctcagcagcccggacctgatgtgcccgttctcgagatgaaaactgagacccaggccgaggataccgaacccgacccgggcgagtcaaaaggagagcctcggagcgaaatgatggaggaggaccttcagggcgctagtcaggtaaaggaggaaactgatattgctgagcaaaaatccgaacccatggaagttgatgagaaaaagccggaggttaaggtggaagttaaagaggaggaggaatcctctagtaatggaaccgccagtcagagcacaagtccatcacagcccaggaagaaaatctttaagccagaggagctccgtcaggccttgatgcctaccttggaagctttatatcgccaggacccagaatccctgccgtttagacaaccagttgatccccaactcctcgggattccggactattttgacattgtcaagaatccaatggacctgtctacaataaaacgtaaactcgacacgggacagtatcaggagccttggcagtatgtggacgacgtgtggttgatgtttaacaatgcctggctgtataatagaaaaactagccgcgtgtacaagttttgtagtaagctcgccgaagtcttcgagcaggagattgacccagtcatgcagagtttgggctactgctgtggacggaagtatgagttcagcccacagaccttgtgctgctacggaaagcaattgtgtacaatcccccgcgatgctgcctattattcttaccagaacagatatcatttctgtgagaagtgtttcacagaaattcagggcgagaatgtgactctgggcgacgatccctctcagccacagacaacaattagcaaggatcagtttgaaaaaaaaaagaacgatactctggaccccgagccattcgtggattgcaaagagtgtggcagaaaaatgcaccagatctgtgtactgcactacgacatcatatggcccagtggattcgtgtgtgacaactgtttaaaaaagactggccgaccccgaaaagagaacaaattttcggctaaacgactgcagactacccgcctcggtaaccatctggaagaccgtgtgaataaattcttacggcgacagaatcatccggaggctggggaggtgttcgtgcgtgtggttgcctcaagtgacaaaaccgtggaggttaagcctggaatgaagagtagattcgtggactctggagaaatgtccgagagctttccatatcggaccaaagctctctttgcctttgaagaaatcgacggcgtggacgtctgtttctttggcatgcacgtgcaggaatacggtagcgattgcccccctccaaacaccaggcgggtttacatcagctacttggacagcattcacttttttcggcctcgctgtctgaggacggctgtgtaccacgaaattctgattggatatcttgagtacgttaagaaactgggctacgtcacaggtcacatttgggcatgtcccccaagcgagggggacgattacatcttccactgtcatcctcctgaccagaaaatacccaagccgaagcgacttcaggagtggtacaaaaagatgctcgacaaagcattcgcagagaggattatccacgactataaagacattttcaaacaagctaccgaagaccgccttacttctgccaaagagctgccttacttcgagggcgatttctggcctaatgtgctggaagaatcgatcaaagaattggagcaagaagaagaagaaagaaaaaaagaagagagcaccgcggcaagcgaaactaccgaagggtcccaaggggactcaaaaaacgctaaaaagaaaaataataaaaaaacaaacaaaaataaatcctccatttcccgggccaataaaaagaaaccctctatgcctaacgtcagcaacgatctgtcgcagaagctctacgctacaatggaaaaacacaaggaggtgttctttgtgattcacctccatgcggggcccgttatcaatacactcccaccaatcgtggatccagatcctctactgagttgtgatctgatggacggacgggacgctttccttactctagcacgagataaacactgggaattttcttccctgagacgaagcaagtggagcactctgtgtatgcttgtcgagctgcatacgcaagggcaggacagattcgtatacacttgtaacgagtgcaaacatcacgtggaaacacgatggcactgtactgtatgcgaggattacgatctgtgcatcaattgctataacaccaaatcccatgcgcataaaatggtcaagtggggactggggctcgacgacgagggttcttcgcagggcgaaccccaatccaagtccccacaggaatcaagacggctgtccatacagcggtgcatccaaagcctcgttcatgcctgccaatgccgcaatgccaattgcagcttgccgtcttgccaaaaaatgaagagagtcgtgcagcacaccaaaggatgtaagcgaaagactaatgggggctgccctgtgtgcaaacagctgatagctttatgctgttatcatgccaagcactgccaggagaataaatgccccgtaccattctgcctaaatataaaacataagcttaggcagcagcagatacaacatagactccagcaggctcagctgatgcggcggaggatggctactatgaacacgcggaacgttcctcaacagtccttaccttcccctacttctgccccgcccggaacacctacacagcagccaagcactccacagacgcctcagcctcctgctcagccacagccgtcacccgtctctatgtcacctgccggtttcccctctgtcgcacgcacccagccacctacgactgtcagcactggcaaaccaacctctcaggtgccagcgcctccacctccagcccagccacctcccgccgccgtggaggccgctaggcagattgagagggaagcccagcagcagcagcacttgtaccgggttaacattaacaactctatgcctcccggccggaccgggatggggacccccgggtctcagatggcacccgtcagccttaacgtgccacgcccaaatcaggtctctggaccagtaatgcccagtatgcccccaggtcagtggcaacaagctccgctaccccaacaacagccaatgcccgggttgcctagacctgtcatatccatgcaggctcaggctgccgtcgctgggcccaggatgcccagtgttcaaccccctagatcaatcagtccatcggctttgcaggatcttcttaggaccttaaagtccccaagttcgccacagcagcaacagcaggtcctcaatattctgaagagcaatcctcagttaatggccgcatttattaaacagcggaccgcaaagtacgtcgcgaatcaaccggggatgcagccgcagccaggattacaatcccagcctgggatgcagccccaacctggtatgcatcagcagccaagcctgcagaatctgaatgcaatgcaggctggcgttccgcggcctggagttcctccccagcagcaggccatgggtggactcaacccacaaggacaggctctgaatatcatgaacccgggacataatcccaacatggcctccatgaatccccagtaccgcgaaatgctcaggcgacagctgctacagcagcaacaacagcagcagcaacagcaacaacagcaacagcagcagcaacaggggagcgcaggaatggccggcgggatggccggacatggacagtttcaacagccacaggggcccggaggctaccccccggccatgcagcagcagcagagaatgcagcagcacttgcccctgcaagggtcctcaatgggacagatggctgcacagatgggccaactgggccaaatgggccaacccggccttggggctgattccacacccaacatacagcaggccctacagcagcggatcctccagcaacagcagatgaaacagcagattggctcgccaggacagccgaacccaatgtctccccagcagcatatgctttcggggcaaccgcaggcatcacacctgccaggacaacagatcgcaacctctctgtcgaatcaggtgcgctcccctgcgcctgtgcagtctcctcgaccgcagagtcaaccgccacacagctcgccttccccaaggatccagcctcagccttcaccccatcatgtgtcaccccagaccggcagtcctcaccctggtctggccgttaccatggcaagtagcatagatcagggacaccttggtaatccagagcagtccgccatgctcccacagcttaatacgccctctcggtctgccctgagtagtgaactttctctggtcggagacacgactggagatactctcgaaaaattcgttgaaggactatag

SEQ ID NO: 183951 - DNA, 7419 bp, synthetic construct
  misc_feature 1..7419: note = Description of Artificial Sequence: Synthetic coding sequence
  source 1..7419: mol_type = other DNA
ctgcggggcgccgtggccgtggccgagatctggccccccccccccccccccggactgcgcccaccatccccatccgctcctgcacgacctctggccgcacgcgcccgaagcagtcccagccagcccgcaggcccccccacacctgtgagggcattggctggtcctgcggctcgcgcaagaggctgctttcgggagcaggtgaagatggcggagaacctgttggatgggccccccaaccctaaaagagcaaagctttcctccccaggattctccgcaaatgacagtaccgattttggcagcctcttcgatctggaaaatgacctcccagatgagctaatccctaatggaggggaactgggtctgctgaactcaggaaatctggtaccggacgccgctagcaagcataagcaactgtcagaactgttacgcggagggagcggctcatccattaatccagggattgggaacgtttctgcctcatcccctgtccagcagggcctcggcggccaggctcagggtcagcccaacagcgcaaatatggcgagtttatccgctatgggcaaatctcccctgtctcagggagactcctcagccccctctttgccgaagcaggcggctagcacaagcgggcccacaccagcagcgtcacaagccctgaatccgcaggctcagaagcaggtcggtctcgctacgtcgtcaccagccacttctcagaccggccctggcatttgcatgaatgcaaactttaatcagacgcatcccggactactgaatagcaacagcggacatagcttaatcaatcaggcaagccaggggcaggcccaggtgatgaatggcagcctcggcgcagcaggccgaggtaggggcgcggggatgccatacccgactccggccatgcagggagctagttcatccgtgttggccgaaaccctgacacaggtgtcaccccagatgaccggacacgctggtctaaataccgcccaggccggcgggatggccaaaatgggcatcaccggaaataccagtccttttgggcaaccattcagtcaggccgggggccagccgatgggcgccacaggggtcaatcctcagctcgcctcaaaacaaagcatggtcaacagccttcctacctttcctacagacataaaaaatacgtcagtgacaaacgttcctaatatgtcacagatgcagaccagtgtggggattgttcctacgcaggccatcgcgaccggccctaccgctgacccagagaaacggaagctgatccagcagcagctcgtgttgctgttgcatgcgcacaagtgccaaagacgcgagcaggcaaacggagaggttagggcctgcagcttgccccattgtcgcactatgaagaacgttctgaaccacatgacacactgtcaggccggtaaggcgtgtcaggccatacttggttccccagcctctggtatccagaacacaatcggctccgtaggcactggccaacagaatgcaacttccttgagcaacccaaaccccatcgacccttcctctatgcagagggcctatgctgctttagggctcccatacatgaaccagccacagacccagctgcagcctcaagtgcctggccaacaaccagcccagccccaaacacaccagcaaatgcgcaccctgaaccccctgggcaataacccgatgaacatcccagctggtggtattacaaccgatcaacagccgcctaatcttatctccgagagtgctcttccaactagcctgggcgccactaatcctctcatgaacgatgggagcaactcaggcaacatcggaacgctcagtactataccgacagccgcgcctccttccagcacaggagtgcgcaagggttggcacgagcacgtcacccaggacttgcgctcgcacctggtgcataaactagtgcaagcaatcttcccaacccccgatcccgcggctctgaaagatcgccgcatggaaaacctggtagcctacgctaagaaagtcgagggcgacatgtacgaatctgctaactcacgggatgagtattaccaccttctagcggagaaaatttacaagattcagaaggaactggaggagaagcgccgtagccgattgcataagcaagggatcctgggaaatcagcctgccctgcccgcaccaggagcccagcccccagtgatcccacaggcccaaccagtgaggccccccaatggtcccctgagcctgccggtgaaccggatgcaggtatcccagggaatgaactcatttaacccaatgtcactgggcaatgtacagctccctcaggctccaatgggaccacgcgccgctagcccaatgaatcattctgtccaaatgaacagcatgggaagcgtgcccggcatggcaatcagtcccagcagaatgccgcagccccccaatatgatgggcgctcacactaacaacatgatggcccaagcacctgcgcagtcccaattcctgccacagaatcagtttccaagctcaagcggcgccatgtctgtcgggatgggccagccaccagcccaaaccggcgtgtcccaaggtcaggtgcccggggcggcattgcccaatcctctgaatatgttaggcccccaggctagccaactcccgtgtcctcctgtcacccagagccctctacatcctacgcctcccccagcgagtacagcggccggcatgccatctttgcagcacactacccctcccgggatgacccccccgcagcccgccgcgccaacacaacctagcacacccgtgagtagttctggacagactccgacaccgaccccgggaagcgtgcctagcgccacccagactcagtctacacccaccgtgcaggctgcagcgcaggcccaggtgacaccacaaccgcagactcctgttcagcccccttctgtggccacgccccagtcttcacaacagcagcctactcccgtccatgctcagccaccaggaacaccactctcccaagccgcagcttcaattgataacagagtgcctacgcctagcagcgtcgctagtgcggaaacgaactctcagcaacccggaccagacgtgccagttctggaaatgaagaccgaaacccaggccgaggacacagaaccagacccaggtgagtcaaagggtgagcctcgcagtgagatgatggaggaagatctgcagggggcaagtcaggtcaaagaagaaacagatattgccgagcagaagtcggagcccatggaggtggatgaaaaaaagccagaggtgaaggtcgaagtcaaagaggaggaggaatccagtagtaacgggaccgcatcacagagcaccagcccgagtcaaccgagaaaaaagatcttcaagccagaggagctgagacaggccctgatgccaactctcgaggccctttacaggcaggatcctgaatctcttcccttcaggcagccagttgacccacaactcctaggaatcccagactattttgacatcgtgaagaaccccatggatctgagcacaataaaaaggaagctggataccggccaatatcaggaaccctggcagtatgtcgacgatgtctggttgatgtttaacaatgcatggttgtataatagaaagacatcccgagtgtataagttctgctccaagctggcagaggtcttcgagcaagaaatagacccagtgatgcaatccctgggatactgctgtggcagaaagtatgagttttcccctcagaccctgtgctgctacggtaaacagctttgcaccatcccccgggacgctgcctattattcataccaaaaccgatatcatttctgcgagaaatgttttaccgagattcaaggggaaaacgtgactctcggagacgatccatctcagccccagaccaccatctccaaggatcagtttgaaaagaagaagaacgacacactcgaccctgagcctttcgttgattgtaaagagtgcggacgaaagatgcaccagatctgtgtcctgcattatgatattatatggcctagtggcttcgtgtgtgataattgcctcaaaaagaccggacggcctagaaaagagaataaatttagtgccaaaaggctgcaaacaacccggctcggaaatcacctcgaggatagagtcaataagttcctccggcgccagaaccatcctgaggcaggcgaagtctttgtgcgggttgtggcctccagtgacaagactgtggaggtgaaacccggtatgaaaagccgctttgttgattccggcgagatgtccgaatctttcccttatcggacaaaagccctattcgcttttgaggaaatagacggcgtagatgtgtgcttcttcggaatgcacgtgcaagagtatggatctgactgtccgccacccaatacacgacgcgtgtacatatcctatttggactcaatccacttctttagaccacggtgcctgcggacagctgtgtaccacgaaattctgattggctatctggagtacgtgaagaaactaggctacgtgacaggccacatctgggcctgtcctccaagcgaaggggacgattatatttttcactgtcatcccccggaccaaaagatccccaaaccaaagcgcttacaggagtggtataagaagatgctggacaaagccttcgcagagaggatcattcacgactacaaggacatcttcaagcaggcgaccgaagaccggctgacatccgccaaggagctgccgtatttcgagggcgacttctggccaaatgtgcttgaagagagcatcaaagagctggagcaagaggaagaggaacggaagaaagaggaaagcacagctgcatccgagaccactgaagggtcacagggggattccaagaatgctaagaaaaagaacaataaaaagacgaataaaaacaaatccagcatttcccgggccaacaagaagaagccctcaatgcctaatgtctctaatgatctgtcccagaaactctatgccaccatggagaaacacaaagaggttttcttcgtgatccacctgcatgctggcccagtgattaacacgctgccaccaatcgtggatcctgacccattgctcagctgcgatctgatggatggacgcgacgcatttttgaccttagccagagataaacattgggaattctctagtctccgtagatctaaatggtccaccctgtgtatgctagtggaactccacacccaagggcaggatcggttcgtctacacatgtaatgaatgcaaacaccacgtggaaacccggtggcactgcacagtttgtgaggactacgatctgtgtattaactgttataatactaaatctcatgcccacaaaatggtcaaatgggggctcggcctagacgacgaggggtcctcccaaggagagcctcaaagtaaaagtccacaggaatctcgcaggctgagtattcagagatgcattcaatcacttgtgcatgcatgccagtgccgtaacgccaactgctccctgccaagctgtcagaagatgaagcgagtggtgcagcacaccaaaggttgtaaaagaaaaacgaatggcggctgtcccgtttgcaagcagctcatcgctctttgctgttaccacgctaagcactgccaggaaaataagtgccctgtgcctttttgcctgaacattaaacacaaactgcggcagcaacagatccagcacagacttcagcaagcacaacttatgcggcggcgcatggcgacaatgaacacccggaacgtcccccaacagagtcttccaagcccaacgtccgcccccccgggaacccctacacaacagccatccacaccacagactcctcagcctcctgctcagccacagccctcacctgtctctatgagccccgcagggttcccatccgttgcaagaactcaaccccccaccacggtcagcacagggaaacccacttctcaggtgccagcaccaccgcctcccgcacagccgcccccggcagctgtagaagcagcacgccagattgagcgcgaagctcagcagcagcaacatctgtatagagtgaatatcaataactctatgccccccggccgcactgggatgggcaccccagggtcccagatggcccccgtttcacttaacgtgcctcggcctaaccaggttagtggaccagtgatgcctagcatgccaccgggccagtggcaacaggctcctctaccccagcagcaacccatgcctggcttacctcggcccgtgatctctatgcaggcccaggcagccgtagcaggcccacggatgcccagtgtccagccaccaaggagcatctccccgtctgcactgcaggatctgttgagaactttgaagtccccatcgtcgccacagcagcagcagcaggtcttgaatatcctcaaatccaacccacaacttatggctgcgttcattaagcaaagaaccgccaagtatgtcgccaatcaacccggcatgcagccccagccgggcctccagagccagcctgggatgcagccacagccaggcatgcatcagcaacctagcctgcaaaacctgaatgccatgcaggccggagtacctcgacctggagtgcccccccagcagcaagccatgggaggcttaaatccacagggccaggctctcaacataatgaatcctggccacaatccgaatatggcatctatgaatccgcaatatcgagagatgctcaggcgacagttgctccagcaacaacaacagcagcagcagcagcagcaacagcaacagcagcagcagcaaggtagtgcaggcatggccggcggaatggctggccacgggcagtttcagcagccccagggccctggcggctatccaccagccatgcagcagcaacagcgtatgcagcaacaccttccgctgcaaggcagctcaatggggcagatggctgcgcagatgggacagctcggccagatgggccagcccggcttgggcgccgactccacgccaaatattcagcaggctttgcaacagagaatcctgcagcagcagcaaatgaagcagcagattgggtctccagggcagccaaacccaatgagtccgcagcagcacatgctgtccgggcaaccccaggcatcccacctgcccgggcagcagattgcgaccagtctgtccaatcaggtaaggagccccgccccagtgcagtcgcccaggccgcagagccagccacctcacagctctccgagtcccagaattcaaccccagccctcaccacaccatgtttcccctcagaccgggtccccccacccggggttagccgtcacaatggcctccagcatagaccagggtcacctgggcaatcccgaacagagcgcgatgcttccgcagcttaacactccctcaaggtcagcactcagtagtgaactgtccttagtcggtgacactacaggcgacacgctggaaaagtttgtggaaggattgtag

SEQ ID NO: 183952 - DNA, 1782 bp, synthetic construct
  misc_feature 1..1782: note = Description of Artificial Sequence: Synthetic coding sequence
  source 1..1782: mol_type = other DNA
atggccaccagcaacaacccccggaagttcagcgagaagatcgccctacacaatcagaagcaggcagaagagactgccgcattcgaggaggtcatgaaggatcttagcctgacacgggcagctagattgcagctccagaaaagtcagtatctccaactgggtccctccagggggcaatattatggtggaagccttcctaacgtgaatcagatcggcagcggcacgatggatctacctttccagaccccatttcagtcgagtggccttgacacctccagaactacccgacatcacgggctcgttgatagagtatatagagaaaggggtcgtttgggaagtcctcacaggcggcccctgtcagtcgataagcacgggagacaagcagacagctgcccgtacgggaccatgtatctgtctcccccggccgacacctcttggagaaggactaatagcgattctgctctgcatcaatccacaatgacgcctactcagccagaatcctttagctctggctcacaggatgtgcaccagaagcgggtgttgctccttactgttccaggtatggaggaaaccacaagtgaagctgataaaaacttgtctaagcaggcctgggataccaagaaaaccggaagccggccaaagtcatgcgaagtccctggcatcaatattttcccatccgccgatcaggagaatactactgccctgattcccgcaacacacaacactggcggtagcttgcccgacctgactaacattcactttccgtctcccttacctacccctctggacccagaggaacctacctttcccgctctgtcctcaagctcaagcaccggcaacctggccgctaacctgacgcatctgggcatcggaggcgccggccagggaatgagtactcccggatctagtccacagcacaggcctgccggagtttctcctttgagcttaagcacagaagctaggagacaacaggcttctcccacattgtccccgctgagccccatcactcaggcagtcgccatggatgccctttcattggagcagcagctgccttacgctttctttacacaggcaggttcccagcagcctcctccgcagcctcagccgccacccccccctccaccggctagccagcagccgccaccaccgccaccccctcaagcccccgtgagacttccacccggaggacctttgctgccttcagcttctcttacacgcggaccccagccacctcccctggcggtgacagtgccctccagtctgccccaaagtcctccagaaaatcccgggcaaccttccatgggcatagacattgctagtgcccccgccctgcagcagtatcgaacaagcgccggatccccagcaaaccagtctccgactagtcccgtatccaatcagggattcagcccagggtcatctccccagctggaacagtttaacatgatggagaacgccatatccagcagctctctttacagccctggaagcacgctgaactatagtcaggccgctatgatgggtcttacaggctctcatggttccttaccggattcccaacaactcggctatgcctctcactcggggattccaaatatcatcctgaccgtcacaggggagtccccacctagtctgtccaaggaactgacaagccacagaggccatctcccagatggtcctccggtctcaggtcatgccggaacactcccgcttagtcggccagacggcgcctcccccgccagaggccggccctgttcagtgcctcgacaacgcccaagcctatag

SEQ ID NO: 183953 - DNA, 1905 bp, synthetic construct
  misc_feature 1..1905: note = Description of Artificial Sequence: Synthetic coding sequence
  source 1..1905: mol_type = other DNA
atggccaccagcaacaacccccggaagttcagcgagaagatcgccctccataaccagaagcaggcagaagaaaccgctgcttttgaggaggtgatgaaggatttatctttgacgcgtgcggcgcgattacaactccagaagtcccaatatctccaacttgggccaagcagaggccagtactacggggggtcccttcctaacgtgaatcagattggttcaggaaccatggacctccctttccaaacccccttccaaagttctggactcgacaccagccggacaactagacatcacggactggtggaccgcgtgtaccgagagagaggccggctcggctctccccatcgccgccccctctctgtggataagcacggtagacaggcagattcctgcccttatggcacaatgtacctgagcccgcccgctgacacatcttggcggcgtactaacagcgacagcgccttgcaccaatccacaatgacacccacccagccggaaagctttagcagtgggtctcaggatgtacaccagaaacgcgtgctcctgcttaccgtccccggcatggaggaaactacgtcagaagctgacaagaatctaagcaaacaagcctgggacaccaaaaaaactggatcacgtcctaagtcctgcgaagtgccaggaatcaatatcttcccctcagccgatcaagaaaataccaccgctctcatccccgctacacataataccggcggttctctgcctgatctgacgaacattcacttccctagccccctgcctactcccctggaccccgaggaacccactttcccagcactaagctcgagttcttccaccggaaacctcgccgcaaacctcacccatttaggcattggaggagcgggacaggggatgtcgacgccgggatcatctccacagcatcgcccagccggcgtctcccctctcagcctgtcaactgaagctaggcggcaacaggctagccctacactgagtccattgtcaccaatcactcaggcggtagcaatggacgcactgtcactcgaacaacagctgccttatgctttcttcactcaagcgggctcccaacagccgcccccacagccgcaacctcccccccccccccctcctgccagccagcaacctccacccccacccccaccccaggcaccggttaggcttccacccggagggccattgctcccaagcgctagccttactagagggccacagccgccccctttagccgtgaccgtgccatcatcgctcccgcagtcccccccagaaaaccccggtcagccctctatgggcatagatattgccagcgctccagccctgcagcaataccggacttcggcagggagccctgcaaaccagagtccgacatcccccgtctccaaccagggcttttcaccaggctcttccccccagcatacaagcacactgggatcagtatttggcgacgcctactacgaacagcagatggcagcccggcaggctaacgctctcagccatcagctggaacagtttaatatgatggagaacgctattagcagtagttcactgtatagccctggaagcactctgaactactcccaagcagcgatgatgggcttaactggtagtcatggctccctgcctgacagtcagcagctgggttatgcatctcacagtgggatcccaaatattattctcacagtgaccggcgagtctccacctagcctttcgaaggagctgacctcctcactggccggcgtcggcgatgtgtctttcgactctgatagccagttcccgctcgatgaactgaaaatcgatcccctcaccctggacggcctgcacatgctcaacgaccccgatatggttctggccgatcccgctaccgaggacaccttcagaatggaccgcctatag

SEQ ID NO: 183954 - DNA, 1953 bp, synthetic construct
  misc_feature 1..1953: note = Description of Artificial Sequence: Synthetic coding sequence
  source 1..1953: mol_type = other DNA
atggccaccagcaacaacccccggaagttcagcgagaagatcgccttgcataaccagaaacaggcagaggagacagctgcatttgaggaagtgatgaaggacctctccctgactagggctgcacgcctgcagctccagaaaagccagtacctccagctggggccaagccgcggccaatactacggcgggagtctcccaaatgtgaatcagataggttccgggacaatggacctgcctttccagccttcaggcttccttggggaagcactggcagccgcccccgtcagtctaaccccctttcagagttctggcctcgacaccagcaggacaactagacatcatggtcttgttgatcgggtctaccgcgagagaggtagactggggtcaccccataggagaccactatcagtcgataaacatggtaggcaggcagacagctgtccttatggtactatgtacctctccccacccgcagatacgtcttggcggcggactaactctgatagtgctcttcatcaaagtaccatgactcctacccaacctgaatcctttagctcaggtagccaggacgtgcaccagaaacgtgttcttctgctaacagtgccaggaatggaggagacaacttctgaagccgacaaaaacctctccaagcaggcatgggatactaagaagactggcagtagacctaagtcttgcgaggttccaggaatcaatatctttccaagcgcagaccaggagaacactacagcgctcattccggcaacacacaatactggcgggtctctgccagacctcacaaacatccatttcccaagtcctcttcctacccccctagacccagaggagcccacctttcccgcgctgagttcctcctcttccactggaaacctcgctgctaacctgacacatttgggcattggcggcgcaggtcaggggatgagtacaccgggcagcagcccacagcatagacccgcaggggtttcgccattgtccctcagtaccgaggcccggcgccagcaggcttctcctacacttagccctttgagccccatcactcaggcggtggctatggatgcactgtcactggagcaacagttgccgtacgcatttttcactcaggcgggttcacaacagccacctccccagcctcagccccccccaccccctcctcctgcaagccaacagcctccccctccaccgcccccacaagccccggtgcgcttgcctcccggcggtcccttgctgccctcagcttcactcaccagaggcccacagcctcctccgctcgctgtgacagtgccctcgagcctccctcagtccccgcctgagaatcccggccaaccatccatgggtattgacatagccagtgcccccgccctccagcagtatcgaacttctgcagggtcacccgccaatcagagccctacctcacccgtgtccaaccaggggtttagccctggatccagtccccagcataccagtacgttgggctccgtctttggtgatgcatactacgagcagcaaatggcagcgcgacaagccaatgccctgagtcaccagctggagcagttcaatatgatggaaaatgctatctcgtcttctagtttgtactcaccgggaagtacactcaactatagtcaggccgcgatgatgggtcttacagggtcccacgggagcctgcccgatagtcagcagctaggctatgcctcacactcaggcatcccaaacatcattctgactgtgactggcgagagtccacccagtctcagcaaagagttaactagctccctggccggggtgggcgacgtgagcttcgatagcgactcgcaattccccctcgacgaattgaagattgatccccttacccttgacgggcttcacatgctgaacgacccagacatggtcctcgctgaccccgcaactgaagatacatttcgcatggacaggctatag

SEQ ID NO: 183955 - DNA, 2082 bp, synthetic construct
  misc_feature 1..2082: note = Description of Artificial Sequence: Synthetic coding sequence
  source 1..2082: mol_type = other DNA
atggccaccagcggcgccaacggccccggcagcgccaccgccagcgcttcaaaccccagaaagttttcagaaaagattgcattgcagaagcaaagacaggcagaggagactgccgcctttgaggaggtgatgatggacattggttccacaagactgcaggcccaaaaacttaggctggcctacaccagatctagccattacggagggtcattgccaaatgtcaatcagattgggtcaggcctggcagaattccagagccctctgcattccccactcgactcaagcagatctacacgtcaccatgggctggtggaacgggtccagcgggacccaagaaggatggtttctccactgaggcgctatactcgacacatagattcaagcccctattcgcctgcttatctgtcccctccgcccgagagtagctggcgccgcacgatggcctggggcaactttccagctgagaaaggacaactgttccgcctaccgtctgccctaaatcgtaccagtagcgactctgcactgcatactagcgtgatgaacccttccccccaggatacttaccctggcccaacgccaccatccatccttccatccagaaggggcggtatcttggacggggaaatggaccctaaggtacctgcaatcgaggagaatctcctggacgacaaacacctgctaaagccctgggatgcaaaaaagttgtctagctccagcagcagacctcggtcttgtgaagtcccgggcattaacatcttccctagcccagatcagcctgccaatgtgcccgtattgcctcctgcgatgaataccggcggaagtttacctgacttgaccaatctacatttcccccctccactgcctacacctcttgaccccgaggaaaccgcgtatcctagcctgagtggtgggaattctactagtaatctgactcatactatgactcatctgggtatctctagaggaatgggccttggtcccgggtatgatgcacctggactgcattcgcctctgtctcatccatctctccaatcgagcctgtctaatcctaatctacaagccagcctctcttcccctcagccgcagctccaggggagccattctcacccgagcctcccagcgtcctcactggcacgacacgtgctgccgactacttccttaggccacccctctctctctgcaccagcactgagctcttctagctctagttcttcgactagttcgcctgtactgggcgccccatcctatccggcttcaacccctggtgcttctccccaccatcggagggtgcctctctccccactgtccctcctggccggcccggccgatgcgcgaagaagccagcagcagctcccgaaacagttctcaccaactatgtcgccaactctgtcaagtataacccagggagtgccactggatacaagtaaactgagcactgaccaacggctcccaccctacccatacagttctcctagcctggtattacctacgcagcctcatacacctaagtctctccaacagcccgggctgccaagtcagtcttgtagtgtgcaatctagcggaggccaaccacctggaagacagtcacactacggcacgccctatccacccggcccatcaggacacggtcagcagtcctatcaccgaccaatgtcagatttcaacctggggaacctggaacaattcagcatggagagtccctcggcttctctcgtgttggacccccctggattctctgaagggcctggctttttgggaggtgaggggccaatgggaggcccacaggatcctcataccttcaaccatcagaatctcacacattgcagccggcacgggagtggacccaacatcatcctaacgggggattcatcccctggctttagcaaagagattgctgcagcacttgctggtgtccccggatttgaggtatccgctgccgggctcgaactggggcttggacttgaggacgagctgcgcatggagccactcggattggaaggtcttaatatgctcagtgatccatgcgcactgctaccagaccccgccgttgaggaaagctttcggtctgacagactccagtag

SEQ ID NO: 183956 - DNA, 1860 bp, synthetic construct
  misc_feature 1..1860: note = Description of Artificial Sequence: Synthetic coding sequence
  source 1..1860: mol_type = other DNA
atggccgccagccccggcagcggcagcgccaacccccggaagttctcagaaaaaatcgctctgcatactcagcggcaggctgaggagactcgagctttcgaacagctcatgacagacctgactcttagccgagtgcaattccagaaactccagcaactgcgcctcacccagtaccacggcggcagcctgccaaacgtatcccaactgaggtccagtgccagcgaattccagccaagcttccatcaagccgacaatgttagagggactcgtcatcacggactggtagaaagaccgtcgaggaaccgcttccacccacttcaccgtcggtcaggtgataagccaggcaggcagttcgacgggtcagcatttggggcaaactacagctcacaacccctggacgagtcctggcctagacagcagcctccttggaaggacgagaagcaccctggtttccggctcaccagcgctcttaaccgtaccaactctgactccgccctacacacatctgccctgtccacaaaaccccaggatccatacgggggagggggacagagcgcctggccggccccatatatggggttttgcgacggcgagaataacggccacggcgaagtggcgtcgtttcctggacccttgaaggaggaaaatctcctgaacgtccccaagcctctgcccaaacagctctgggagaccaaggaaattcagagcctgagcgggcgccctagatcctgtgacgtcgggggaggtaatgccttcccacacaacgggcagaacctgggcttatcaccttttctaggaacgctgaataccggggggtccctacccgaccttaccaatttacattattccacaccattgcccgccagcctggacaccaccgaccaccactttgggtcaatgagcgtgggtaactcagtgaataacatcccggcagccatgactcacctgggcattcgttccagttccgggctccagtcaagccgtagcaatcccagcatccaggcaaccctcaacaagaccgtgctcagtagtagcctaaataatcatccgcagacctccgtccctaatgcttcagctctccatcctagtttgcgactgttcagcttatcaaacccctccctctctacaacaaacctgtctgggccatctcggagaaggcagcctccagtgagtccgctgacactgtctcctggtcccgaggcccatcagggtttcagccgccagcttagttccacgtcaccattggccccttatccaacaagccagatggttagttccgatagaagccagctcagcttcctgcccactgaggctcaagcacaagtgagcccccctccaccttatcccgctccgcaggaactgactcaacctctgttacaacagccccgggcaccagaggctccagcacagcagccacaggcagcctccagcctaccacaatcggattttcagctcctgcctgcccagggcagcagcctcacaaacttttttcccgatgtgggcttcgatcagcagagcatgaggcctggccccgctttccctcaacaggtgccactggtgcagcaggggagcagagagcttcaggactcttttcacctgaggccctctccctattccaactgtggaagcctcccgaatactatccttcctgaagactcctcaacctcactgtttaaggacctgaacagcgccctagccggcctgcctgaggtgagtctcaacgtagatacacccttccctctcgaagaagagttacagatcgagcctctcagcctggacggcctcaacatgctgagcgattcctcaatgggtctccttgacccatctgtggaagaaactttcagagccgacagactgtag

SEQ ID NO: 183957 - DNA, 1857 bp, synthetic construct
  misc_feature 1..1857: note = Description of Artificial Sequence: Synthetic coding sequence
  source 1..1857: mol_type = other DNA
atggccgccagccccggcagcggcagcgccaacccccggaagttcagtgagaaaatcgcgctgcacacccagcgccaagcagaagagacaagggcttttgagcagctgatgacagacttaactctgtcacgcgtgcagtttcaaaagctgcagcagctgaggctaacccagtaccacgggggctctctccccaacgtatcccagctgagatcatctgcctctgagttccaaccatctttccatcaggctgataatgtgagaggtactcgtcatcatgggttggtggagcgcccttccagaaatcgattccaccctctgcacaggagatcaggtgacaaacctggtaggcagttcgatggatctgccttcggtgctaattacagctcacagccattagatgagagctggcctcgtcagcaaccaccctggaaagacgaaaagcaccccggcttccggctgaccagtgccttgaatcgcacaaacagtgacagcgctttgcacacctcagccctgagtactaagcctcaggatccttatgggggcggcgggcagtcagcctggccagctccatacatgggattctgcgacggagaaaacaatgggcacggggaagttgcttcctttcccgggcctctcaaagaggagaacttgctcaacgtaccaaagccactgcccaaacagctgtgggagacgaaggaaattcagagcttaagcggacggccgagatcctgcgatgtggggggcgggaacgccttcccccacaatggccaaaatttaggactgtcgccctttctaggaacacttaatacgggaggttccttgcccgatctaactaacctccattacagcaccccactgcccgcaagccttgatacaactgatcatcattttgggtcaatgtcagtgggaaacagtgtgaacaacatccctgcggcaatgacacacctaggaattcgaagttcctctggtctccaatcctcgaggtctaacccctccattcaagctacgcttaataagacagtgctgagttccagtttaaacaaccacccacagacctcagtacccaacgctagcgcactgcaccccagcctcaggctgttttctctcagcaacccaagcctgtctacaaccaacctatcaggtcctagtcgcaggaggcaaccaccggtctctcctttaaccctgtcaccagggcctgaagcgcaccaaggttttagccgacagctatcctccacaagccccttggccccttacccaacctcccagatggtgagtagtgaccgcagccagctgtccttcctgccgacagaagctcaagcccaggtgtcacctccgcctccgtaccccgctccccaagagctgactcagcctctcctccagcagcctagggcgccagaggcaccggcacagcagcctcaagccgcttcttccttgcctcagtctgactttcagctacttccagcacaggggtctagcctgacgaacttttttcctgacgttggctttgatcagcagagcatgcgcccagggcccgcattccctcagcaggttccactggtgcagcagggctctagagaacttcaggacagctttcacctgaggccatccccctactctaactgcggcagcttgcctaacactatcttgcctgattcctccacctcactgttcaaggacctcaatagtgccctcgccggcctgcccgaggtaagcctgaatgtggataccccattccctctggaggaagaacttcaaattgagcccctgagtctcgatggcctaaacatgctgagtgattcaagcatggggctgttggatcctagcgtcgaagaaaccttcagggccgacaggctttag

SEQ ID NO: 183958 - DNA, 1749 bp, synthetic construct
  misc_feature 1..1749: note = Description of Artificial Sequence: Synthetic coding sequence
  source 1..1749: mol_type = other DNA
atgaccgacctgaccctgagccgggtgcagttccagaagctgcagcaattgagactcactcagtaccacggtggttcattacctaatgttagccagctgcgaagttcagcctccgaatttcaaccttccttccaccaggccgacaacgtgcggggaactagacatcatggcttggtggaaaggccttcccggaatagatttcacccgctgcaccgcaggagtggggataaacccgggcgccaatttgacggctcagccttcggagcgaattacagcagtcagcctctggacgaaagttggccacgtcagcaacccccatggaaggacgaaaagcatccgggatttaggctgacaagcgcactgaacaggactaatagtgacagcgctctgcatacctcagccctgagtactaaaccacaggacccttacggaggaggcggccagagcgcctggcccgccccatacatgggtttttgcgacggagagaacaacggccacggagaagtcgcatccttcccaggaccactgaaagaggaaaatctcctcaatgtgcccaagccactccccaagcagctgtgggagaccaaagagatccagtctctttccggcaggcctcgctcttgcgatgtgggcggggggaatgcctttcctcataacgggcagaacctgggcctgtctccatttctggggaccttgaacactggcggatctttacccgacttaacgaatctgcactattccacccctctgcccgcttccctggataccacggatcatcatttcggatctatgtccgttgggaattcagtgaataatatcccagccgccatgacccaccttggaatcaggagcagctccggtttgcagagctcacgatccaacccatctatccaagctaccctaaacaaaaccgtcctgagtagctctttaaacaatcatcctcagacttcggtgcctaatgcaagtgccctgcatccctccttgaggcttttctctctctctaaccctagcctttcaaccactaacctgtccggcccatccagacgtcgacagccacctgtctcgcccttaaccctctctcccggtccagaagctcaccaaggtttctctcgacagctgagcagtacttctccactggcaccataccctacaagtcagatggtgagtagcgatcgttcacagctgtccttcttgcctactgaggcccaagctcaggtgagcccccctcctccataccccgcgcctcaggagctgacacagccgctacttcaacaacccagagcacccgaagcacccgcccagcagccgcaggcagcttcttccttaccacaatccgacttccagctcctgcctgcccagggaagtagcctgaccaattttttcccggacgtcggctttgaccagcaaagcatgcgaccaggccctgcgtttccgcaacaggtgccccttgttcagcaagggtcccgcgaattgcaagactctttccatcttaggccctctccttactcgaattgcgggagcctgcctaacacaattctacccgattcctccacatcacttttcaaagacctgaacagtgcgcttgccgggcttccggaggttagcctgaatgtggatacccctttcccactggaagaggagctgcagatcgaaccactgagcctggacgggctgaacatgctgtcggatagcagtatgggcttactggaccccagtgtggaggagacattcagagccgatcggctctag

SEQ ID NO: 183959 - DNA, 672 bp, synthetic construct
  misc_feature 1..672: note = Description of Artificial Sequence: Synthetic coding sequence
  source 1..672: mol_type = other DNA
atgacctggcggcaccacgtgcggctgctgttcaccgtgagcctggccctgcagatcatcaatctgggtaacagctatcaacgagagaaacacaacggaggacgggaagaggttacaaaggtagcaacccagaaacacaggcagtcacctctcaactggacaagctcacactttggcgaagtaacagggtcagcagagggttggggcccagaagagccattaccatactcaagagcctttggcgagggggctagcgcgcgccctaggtgctgtagaaacgggggtacatgcgttctgggctctttttgcgtttgccctgctcactttactggcagatactgtgagcacgatcagaggcgaagcgagtgcggagcactcgagcatggcgcttggacactgcgcgcctgccacctgtgtcggtgcatttttggggcgctgcactgtctgcctctacagacacctgatcgatgtgatccaaaagacttcctagcatcccacgcgcacggcccttcagcagggggagccccatctctgctgttgctgctaccgtgtgcactgttacaccggcttctacgccctgacgcacccgcccatcctcggagcctcgtgccgtccgtcctccagcgcgagaggagaccctgcgggaggcccggcctgggccacagactctag

SEQ ID NO: 183960 - DNA, 2511 bp, synthetic construct
  misc_feature 1..2511: note = Description of Artificial Sequence: Synthetic coding sequence
  source 1..2511: mol_type = other DNA
atgaccgccaccgtggagaacctgaccttccagaaggacaccctggggaacgctgtagacaagaaccgtaggcacggatccacagaacctcttgtgctggcctggagcagccaatttcgtaggctgacgtggggttgtgccctggacgctctccatagatcaccatgcgtggcagccagtcagcatggtgtgactcacttgatccgtagcagccggacgccgcactccaccaggtgtcgtaaagaagacgcccagccgggccatcatggtaacggagcagcctcagtcacagcccaagcgcggggccagaggagtgtgctgcaggtaccgctccccgtacctcgctcttgcctcttcagcgaatctttcgtggtatccgtcagttctcagtccaggttcctggcgtctgtgccaggaacaggagtccaacgttcgacagcggccgacatggcagccagtaccgcagccggtaaacagcgcatacctaaggtggctaaggtcaaaaacaaagcaccggctgaggtccagataactgccgagcagctccttcgggaggccaaggaaagggagctcgagctgcttccacctcctccccagcaaaagattaccgacgaggaagagctgaatgactataaactgagaaaaagaaaaactttcgaagacaatatcaggaaaaaccgtaccgttatatcaaattggatcaaatatgcgcagtgggaggagtcactcaaagagatccagagggcccgttctatatatgaacgtgcactcgatgtcgactataggaacataaccctgtggctgaagtacgcagaaatggaaatgaagaatcgtcaagttaatcatgcccgaaatatttgggatcgcgccatcaccacactcccgcgtgtgaaccagttctggtataaatatacatatatggaggagatgcttggaaatgtggccggtgcaaggcaagtctttgagcggtggatggagtggcagccagaggagcaggcttggcactcctacataaatttcgagctgcggtacaaagaagtcgacagagcccggactatttatgaacggtttgttctcgttcaccctgatgttaagaattggattaagtacgcaaggtttgaagagaaacacgcctacttcgctcacgcccgcaaggtttatgaacgcgccgtagagttcttcggggacgagcacatggacgagcatctgtacgtcgcattcgctaagtttgaagaaaaccagaaggaatttgaaagggtgcgagtcatctacaaatatgccctggatcgcataagtaagcaagatgcacaggagctcttcaaaaattatactatctttgagaagaagttcggcgaccggagagggattgaggacattatagtaagtaagagacgttttcaatacgaagaagaagttaaggctaacccgcataactacgacgcctggtttgactacctgcgtctggtggagagtgatgcagaagctgaggctgtcagagaggtgtacgagcgcgccatcgctaatgtgccgcctatccaggagaagcggcactggaaacgatacatatatctgtggattaattacgcgctttacgaggagctggaggcgaaagatcctgagcggaccaggcaggtgtatcaagctagcctggagctcataccacacaaaaagttcacctttgcaaagatgtggatcctctatgcccagttcgagattcggcaaaaaaacctatctctggcacggagggcgctcggcacatctattggcaagtgccccaagaataagctcttcaaggtgtatatcgaattggagcttcaactgcgggaatttgatagatgcaggaagctgtacgagaaattcctggagtttggacctgagaactgtacgtcatggattaaatttgcagaactcgagactatcctcggtgacatcgaccgggcgcgcgctatatatgaactcgccataagccagcccaggctggatatgcccgaagtcctgtggaagagttacatcgattttgagattgagcaggaagagacggagcggaccaggaacctgtaccggcggctcttgcagagaacccagcacgtgaaggtgtggatctcattcgcgcagttcgagctcagtagcggcaaggaaggtagccttaccaaatgccgtcagatttacgaagaagccaataaaactatgcgaaactgtgaggaaaaagaggaacggttgatgctgctcgagagttggcgctcctttgaggaagagtttggaacagccagtgacaaagagcgggtggataagttgatgcctgaaaaggtgaaaaagagacggaaagtccagacagacgacggcagcgatgccggctgggaggagtattttgactacattttccccgaggatgccgccaaccaacccaacctcaagctcctggcgatggctaaactgtggaaaaaacagcaacaggagaaagaagatgcagagcatcatccagatgaggatgtagacgaatccgagtcttag

SEQ ID NO: 183961 - DNA, 2547 bp, synthetic construct
  misc_feature 1..2547: note = Description of Artificial Sequence: Synthetic coding sequence
  source 1..2547: mol_type = other DNA
atgaccgccaccgtggagaacctgaccttccagaaggacaccctgggcaacgccgtggataaaaatacatctcgccttgaacttaggtcttactctttggccggccgtcatggcagtacagagccacttgtgctggcttggagcagccagttcaggcggttgacatggggctgtgctttggacgcactacacagaagcccttgcgtggccgcatcgcagcacggtgttactcacctgatcaggtcatcccgcaccccccacagcacaagatgccgcaaagaagacgcccagccaggccaccatggaaacggtgctgcatccgtgacagcacaggctagagggcagagaagtgtgttgcaggttcccctgccagttcctcggtcctgcctgttttctgaaagctttgtcgtctccgttagttctcagagtcggttcctggcttccgtgcccggcactggagtccaaagatcgaccgccgctgatatggctgccagcaccgcagcggggaaacagaggataccgaaggtggcaaaggtgaaaaacaaagctccagccgaggttcaaataaccgctgagcagctgctgcgggaagccaaagaacgtgaactcgaattgctccctccacctccacaacagaagatcaccgacgaagaggagctcaatgattacaagcttcgtaagcgaaagacttttgaggataatattcgcaaaaaccgaaccgttatcagcaactggattaagtacgcgcagtgggaagaaagccttaaagaaatacagagggctaggagtatttatgagcgcgctctggatgtggactatcggaacatcacattgtggttgaagtatgccgagatggaaatgaaaaaccgacaggtgaatcatgctcggaatatctgggacagggcaatcactaccttgcctcgggtgaaccagttctggtacaagtacacctatatggaggaaatgctgggcaacgtcgctggggctcggcaggtatttgaaaggtggatggagtggcagccagaagagcaggcctggcattcatatatcaatttcgagctgagatacaaagaggtggatagagctcgcaccatatatgagaggtttgtgttggtgcatccagatgtaaaaaattggatcaaatacgctcgatttgaagagaagcacgcatactttgcgcacgccaggaaagtttacgaacgggccgtcgaattcttcggcgatgaacacatggacgaacatctatatgttgccttcgctaagttcgaagagaatcagaaggagttcgaacgggtcagagtcatttacaagtacgccctagacaggatctccaaacaggatgctcaggagctcttcaagaactacaccattttcgaaaaaaagtttggcgacagaagaggcattgaggatattattgtgtcgaaacgccgtttccagtatgaagaggaggtcaaagccaacccacacaactacgatgcctggtttgactatctgcggctcgtcgagtctgatgcagaggcagaagcagtccgggaagtgtatgaaagagccattgccaacgtacccccaatccaggagaaacgccattggaagcgctatatctatctgtggatcaactacgcactgtatgaagagctggaggctaaggaccctgagcgcacccgccaggtctaccaggcttcgctggaactgattccacacaaaaagttcaccttcgctaaaatgtggattttgtacgcccaattcgaaatacggcagaaaaacttgtcgttagcaaggagggcgctcgggacctctatcggtaagtgtcccaaaaacaagctctttaaggtgtacatcgagcttgagctgcagctgagggagttcgacagatgtagaaaattgtacgaaaagttcttggaattcgggcctgaaaattgtacaagctggatcaaattcgccgaactcgagacaattttgggcgacatagaccgagcccgcgctatctacgaacttgccatatctcaaccaagactcgacatgcccgaggtgctctggaagtcctatatagactttgagattgaacaggaggagaccgagaggactcggaacctatataggaggctgcttcagagaacccaacacgtaaaggtgtggatttccttcgcgcaatttgagctctcgtcaggaaaggaagggagcttgacgaaatgtcgtcagatatacgaggaggccaacaagaccatgcgtaactgcgaagagaaagaggaacgactgatgcttctggagagttggaggtcctttgaggaggagttcggcaccgcctccgacaaggaaagggtggataagctgatgccagagaaagtgaaaaagaggcgcaaggtgcagactgacgatggctccgatgcagggtgggaagaatacttcgattacatcttcccagaagacgctgctaatcagccgaacctgaagctactcgcaatggctaaactctggaagaaacagcagcaagagaaagaagacgccgaacaccatcccgacgaagacgtggatgagtctgagagttag

SEQ ID NO: 183962 - DNA, 7026 bp, synthetic construct
  misc_feature 1..7026: note = Description of Artificial Sequence: Synthetic coding sequence
  source 1..7026: mol_type = other DNA
atgaagaacatctactgcctgatccccaagctggtgaacttcgccacactgggctgcctttggatcagcgttgtgcagtgcactgtgttgaactcctgcttgaaatcatgcgtgaccaatctgggccagcaactggacctcgggacgccacacaatctcagcgagccatgcattcaggggtgccacttctggaactcagttgaccagaagaactgcgctctgaagtgcaacgacacctatgccaccgtatgtgagcgagaatcttgcgaggtcgggtgttctagcgcagaaggcgcatacgaagaggaggtcctcgagaacgccgacctcccgaccgccccatttgctagcagcataggcagccacaatatgacgctgcgttggaaaagcgccaatttttcaggcgtgaagtatatcatacagtggaagtatgctcagctgttaggatcttggacctacaccaaaacagtgagtagaccttcctatgtggtgaaaccactacacccatttacggaatatattttcagagtggtgtggatatttacggctcagttgcagctatactcacccccctccccgagctatcggacacaccctcacggcgtgccggagaccgccccactaattagaaatatcgagagttcttcgcccgacacagtagaggtgtcctgggatcctccgcagttcccgggaggcccaattctgggctacaacctccgcttgatcagcaaaaaccagaaacttgatgctgggacgcagagaacctcctttcagttctattccacacttcccaatacgatttaccgttttagcattgccgccgtcaacgaggtgggcgagggcccagaggcggagagttcaatcaccacttccagctccgcagtacagcaggaggagcagtggttatttctttccagaaaaaccagcttaaggaagcgctctctgaaacacctggtggatgaggcacattgtctcaggctggacgcgatctaccacaacatcactggtatctccgtggacgtgcaccagcagatagtgtacttttccgagggtacattgatctgggccaagaaggcagccaatatgtcagacgtgagcgacctcagaatcttctacagaggctctggactgatatcatcgatatccatcgactggctataccaacgtatgtatttcatcatggatgagctcgtgtgcgtgtgcgatttggagaactgcagtaatatcgaagagatcacccccccctccatctccgcaccacagaagatagtggccgactcctataacggctacgtgttctatctcttgcgagacgggatctacagagcggatctccctgtaccctctggcaggtgcgccgaggccgtacggatcgtggagtcctgtacactcaaggacttcgctattaagccccaggccaaacggattatttacttcaatgatacagcccaggtctttatgtctacatttttagatgggagtgcctcgcacctgatattaccgcggattcccttcgcagacgtcaagtcttttgcttgcgaaaataacgattttctggtcaccgacggtaaagttatcttccagcaggacgcgctctcctttaacgaattcatagtcggatgtgacttgtcccatatcgaagagttcggctttgggaatcttgtgatttttgggagtagctctcagttacacccactgccgggacgacctcaggaacttagtgttctatttggttcgcatcaggcactggtgcagtggaaacctcccgctctggctataggggccagcccttccgcttggcaaaattggacttatgaggtgaaagtctcgactcaggatcctccagaggttacacatatcttcctcaacatctcaggaactatgcttaacgtgcccgaactacagagcgccatgaaatataaagtgagcgttcgggcaagttcacccaagcgcccaggcccatggagcgagccatccgttgggactacactcgtccccgctagcgagccgcctttcatcatggccgttaaggaggacgggctttggagtaaaccgcttaactcatttggaccgggtgaatttctctcatccgatattggaaatgtgagcgacatggattggtataataacagcctgtactatagcgacactaagggagatgtctttgtttggctgctgaatggaacagatattagtgaaaactatcacctgcccagcattgcgggggctggggcgttggctttcgagtggttgggtcatttcctttattgggcaggaaagacatatgtaattcagcgtcagtctgtgctgacaggacataccgacattgtcacccatgtgaagcttctggtcaatgatatggtggtcgacagcgtaggaggttacctctactggacgaccctgtacagtgtggaatcaacaaggctcaatggagagagctcactggtgctacagacacagccctggttctcaggaaagaaagttattgccctgaccctggacctctccgacggtttactatactggcttgtgcaggacagtcagtgtatccatctgtatacagccgtcttgaggggccagtcaacgggtgataccactatcactgaatttgccgcgtggagcacatccgagatctcacagaatgctctcatgtattacagtggccgtctgttttggattaacggcttccgcatcatcaccacccaggagatcggtcagaaaacatctgtttctgtccttgaacccgcaaggtttaaccagttcactatcatacaaacaagcctgaagccactcccgggcaacttttctttcacccccaaagttatccccgactctgtccaggagtccagctttcggattgaaggaaacgctagttccttccagattctatggaacggaccccccgctgtggactggggagttgttttctactccgtagaattctctgcgcatagcaagttcttagcttcagaacagcattcacttcctgtttttacagtggagggtttggaaccatacgcattgtttaatctgtcggtgacaccttatacctactggggcaaaggtcccaaaacttccttgtcccttagggcacccgagactgtgccatcagcacctgagaatccgcgcatctttatcttgccatctggcaaatgctgtaataaaaatgaggttgtggtggaatttcggtggaacaaaccaaagcacgagaacggggtgcttaccaagtttgagatattctacaacattagcaaccagagcatcaccaacaagacctgcgaggactggattgccgtgaatgtcaccccttcagtgatgtctttccagttagagggtatgagtccaagatgtttcatcgcttttcaggtgcgggcatttacatccaagggccctggaccatacgctgacgtggtgaagtccacaaccagcgagattaacccttttcctcacctgatcacactcctggggaataaaatcgtgtttctggacatggatcagaatcaggttgtctggaccttcagtgctgagagagtcatttcagctgtttgttacaccgctgacaacgagatgggatactatgctgagggagactcactcttcctgttacatttacacaatagatcgagtagtgagctcttccaagattctctcgtgttcgatattacggttattaccatagactggatttcccgccacctctatttcgccctgaaagaatcccagaacggtatgcaagtgttcgatgtggatctggaacacaaggtgaaatatcctagggaagttaagatccacaacaggaactcaaccattatttcttttagtgtttatccactactgtctcggctgtattggactgaagttagcaattttgggtaccagatgttttactattccatcatctcacacaccctgcatagaatccttcagcctaccgcgacaaaccaacagaataagagaaatcagtgttcttgtaacgtcaccgagttcgagctgtctggcgctatggccatagacacttctaacctggagaaaccactgatctattttgccaaggcacaggagatctgggcgatggacttagagggttgtcagtgttggagggtcataacggtgccggctatgctgggcaagacactggtgtctctgaccgtcgatggcgacctaatttattggattataaccgctaaagactcaactcagatctaccaggcgaagaagggcaatggagctatcgtgagccaggtaaaagcactccgtagcagacatattctcgcttattcctcagtcatgcaacccttcccggacaaagccttccttagtctggcatcagacacagtcgaaccaacgattctcaatgcaactaatacatcactcaccattaggttgcctctggccaaaaccaatctcacctggtatggcattaccagcccgactcctacctacctggtctactatgcagaggttaatgatcgcaagaactcgtcagatctaaaatatcggattttggagtttcaggattccatagcattgatcgaagacctccagccattctctacctacatgattcagattgcagttaagaactactactcagatccattggaacaccttcctcccggcaaggaaatctggggaaaaaccaaaaatggcgtccctgaagctgtccagctgattaataccacagtgcgcagtgacacctctctgattatatcctggagagagtcccacaaaccgaacggccccaaagaatccgtgcgttatcagttagccatctcccatcttgcactgatccctgagaccccgctccggcaatccgagtttcccaatggcaggctgactcttctggtgactcggctgtcaggaggcaatatctacgtgttgaaagttctcgcttgccactccgaagagatgtggtgcactgaatcccacccagtaacggtggagatgtttaatacacctgaaaagccatatagtctggtgcccgagaatactagccttcagtttaactggaaagcaccacttaatgtgaacctaattcgcttctgggtcgaactgcaaaagtggaaatacaacgagttctaccacgtgaagacctcatgctctcaaggcccggcgtatgtctgtaacatcaccaacctgcagccctacacaagctataacgtcagagtggtagtcgtttacaagacaggagagaattctacatctctccccgaatccttcaagaccaaagcaggagttcctaataagcccggtattcctaaacttctcgagggctcaaagaactcaatacagtgggagaaagcggaagacaacggctgtagaattacatattacattttggagatcagaaaatccacaagcaacaacctgcagaaccagaacctcaggtggaagatgactttcaacggctcatgttcctctgtgtgcacatggaaaagtaagaatctgaaggggatcttccagttcagagtggtggctgccaacaacctgggatttggggaatatagtggaatctctgagaatatcatactcgtgggagacgacttctggattcccgagacttcctttatcctaactattatagtcgggatcttcctggttgtcacgattcccctcacttttgtctggcacagacggcttaagaatcagaaaagtgccaaggagggagtaactgtactgataaacgaagacaaggagctggcagaactaagggggttggccgcaggagttggtctcgcaaatgcctgctatgctattcatacgctgcctacccaggaggaaatagaaaacctgcctgcctttcctagagagaagctcactcttcgactcctgctcggttctggcgctttcggggaggtgtatgaaggtaccgcagtcgacatccttggggtaggaagcggtgagatcaaggtcgccgtgaagacactgaagaaaggttccactgaccaggaaaaaatcgagttcctcaaggaggctcacttgatgtccaaattcaaccaccccaacatcctcaaacagctgggcgtgtgcctgctaaacgaaccgcagtatatcatcctggagctgatggaaggtggggatctgttgacgtacctgaggaaggctcggatggcaaccttctacggtcctctcttaacactcgtagaccttgtcgacttgtgcgtagacattagtaaagggtgcgtctatctggaacgaatgcattttatccacagagacctcgcagcccgcaactgtttagtgtcagtaaaagactacacctccccgcgaatcgtaaaaatcggggattttggtctggctagggatatctataagaatgactattaccgtaagcgtggtgaaggactcctgccagtaaggtggatggcccctgaatcactgatggatggaattttcaccacacagtccgatgtgtggagctttggaattttgatttgggagatcctgaccctcggacaccagccataccctgcacattccaacctggatgtgctgaattatgttcaaacaggcggcagactcgagccacctcgcaactgtcctgatgacctgtggaatcttatgactcagtgctgggcccaagagccagaccagagacctacttttcacaggatacaggaccagcttcagctttttcgaaattttttccttaatagcatctacaaaagtcgagacgaagctaacaactcaggcgtcatcaatgagagtttcgagggtgaggacggcgacgttatctgcctgaactcagacgacatcatgccggtggcgctgatggaaaccaagaatcgagagggattaaattatatggtgcttgctacagaatgtggacagggggaggaaaagtcagaagggcctctgggtagtcaggaatcagagagttgcgggcttagaaaggaagaaaaagagccgcacgccgataaggacttttgccaggagaaacaggtagcctactgcccctccggaaaacctgagggtctgaattacgcctgcttaacccactccgggtacggagatggctctgactag

SEQ ID NO: 183963 - DNA, 7044 bp, synthetic construct
  misc_feature 1..7044: note = Description of Artificial Sequence: Synthetic coding sequence
  source 1..7044: mol_type = other DNA
atgaagaacatctactgcctgatccccaagctggtgaacttcgccacattggggtgcctgtggattagcgtagtccaatgcaccgttctgaattcgtgtctcaaaagctgcgtgacaaacttgggtcagcagctcgaccttggcacaccccataatctgtctgagccgtgtatacaaggttgtcacttctggaactctgtcgatcagaaaaactgcgctctcaaatgcagggagagctgcgaggtcgggtgctcatctgcagaaggcgcctatgaggaggaagttttagaaaatgcggacctacctactgcccctttcgcgtcaagcattggcagccacaatatgaccctgagatggaagagcgccaatttcagcggagtcaagtacatcattcagtggaagtacgcccagctgctcggcagctggacctatacaaagacagtcagtcgcccctcctacgttgtgaagcccctccatccatttaccgagtatatttttcgcgtggtgtggattttcacagcccaactgcaattatatagcccgccgagtcctagttatcgcacgcatccccacggggttccagagaccgcaccactgattcgcaatatcgagtctagctcgcccgatactgttgaggtcagctgggatcctccacagttcccgggaggccctattttaggctataatttgcgcttgatttccaaaaatcagaagctggacgcaggaacccagagaactagttttcagttttactcaacactgccgaatactatttaccggtttagtatagctgccgtgaacgaagtgggcgagggcccagaggcagaatcgagcattacaacatcatccagtgccgtgcagcaggaagaacagtggcttttcctgtcaagaaaaacctccctgcggaaacgctcccttaaacatctggtggacgaagcacactgcctgcgcctggacgctatctatcataatataacgggcatctcagtagatgtgcaccaacagattgtgtacttcagcgagggcacactcatctgggcgaaaaaagctgcgaatatgtccgatgtgtccgacctacgcatcttctacagaggtagcggtctgatcagcagtattagtattgactggctttatcagagaatgtatttcatcatggacgagctagtctgcgtgtgcgatcttgagaattgctctaatatcgaggaaatcacgcctccttccatctcggccccccagaagatcgtggcagattcttataacggttatgtcttttatcttctcagggatggcatctacagagctgacttacctgttccttccgggcggtgtgccgaggcagtcagaattgtggaaagctgtaccctcaaggacttcgcaattaaacctcaagctaagaggatcatctatttcaacgataccgctcaggtgtttatgagcactttcctggatggatcagcctctcacttgatacttccaaggatccctttcgccgacgtgaaatccttcgcctgtgagaataacgattttttggtaactgatggcaaggtaatttttcagcaggatgccctgagtttcaatgagttcatcgtaggttgcgacctctctcatattgaggagtttggatttggtaacctcgtgatctttgggagcagcagccagctgcacccacttcccggtagacctcaggagttgagcgtgctgtttggctcgcatcaagcgctcgtacagtggaagccaccagctctggctatcggtgctaacgttatcctgatctccgacatcatcgaacttttcgaactaggcccttccgcctggcaaaactggacatacgaggtcaaggtgtcaactcaggaccccccagaggtaacacacatttttctgaacatctctgggacaatgctgaacgttccagaattacagtccgccatgaaatacaaagtgtctgtgcgcgcatcaagcccaaaaaggcctggaccatggtcagaaccatcagtcgggaccactctggtgcccgcatctgaacccccgttcataatggcagtgaaagaggacggattatggtcaaaaccactcaactcattcggaccaggcgagttcctttcaagcgacattggaaatgtgagtgacatggattggtataacaatagcctctactattcagataccaagggggacgtgttcgtgtggctcctgaacggcaccgacatttctgagaattaccatctacctagcatagccggagctggtgccctggcctttgaatggctggggcactttttatactgggcaggcaaaacctatgtgattcagcgccagtcagtccttactggacatacggacattgttacacatgtgaagctcctggttaatgatatggttgtcgacagtgtgggcggttacctgtattggaccactttatactcagtcgagtctactcgactaaatggggagagcagcctggtcctccagacccaaccttggtttagcgggaaaaaggtcatcgctctgaccctggatctatccgatggtctgctttattggttggtgcaagactcacaatgcattcacctctacaccgcagttctgaggggccagtctacaggcgataccacaatcaccgaatttgccgcttggtctacatccgagatttcccagaacgcattgatgtactactctgggcgcctgttctggatcaatgggttcagaatcattacgactcaagaaattggccaaaaaacgtccgtcagcgtgctcgagcctgctcgattcaatcagtttacaataatccagacgagtctgaagcccctgcccggcaacttttcattcacccctaaggtgatcccggactctgtgcaggagtcaagcttcaggattgaaggtaatgcctcctccttccagattctctggaatggcccgcctgccgtggactggggcgtcgtcttctatagtgtggaattttctgcccacagtaagtttttggccagcgagcaacatagcctgccggtgttcacagtcgagggactcgagccatacgccttgttcaatctctcagtcactccttacacctactggggcaaaggccccaagacctctctgtccctccgagcccccgagactgtgcccagtgctcctgaaaaccccaggatctttattctgccctcagggaagtgctgcaacaaaaatgaagtagtcgtagagttcagatggaacaagccaaagcacgagaacggggtgctaacgaaatttgagatcttctataatatttccaatcagtctattaccaataagacttgcgaggattggatcgccgtgaacgtgacaccgtctgtgatgtcgttccagttggaaggcatgagcccgcgctgcttcatcgcctttcaggtccgggcctttacttctaaggggcccggaccatatgccgatgttgttaagagcacaacttctgaaattaatccattcccacacctgattacattgctgggcaataagatcgttttccttgatatggaccagaaccaggtggtatggaccttcagcgccgagagggtgatctcagctgtgtgctacacagccgacaatgaaatgggctattatgctgagggagacagcctctttctattacacttgcataaccgaagctcttcagaactgttccaagacagcctcgtgtttgacataaccgtaatcaccatcgattggatctccaggcacctgtatttcgctttaaaggaaagccagaacggaatgcaagtattcgacgtcgacctcgaacacaaggtgaaatatcccagagaggtcaagatccacaaccgcaacagtactattatcagtttttcggtgtatccgttgttatctcggctgtattggaccgaggtgtctaatttcggctatcagatgttctactattcgatcatatcacacacactgcacaggatccttcagccaacggccacgaatcagcagaataaacgtaaccagtgcagctgtaacgtgacagagtttgagctctctggagccatggctatagacacctcaaacctcgagaagcccctaatttactttgcaaaagctcaagagatctgggccatggatctggagggatgccagtgctggagagtgataaccgtccccgcaatgcttgcgggaaagactctggtgtcactaacggtggatggggatctgatctactggatcattactgccaaggattccactcagatctatcaggcaaaaaaaggcaacggggccattgtaagtcaggtgaaggcccttcgctccaggcatattctcgcctacagcagtgtaatgcagccgtttccagacaaggcctttctatctctggctagtgataccgtcgagccgactattttgaatgcaacaaacacgagcctaacaatacgactccccttagcaaagaccaacctaacctggtatggaattacctcccctacccctacttacttagtgtactacgccgaagtgaacgaccggaaaaactcgtcggatctgaaatacagaattctcgagttccaggattctatcgccctcattgaggatttgcagccattcagcacctatatgatacaaatcgcagtaaaaaactattatagcgatcccctggagcaccttccacccggcaaagagatctggggaaagaccaagaatggggtgccagaggcggtgcaattaatcaacactaccgtgaggagtgatacaagtcttatcattagctggagagagtcccacaagccgaatgggcccaaggagagtgttaggtaccagcttgcaattagtcacttagctctgatccctgagacacccttgcgacaaagtgaattccctaacggaaggctcacattgctcgttacaaggctctctggtggaaatatttatgtgctcaaggtactcgcgtgtcactctgaagagatgtggtgtactgaatcccaccccgtaaccgtcgaaatgtttaatactccagaaaaaccctactctctggtgcctgagaacacttcactccagtttaactggaaagctccgttaaatgtgaatctaatcaggttttgggtggagcttcaaaaatggaaatataacgaattctaccacgtgaagacgtcctgttcccagggtcccgcatacgtgtgcaacattactaatctgcagccttatacttcatacaacgtgcgcgtcgtcgtggtgtacaagacgggggagaactctacaagtctgcccgagagctttaaaaccaaggcgggtgtgccaaataagcccgggattcccaaactcctcgagggcagcaaaaactccatccagtgggagaaggctgaagataacggctgccgcattacttattatattctcgagattagaaagtccactagtaataacttgcagaaccagaacctaaggtggaaaatgacattcaatggaagttgtagctccgtctgtacttggaaatctaagaatctgaagggcatcttccaattcagggttgtagcggctaacaatctcggtttcggagaatatagcgggattagcgaaaatattattcttgttggagatgatttctggattcctgagacatcattcattctaactatcatcgttggcatatttctggtggtcacaatacctttgacgttcgtgtggcatcgccgcctcaagaatcagaagtctgccaaggagggggttacggtgctcattaacgaggataaagaattggcggaactgagaggtttagcagcaggggttggtctggccaacgcctgttatgcaattcacaccctccctacgcaggaagagatcgaaaatctgccagcctttccccgggaaaagctgactctgcggctcctccttggaagcggagcctttggcgaggtatacgagggaaccgccgtcgatatcctgggcgtggggagtggcgagattaaggtggccgtaaagacactgaagaagggctctacagaccaagaaaagatagagttcctgaaagaagctcatctaatgtccaaattcaatcatcctaacatcctaaagcagctcggtgtgtgtctgcttaacgagccccagtatattattttggagttaatggaggggggggacctgttaacctacctcagaaaggcacgcatggccaccttttatggacccttgctgacattggtggacctggtggatctctgtgttgatatctcaaagggatgcgtgtatctggaacgcatgcactttattcatagagatctggctgccaggaactgcctggtgagcgttaaggactacactagccctaggattgtgaagattggcgatttcggactagcacgggatatttataaaaacgattactaccgaaagagaggggaaggtctccttcctgtacgctggatggcccctgaatccctgatggacggaatctttactacccagagcgatgtctggtcatttggtatactgatctgggagattctgacacttggccaccagccctaccccgcccattctaatctggatgtgctcaattacgtgcagactggaggccgcttagaacctccgaggaactgccctgatgatctatggaatttaatgacccagtgctgggcacaggagccagaccagaggccaacatttcaccgtatccaagatcagctccagttgttccggaacttctttctgaattctatctacaaaagtcgtgacgaggcgaataactctggggttataaacgaaagcttcgaaggcgaggacggggacgtcatctgcctgaacagcgatgacatcatgccagtggcactcatggaaactaagaaccgcgagggtcttaattatatggtgctggcaaccgagtgcggtcagggtgaggagaagtccgaaggacctctgggtagccaggaatctgaatcatgcgggctgaggaaggaggagaaggaaccgcacgcagacaaggacttctgtcaggagaaacaagtcgcatattgtcctagcggtaagccagaaggcctcaactacgcttgcctgactcattctggctacggtgatggatctgattag

SEQ ID NO: 183964 - DNA, 294 bp, synthetic construct
  misc_feature 1..294: note = Description of Artificial Sequence: Synthetic coding sequence
  source 1..294: mol_type = other DNA
tggaagtacaacgagttctaccacgtgaagaccagctgcagccagggccccgcatacgtgtgtaacatcaccaatctgcagccttacacctcatacaacgttcgcgttgtggttgtttacaagacgggagaaaactcaacaagtctgcctgagtccttcaagaccaaggctggtgtgcctaataagcccggaattccaaagcttctcgaggggagtaagaacagcattcaatgggagaaagccgaggacaacggctgcagaattacctactatatcctggagattcgggattag

SEQ ID NO: 183965 - DNA, 2025 bp, synthetic construct
  misc_feature 1..2025: note = Description of Artificial Sequence: Synthetic coding sequence
  source 1..2025: mol_type = other DNA
atgaccagcaacggcgtggccctgctgaacttctacaacatgcccagcaccccatcttttgtggggtgtctgcaggacataaaaatagattggaatcacattaccttagagaatatttcatctggatcctcgctgaatgtgaaagcaggctgcgtgcgaaaagattggtgcgagagccagccttgccagtctcgcggccgctgcattaatctatggctttcataccaatgtgattgtcatcgtccttatgagggtcccaactgcttaagggagtacgtggccggacggtttggccaggatgacagcacaggctacgtgatctttacgctggatgagtcctatggagacaccatctctctctccatgttcgtgcgcacattgcagccttcgggtctgttactggctctggaaaactccacgtatcagtacatccgggtttggcttgaaagaggtaggctggctatgttgacgcccaattcaccgaaacttgtggtcaagtttgttctgaatgatgggaacgtgcacctgatcagtctgaagatcaaaccttataagattgagctgtaccagtcttcccagaacctcggctttatctccgcttcaacatggaagattgaaaagggagacgtcatttacatcggcggactaccagacaagcaggagacagaattaaacggaggcttctttaagggatgcatacaggatgttcgcctgaacaatcaaaacctggaattcttccccaatcccacgaataacgcatccctgaatcctgtactagttaatgtgactcagggctgtgcaggcgacaacagctgcaagagtaacccttgccataacggcggcgtctgccacagtagatgggacgacttcagttgttcttgtccagccttaaccagcggcaaggcttgcgaagaagttcaatggtgtggtttttcaccctgcccacatggagcccagtgccagcccgtgctacaagggtttgagtgtatcgccaacgctgtgtttaacggccagtcgggacagatccttttcagaagtaatggaaacatcacaagagagctcaccaacattacatttggcttcaggactcgtgatgccaatgtgattattctgcatgcggagaaggagcctgaattcttaaatatatccatacaagatagccgcctgtttttccagttgcagtcgggtaattctttctatatgctttctctaacgtctctgcagagtgtaaacgacggcacgtggcacgaggtgactttgtctatgacagatccgctgtcacagacatccaggtggcagatggaggtagataacgaaacacctttcgtgaccagcaccattgctaccggctcactcaatttcctgaaagacaatacggacatctacgtaggagatagggccattgacaacatcaaagggcttcagggatgcttgtctacgatcgagataggaggcatatacctctcttactttgaaaacgtgcacggctttattaacaaaccgcaggaggagcaatttctgaagattagtaccaacagcgttgtgaccggttgtctccagcttaatgtgtgcaactccaacccttgcttgcatggaggaaactgcgaagacatttactctagctatcattgtagctgtcccttagggtggagtgggaagcattgcgagttgaacattgatgaatgtttctcaaacccctgtatacatggcaattgttccgaccgggtggctgcctaccactgtacctgcgagcccggttacacaggcgttaactgcgaagtggatatagataactgtcagtcacatcaatgtgctaacggtgccacatgcatcagccatactaatggttacagttgcttgtgctttgggaacttcacgggcaaattctgtagacagagccgtctccccagcacggtgtgtggtaatgagaagactaacctaacgtgctataacggaggaaattgcacagagttccagacagagttgaaatgtatgtgtcgccccggttttactggagagtggtag

SEQ ID NO: 183966 - DNA, 4221 bp, synthetic construct
  misc_feature 1..4221: note = Description of Artificial Sequence: Synthetic coding sequence
  source 1..4221: mol_type = other DNA
atggccctgaagaacatcaactacctgctgatcttctacctgagctttagtttattgatatacataaagaattccttctgtaataagaataatacccgctgcctgtctaattcatgccagaacaattcaacgtgcaaagattttagcaaggataatgactgctcctgtagcgacacagctaataacctggataaggattgcgataacatgaaggacccatgcttcagtaacccctgccaggggagtgccacctgtgtgaatacaccaggtgaaagatcctttctttgcaaatgtcctcctggctatagcggtacaatctgcgaaacaacgatcggcagctgcgggaaaaactcttgccagcacggaggtatctgccaccaagaccctatataccccgtctgtatatgtcctgcgggctacgctggtaggttctgcgagatagatcacgacgagtgcgccagtagcccatgccagaacggcgcggtctgtcaggatggcattgacggttactcctgtttttgcgtgccaggctatcaaggaagacattgcgatctggaagtcgacgaatgtgcttctgatccgtgcaaaaacgaggccacatgtcttaatgagatcggacggtacacatgcatctgtccccataattactctggggtgaattgcgagctggaaatcgacgaatgctggtcccaaccatgtctcaacggcgccacgtgccaagatgcccttggcgcttatttctgtgattgtgcgcccggattcttgggggaccactgtgagctcaataccgatgagtgcgctagccagccctgcctgcatggaggcctgtgtgtcgacggtgagaatagatactcatgcaactgtactgggtccggcttcaccggcactcactgcgagactcttatgcccttgtgttggtcgaagccttgtcataataatgcaacttgcgaggacagcgtagataactacacttgtcactgttggcctggctataccggagcccaatgtgagatcgacttgaacgagtgtaatagtaacccctgccagtccaacggtgaatgcgtagaattgtcaagcgaaaagcagtatggtcgtattacgggattaccatctagtttttcataccacgaagcttccggatatgtatgtatatgccaacccggcttcactgggatccattgtgaagaagatgtgaacgaatgctcctctaacccttgccagaatggcggcacctgcgagaacctgcccggaaactatacctgccattgtccattcgataatctgagtcggaccttctatggcgggagagattgcagcgatattctcttaggttgcactcaccagcagtgcctgaataacggcacttgcattcctcatttccaggacggacaacatggcttttcttgtctctgcccaagtggctacaccggaagcttgtgtgagatcgccactactctgtcattcgagggggatggattcctatgggtgaaatcgggctccgtgactaccaaaggttctgtgtgcaacattgccctccgttttcagactgtccagcctatggccttactactgttccgcagcaaccgggacgtgtttgtgaagctggagctgcttagcgggtacatacacctttccatccaagtgaataatcagtcgaaggttctgctcttcatttcccacaacacgagcgacggggagtggcacttcgtcgaggtgatctttgccgaggctgttacacttaccctgattgatgacagctgcaaggagaaatgtatagccaaagccccaacccctttggagtctgatcaaagcatttgtgcattccagaattcatttctaggtgggctgccggtaggtatgactagcaatggagtcgcactgctcaatttttacaatatgccatctacaccatctttcgtggggtgcctgcaggatatcaaaatcgattggaatcacatcacactggagaacataagcagtggtagctccttaaacgtcaaggcaggctgcgtgcggaaagactggtgcgagagccagccctgtcaaagtcgaggccgttgcatcaacttgtggttgtcctatcagtgtgactgccatcggccttacgaggggccgaactgtctgcgtgagtacgtcgccggcaggttcgggcaggatgactccaccggctacgtgattttcacccttgacgagagctatggggataccatctccctgagcatgttcgtgcgcactctgcaacctagcggacttctgctagccctggaaaacagtacctatcagtacatcagggtgtggctggaacgagggaggctggcgatgctgacccccaattctcctaagctggtggtcaagtttgttctcaacgacgggaacgtccacttaatctcgctgaagattaagccgtacaaaatagaactttatcaaagctcacagaaccttggcttcatcagtgcgtccacttggaagatagaaaaaggggatgtgatctatatcggcgggctcccggacaagcaagaaacagagctgaacggcggtttctttaaggggtgtattcaagatgtccgcctaaacaatcagaacctggaatttttccccaacccaaccaacaatgcctcgctgaatcctgtgcttgtcaacgtgacacagggttgcgcgggggataactcctgtaaaagcaacccgtgccacaacggcggtgtatgccactctcggtgggacgacttcagctgctcatgccccgcccttacatccgggaaggcctgtgaggaggtccaatggtgcgggttctctccttgtccccatggcgctcagtgtcagccagtattgcaaggattcgaatgtattgccaacgctgtattcaatgggcagtccggacagattctgtttcgttctaacggcaatattacccgggagctaacaaacatcactttcggattcaggacccgcgatgctaatgtgattatcctgcacgccgagaaagagcccgagtttctgaacataagcatccaggattctagacttttcttccagttgcagagtggcaacagcttttacatgctgtccctcaccagtctccaaagcgtgaatgatggaacatggcacgaggtgaccttgagcatgactgatccgttgtcacagacctcaagatggcaaatggaggttgataacgagacaccatttgtcacaagcaccattgcgaccggatctctcaactttttgaaggataacacagacatctacgtcggggatagagcgattgacaacattaaggggctgcagggctgtctttcaacaattgaaatcggtggtatttacctgtcttatttcgaaaacgtccatggcttcattaataagccccaagaggagcagttcctgaaaatctcaaccaatagcgtggtgacaggctgcctacaacttaatgtctgtaactctaacccttgccttcacggtggaaattgtgaagacatttactccagctaccactgtagttgcccgctgggctggagcggtaagcactgcgagctgaacatcgacgagtgctttagcaatccctgtattcacggcaattgcagtgaccgggtcgccgcatatcattgtacatgtgaacccggatacactggagtgaattgtgaagtggacattgacaattgccaatcacatcagtgcgccaatggcgcgacttgcatttcacacactaatgggtattcatgcctctgtttcggtaacttcacaggaaagttttgtcgccagtccagactgccatctactgtgtgcggaaacgaaaaaactaacttaacttgctataacggaggcaattgtaccgagtttcagactgagctgaagtgcatgtgccgaccaggatttaccggcgaatggtgtgagaaggacatcgatgagtgtgcttctgacccatgcgtgaatggcgggctgtgtcaggacttactcaacaaattccagtgtctgtgtgacgtggctttcgccggtgaaagatgcgaagtggacctggcagacgacctcatatccgatatattcactaccatcggatccgttaccgtcgctttgctgcttattctgctgctggctattgtggcctcagttgtgacatcaaacaaaagagccacccagggaacatatagccccagtagacaagagaaggaggggtccagagttgaaatgtggaatttgatgccaccgcctgccatggaaaggttgatctag

SEQ ID NO: 183967 - DNA, 2826 bp, synthetic construct
  misc_feature 1..2826: note = Description of Artificial Sequence: Synthetic coding sequence
  source 1..2826: mol_type = other DNA
atgatccggaacagcctgtgccagcccagccggtgcctggacggctacctcttttttaatcggaagatgttcggcgcccgcacccatggtttccacattttgatggcaatgctgatcggcatccattgtgaagaagacgtgaacgagtgctcaagcaatccatgccagaatggcggcacatgcgaaaatctcccaggtaactacacttgccactgtcccttcgacaatctgtctagaacgttttacggcggcagagattgttctgacattttgctgggatgtacccaccagcagtgtctgaacaacggtacctgcattccgcattttcaggatgggcaacacggtttcagctgcctctgtccctccggatatactggttcgttgtgcgagattgctactacattgagcttcgaaggcgatggattcctttgggtgaaatccggatctgtgaccacgaaggggagtgtgtgtaacattgcccttcgttttcaaacagtgcaacctatggctttgctgctattccgttctaacagagacgtatttgtcaaacttgaattactgagcggatatattcacctaagtatacaggtgaacaaccagtccaaggtgttgctgttcatctcccataatacgtctgacggagagtggcatttcgtcgaagtgatattcgctgaagcagtcaccctcactctgattgacgattcctgcaaggagaagtgcattgcaaaagctcctacgccccttgaatccgaccagtcaatatgcgctttccagaattcctttttgggcggattgcctgtgggcatgaccagcaatggcgtggcattgctgaacttctataatatgccttctactccaagcttcgtgggttgtctgcaagatatcaagattgattggaatcacatcacgctagaaaacatttcttcaggtagttccctgaacgttaaggcaggctgtgtccgcaaggattggtgtgagagccagccatgtcagtcccgcggtcgatgcattaacttgtggctgagttatcaatgcgactgtcacaggccgtacgaaggacctaactgtctgagagaatatgtagcaggacgatttgggcaagacgacagcacaggctacgttatctttaccttagacgagagctatggagacaccatctccctaagtatgttcgtcagaactcttcagccatcgggcctgttgctcgctttagagaattctacttaccagtacatccgggtttggttagagaggggtaggctggcaatgctcacaccaaacagccctaaactggtggtgaagtttgtgcttaacgacggaaatgtacatctgatcagcctgaaaatcaagccctacaagattgagctgtaccagagcagtcagaacctcgggtttatatccgctagcacctggaagattgagaaaggggacgtgatctacatcggcggactgcctgataaacaggagaccgaacttaacggcggcttcttcaaagggtgcatccaagacgtgagacttaacaaccagaacctggaattttttccaaaccctaccaataacgccagcctgaacccagtcctggttaatgtaacacagggttgcgccggcgacaattcatgtaagtcgaatccgtgtcacaatggaggggtatgccactcccgctgggatgacttttcctgtagctgcccagcacttaccagcggaaaagcctgcgaagaggtgcagtggtgcggtttttccccttgtccacatggcgcacaatgccagccagtgctgcaggggttcgaatgtattgctaacgctgtcttcaacggacaatctggacagatcctgtttaggtctaacgggaatatcactcgggagcttaccaacatcactttcggctttcggaccagggatgcaaatgttatcatactccatgccgaaaaggaacccgagttcctgaatatctccattcaggactctaggctttttttccagctgcagtctgggaattccttttacatgctgtctctgacaagtttgcagagtgtcaatgacggcacttggcatgaagtgacgctctccatgactgatcctctgtcacaaacatccaggtggcagatggaggtggataatgagacgccctttgtgactagtaccatcgctacggggagcttaaactttctcaaggataataccgacatctatgtgggggaccgagccattgacaatatcaaaggcttgcagggttgcttgagcacaatcgagatcggcggaatctatctatcttatttcgagaacgtgcacgggtttattaataagcctcaggaggagcagttcctgaagataagtacaaactctgtggtgaccggctgcctgcagctcaacgtttgcaacagcaacccatgcctgcatggaggcaattgcgaggatatttacagctcctaccattgtagctgcccactggggtggagcggaaaacattgtgaattaaacatcgacgagtgcttctccaatccgtgtatccacggtaactgctccgatcgagtggccgcttaccattgcacctgcgaacccggctacaccggtgtcaactgtgaggtcgatattgacaattgccagtcccaccagtgtgcgaacggcgcgacatgcatttctcacactaacggttactcttgtttatgctttggaaatttcacggggaagttctgccggcagagcagactcccttctaccgtatgtggcaacgagaagactaacttgacttgttacaatggcggaaactgtacagaattccagactgaactcaagtgtatgtgccgtcccggcttcaccggcgaatag

SEQ ID NO: 183968 - DNA, 129 bp, synthetic construct
  misc_feature 1..129: note = Description of Artificial Sequence: Synthetic coding sequence
  source 1..129: mol_type = other DNA
gagaaggacatcgacgagtgcgccagcgacccctgcgtgaacggcggcttgtgccaggacctcctgaacaaattccagtgcttgtgcgatgttgccttcgcaggcgagaggtgcgaagtcgattactag

SEQ ID NO: 183969 - DNA, 4149 bp, synthetic construct
  misc_feature 1..4149: note = Description of Artificial Sequence: Synthetic coding sequence
  source 1..4149: mol_type = other DNA
atgaaggacccctgcttcagcaacccctgccagggcagcgccacctgtgtgaacacccctggtgaaaggtcatttctttgtaagtgccccccagggtacagcggtacgatttgtgaaactactatcggctcctgtggcaagaacagctgtcagcacggcggtatttgtcatcaggatccaatctatccggtgtgtatttgccccgcaggctacgccggaagattctgcgaaattgatcatgatgagtgcgcgtcatcaccatgccagaacggtgccgtgtgccaggatggcatcgacggttattcttgtttctgtgtgcctggctaccaaggacggcattgtgacctggaggtggacgaatgtgctagtgacccctgtaagaacgaagcaacatgcctgaatgaaatcggcaggtatacttgcatttgtccccacaattactccggagtaaactgcgaattggagattgacgagtgctggtcccagccttgcctcaacggtgccacgtgtcaggatgcgctgggcgcgtatttctgtgactgcgcgcctggctttctgggtgatcactgtgaattaaacacggatgaatgcgccagccagccttgccttcacgggggtttgtgcgtggacggtgaaaatcgatactcttgcaattgcacaggttccggtttcactggcacacattgtgagaccctaatgcccctgtgctggagcaagccctgccataacaacgctacgtgtgaggacagtgttgataactatacctgtcactgctggccagggtacactggggcccaatgtgaaatcgatctcaatgaatgtaattccaacccgtgccaaagtaacggggagtgtgtcgaactgtcttccgagaagcagtacggtcggattactggactgccatcaagctttagctatcacgaggcatccggatatgtgtgtatttgccaacctggatttactggaattcattgtgaggaagacgtgaacgaatgttcctccaatccatgccagaatgggggaacctgcgagaacctgcccggcaattacacatgccactgcccattcgataacctcagcagaaccttttacggcggtcgggactgttctgatattctgctgggctgcacacaccagcagtgtctgaacaacggcacctgcatccctcattttcaggacggccagcatggatttagctgtctatgtccgtccggttacacagggtccctgtgcgaaatcgccacaactctcagtttcgagggggatggctttttatgggtcaaatctgggtctgtgacaaccaaaggaagcgtgtgcaacatcgcactgcgctttcagactgtccagcccatggcccttctgctgttcaggtctaaccgcgacgtgttcgtgaaactggagctgctgtccggttacattcacctgtcgatccaggtcaacaatcaaagtaaggtactgctttttattagccacaatacctccgatggggagtggcacttcgtcgaagtgatcttcgccgaggccgtgaccctcactcttattgacgactcttgcaaggaaaaatgcatcgccaaggccccaaccccccttgagagtgaccaaagcatctgtgcatttcagaacagcttcctagggggtttgcccgtggggatgaccagcaatggcgtcgccctgttaaatttttacaacatgccttccacaccctcctttgtggggtgcctgcaggatattaaaatcgactggaatcatattaccctggaaaacatcagttctgggtcctcattaaacgttaaagctggctgcgtgcgcaaggactggtgtgaaagtcagccgtgccagtctcgggggaggtgtatcaatctctggctttcgtaccagtgcgattgccatagaccttacgagggtccaaactgcctacgggagtatgtggccggaagattcgggcaggacgatagtactggctacgtgatctttacattggacgaatcttatggcgacacgattagtctgtctatgttcgtcaggactttgcagccttccgggcttctcctcgcattggagaacagtacataccagtatatcagggtctggcttgagaggggacgcctggcaatgctcacaccaaattcaccaaaactggtggtgaaatttgtgttgaacgacggaaatgtgcatctcatttcactgaagattaaaccttataagatcgaactatatcagtcttcccagaacctgggcttcatcagtgctagtacttggaagatcgaaaagggggacgtgatttatattggaggactcccagacaagcaggaaaccgagctcaacggcggttttttcaagggctgcattcaggacgttcgactgaataatcagaatctagaattctttcctaaccctactaataacgcatcacttaatccggtcttagtaaacgtgactcaaggttgcgctggcgataactcgtgcaagagacagaccaatgtgggtcgggcgctgacggaactagggtctaggggcccgaaatatcaggttagcctgttccgtttctgcgtgggctcctgggccacaggcaacacgttttttctgagcagtataaaacctggctctaacccttgccacaacggaggagtctgccactctcgatgggacgactttagctgtagctgccccgcgctgacatcgggaaaagcttgcgaggaagtgcagtggtgtggcttctccccctgcccacatggggcgcagtgtcaaccagtcctccagggattcgagtgcatcgcgaacgctgttttcaacggtcagtcaggccagatcctttttcgttcaaatgggaacatcaccagggagctcaccaatatcacctttggattcaggacccgagacgcaaacgtcatcatactgcatgcagaaaaagagcctgaattcctgaacatttcgatacaggattctcggctgtttttccagctgcagtctggcaactccttctacatgctctcattaacgagcttgcagagcgtgaatgatggcacgtggcacgaggtgaccttgagcatgacagacccactctcgcagacatctcgttggcagatggaggtggataacgaaactcccttcgtaacgagcacaattgccactggctccttgaattttcttaaggacaacacggatatctatgtcggcgatcgcgccatcgacaatattaaagggctacagggctgtctgagcaccattgagatcggtggaatctacttgagctacttcgaaaatgtgcatggtttcatcaacaaacctcaggaagaacagttcctcaaaatctccacgaacagcgtagtcaccggttgcctccagttgaacgtatgtaactccaatccttgtttacatggtggcaattgtgaggatatatactcctcataccactgctcctgccccttggggtggagcgggaaacattgtgaactcaacatagatgagtgtttctctaacccttgtattcatggaaactgctcggatcgggtggccgcatatcactgcacctgtgaacctggctatacaggcgttaactgtgaggtggacattgataattgtcagtcacatcagtgtgccaacggtgccacatgcatcagccacaccaatggctattcgtgcctgtgtttcggcaattttactggtaagttttgtcgtcagtccagattaccctccacagtgtgtggcaatgaaaagacaaacttgacgtgctataacggtggcaactgcaccgagtttcagaccgagttaaagtgtatgtgtcggccaggcttcacaggcgaatggtgtgagaaggatattgacgaatgtgccagcgacccatgcgttaatggcggcctttgccaggacctgttaaacaagttccagtgtctgtgtgatgtggctttcgccggagagcgatgtgaagtagacctggcagatgacctaatcagtgacatcttcacaactatcgggtccgtgactgtcgcgttattgctcatcttgcttctcgccatcgtggcctctgtggttacctccaataagcgggcgacacagggtacttattcgccgagccgacaggagaaggaaggcagccgcgtagagatgtggaaccttatgccacccccagccatggagcgattaatctag

SEQ ID NO: 183970 - DNA, 2613 bp, synthetic construct
  misc_feature 1..2613: note = Description of Artificial Sequence: Synthetic coding sequence
  source 1..2613: mol_type = other DNA
atggccctgaagaacatcaactacctgctgatcttctacctgagcttttcactgttgatctacatcaagaactccttctgtaacaaaaacaatacaagatgcctcagcaacagttgtcagaacaattctacttgtaaggacttctcaaaggacaacgactgctcctgctccgacactgccaacaacttagacaaggactgcgataacatgaaagacccatgctttagcaacccgtgccagggatcagccacttgtgtcaataccccaggagagaggagctttctttgcaaatgtcccccggggtactcagggaccatttgtgaaaccactatcggtagttgtggaaagaattcatgtcagcatggcggaatctgccatcaggatccaatttaccctgtctgtatttgcccggccggctatgccggacgcttctgtgagatcgaccacgatgagtgcgcctctagtccctgtcagaacggggccgtctgtcaggacgggatagacggttattcttgtttttgcgtgcccgggtatcagggccgccactgtgaccttgaggttgacgagtgtgctagcgacccctgcaaaaacgaggccacttgcctcaatgaaattggcaggtatacatgcatctgccctcataattatagcggtgtaaactgtgagctggagatagacgaatgctggagccagccttgcctaaacggagctacatgccaggatgcgttaggggcttatttttgcgattgtgcccctgggtttctcggggatcattgtgagctcaatacagacgagtgcgcctcacagccctgcctgcatggcggactctgtgtagatggggagaatagatactcttgcaattgtacagggagtggttttacaggtacccattgcgagacgttaatgcctctgtgttggagtaagccctgtcacaataatgcgacttgtgaagattccgtcgacaactatacctgccactgctggcccgggtataccggggcacaatgcgaaatcgatctgaacgagtgtaattccaatccatgtcagtccaacggcgaatgtgtagagctcagcagtgagaagcagtatggaagaataaccggattgcccagcagcttctcttaccatgaagcgagcggatacgtgtgcatttgtcagcccggatttacaggaattcattgcgaggaggacgtgaatgagtgctctagcaatccatgccaaaatggggggacatgtgagaatctccctggtaattatacatgtcactgtcccttcgataacctgtcacgcacattctacggtgggcgcgactgttcagatatccttttagggtgtactcaccagcagtgtctgaacaacgggacttgcataccccactttcaggatggacagcatggcttctcttgcctctgtccttccggatacaccggcagcctgtgcgaaatagcaacaacattatcctttgaaggggatgggttcctctgggtgaaaagcggttctgttaccactaaagggtcagtctgcaacatcgcactgaggtttcagaccgtccagccgatggcactgttactgttcagaagtaacagggacgtctttgtgaaacttgagctcctatctggctatattcacctgagcatccaggtcaacaatcagtcaaaggtcttgctgtttattagtcacaacacctcggatggcgagtggcacttcgtcgaagtgattttcgctgaggccgtcaccctcaccttgattgatgatagttgcaaagaaaaatgtatcgccaaggcccccacacccctcgagtcggatcagtccatttgcgcctttcagaatagcttccttgggggactaccagtcggcatgacgagcaatggagtggcactgctgaatttttataacatgcctagcaccccttcgtttgtcggctgcctccaggatatcaagattgactggaatcatattacgctagagaacatctcaagcggaagcagcctcaacgtcaaggctggctgcgtgcgcaaggactggtgcgagagtcaaccatgccagtcgaggggacgctgcattaatctgtggctgtcctaccagtgtgactgccatcgcccttacgaggggccaaattgcctaagaggaaagttctgccggcagtcccgactgccttccacagtatgtggaaatgaaaagacaaacctgacgtgctataacggcggtaactgcaccgaatttcaaaccgaactcaaatgtatgtgtagacctggatttactggtgagtggtgcgagaaggacatagatgaatgcgcttcagacccatgcgtgaatggtggcttgtgtcaggatctactgaataaattccagtgtctatgtgacgtcgctttcgcgggagagcggtgtgaggtcgatctggcagatgacttaatcagtgatatatttaccacaatcggttcagtgactgtagcactcctcctcatcctgctgctggccatcgtggcttctgtggttacctccaacaagagagccacccagggaacttacagtccatcccgccaggagaaagaggggagtcgcgttgaaatgtggaacctgatgcctcctccagcaatggagcgtctgatatag

SEQ ID NO: 183971 - DNA, 882 bp, synthetic construct
  misc_feature 1..882: note = Description of Artificial Sequence: Synthetic coding sequence
  source 1..882: mol_type = other DNA
atgcccctgtgctggagcaagccctgccacaacaacgccacctgcgaagattcagtggataactatacgtgtcattgttggcccggctacacgggcgcacagtgtgagattgacttaaacgaatgtaattccaatccctgccagtcaaacggcgagtgcgtggagctgagctctgagaaacagtatggccggataacgggcttaccctcgtccttctcctaccacgaggccagcggttacgtgtgtatctgtcagccaggtttcacgggaatacactgcgaagaagacgtcaacgaatgttctagtaacccttgccagaatggtggaacgtgcgagaacttgccaggcaactatacctgccattgtccattcgataacttgtctcgcactttttacggaggcagagactgctctgacattctattgggatgtacgcatcagcagtgtcttaacaacggaacatgcatcccccatttccaggacggccaacatggttttagttgtttgtgtccaagtggttacacaggctctttgtgtgagatcgcaacgactctctcattcgaaggcgatgggtttctgtgggtaaaaagtggaagcgtgaccaccaaggggtctgtgtgcaacatagccttgcgttttcagactgtacagcctatggccctgctcctgtttcggagcaaccgggacgtgtttgtgaagcttgagctcctttccggttatatccacctctcgatccaggtaaataatcaatctaaggtcctgctgtttatctcccacaacacatccgacggagagtggcactttgtagaagcagtgagcaagactcttaaattgattgggattacacttccttggagaacaagccgactggcacaccactag

SEQ ID NO: 183972 - DNA, 2664 bp, synthetic construct
  misc_feature 1..2664: note = Description of Artificial Sequence: Synthetic coding sequence
  source 1..2664: mol_type = other DNA
atggccctgctgctgttccggagcaaccgggacgtgttcgtgaagctcgagctgctgtcagggtacattcatctgagtatccaggtgaataaccagtcaaaggtgctgctctttatcagccataacactagtgacggcgagtggcacttcgtggaagtgatttttgcagaagctgtgacacttaccctgatcgatgattcttgtaaggaaaaatgtatcgccaaggctccaacaccactggagtccgatcagtctatttgcgcctttcagaactcattcctgggtgggcttcctgtaggaatgacctctaatggagttgccttactcaatttctataacatgccttctacaccttcctttgtcggatgtctccaagatattaagattgattggaatcatattacactggagaacattagcagtggctcctcgttgaacgtcaaagctggttgtgtcaggaaagactggtgtgagagccagccatgccaaagccgggggagatgcatcaatttatggttaagctatcaatgcgattgtcataggccctacgaggggccaaactgtctgagagaatacgtggctggacgatttgggcaggacgattcaactggatatgtgatctttaccttggacgagtcttatggcgataccatttctttgagtatgttcgtccgcaccctgcagcccagtggtctcctccttgcccttgaaaacagtacataccaatatatccgcgtctggttggaaaggggacggctcgccatgctaacccccaacagcccaaaacttgtggtcaaattcgtactgaacgacggcaatgtgcacctgatctcactgaagatcaagccttacaagatcgaactgtatcagagcagtcagaatctcggctttataagcgcttccacatggaagatagagaagggcgatgtcatctacattgggggtctgcctgacaagcaggaaactgagttaaacggaggcttctttaagggctgtattcaggatgtccggttgaacaaccagaatctggagttctttcccaaccctaccaacaacgccagtctgaacccagtactggtaaatgtgactcaaggatgcgctggtgacaacagctgtaaaagcaatccttgtcacaacggaggcgtctgccacagtcgatgggatgacttctcctgctcatgccctgccttgacctctgggaaagcctgtgaggaggtacagtggtgcggcttcagcccttgccctcacggtgcccagtgccagccagtgctgcaaggattcgagtgcatcgctaacgcggtgtttaatggtcagagcggacaaatcctgttccgcagtaacgggaacatcacacgggagctcaccaacatcacattcggctttcgcaccagggacgccaacgtgatcatattgcacgcagaaaaggaaccagagttcctgaacatctcgatccaggatagcaggctcttcttccagctgcagtcgggcaatagtttttacatgctctctctgacgtcactacagtctgtgaatgacggtacctggcacgaggtcactctgtccatgactgacccccttagccagaccagccgctggcagatggaggtggacaatgagacccccttcgtaaccagcaccatcgccaccggaagtctgaactttctgaaagacaacactgacatttatgtaggagaccgtgcaatcgacaacatcaagggacttcagggttgtctgagcacaattgagattggtggtatatatctgagttacttcgaaaacgttcatggattcataaataaaccacaggaggagcaattcctgaagattagcacaaactctgtcgtgacgggatgcctgcagttgaatgtgtgtaacagcaacccctgcctgcacggcggaaactgcgaggatatatacagttcctaccactgcagttgtcctctggggtggagcgggaagcattgcgaactgaatatcgacgagtgcttctccaatccttgtatccacggcaattgttcagatcgagtggctgcttatcactgcacctgtgaaccaggatacactggggtgaattgtgaggtggatatcgataattgccaatcccatcagtgtgcaaatggagctacatgcataagtcacacaaacggatatagctgcctttgctttggcaatttcactgggaagttctgcaggcagagtaggctgccttcgaccgtgtgcggcaacgaaaaaaccaatctgacctgctacaatgggggtaattgtaccgagttccagactgagctcaagtgcatgtgtcggcctgggtttaccggggagtggtgcgagaaggacatcgacgagtgcgcgtctgatccctgcgtgaatggcggactctgccaagacctgctgaacaaattccagtgcctctgcgatgtagctttcgccggagagcggtgcgaggtcgacctggctgatgatcttatctccgatatctttacgactattgggtccgtgacggtggccttgctcctaatccttctgttggccatcgtggctagcgttgttacatcaaacaaaagggccacccaggggacctacagcccctctcgccaggagaaggagggatcacgagttgaaatgtggaacttgatgcctccacctgctatggaacgactgatctag

SEQ ID NO: 183973 - DNA, 3885 bp, synthetic construct
  misc_feature 1..3885: note = Description of Artificial Sequence: Synthetic coding sequence
  source 1..3885: mol_type = other DNA
atggccctgaagaacatcaactacctgctgatcttctacctgagcttctccctgctaatctatatcaagaactctttctgtaataaaaataacactcggtgtctcagcaattcatgccagaataattccacctgtaaggacttctctaaggataacgactgctcatgcagtgatactgcaaacaacctcgacaaggattgcgataacatgaaggacccctgtttctctaatccgtgccagggaagcgctacctgtgtgaatactcccggcgaacgatcttttctgtgtaagtgcccacccggatactccgggactatttgtgagactaccatcgggtcatgtgggaagaacagttgccagcatgggggaatctgtcatcaggatccaatttacccagtatgtatatgtccggcgggctatgctggcaggttctgtgaaattgaccatgatgagtgtgctagctcaccctgtcagaacggcgctgtgtgtcaagacggcattgatggctatagctgcttctgtgttcctggctaccagggacggcactgcgatctcgaagtggatgaatgcgcctccgatccatgcaagaacgaggcaacatgcctgaacgaaataggccggtatacctgcatttgtccgcacaattatagcggatataccggagcacagtgtgagattgatctgaacgagtgcaatagcaatccatgccaatctaatggggagtgcgtggaacttagcagtgagaagcagtacggaagaattaccgggttgccctcctcattctcgtaccacgaggcgtccggctacgtttgtatctgccagcctgggtttacgggcatccactgtgaagaggacgtcaacgagtgttcctccaacccctgtcagaacggcggcacatgtgagaatctaccaggcaattatacatgtcactgcccattcgacaacctgagcagaaccttttacggcggccgagactgttcagacatcttgctgggatgcacacatcagcagtgcctgaacaatggaacttgtatccctcactttcaggatggccagcacggattcagctgtttgtgcccctccgggtatacaggctccctttgcgagatcgctaccaccctatcctttgagggcgatgggtttctttgggtcaagtctggctcagtgacgaccaagggcagcgtgtgcaacattgcgctgcgttttcagactgttcagccgatggctctattgctgtttaggagtaaccgggacgtctttgtgaagttggagttgctcagtgggtatattcacctgtcaattcaagtcaacaatcaatctaaggtgctcctgttcatatctcataatacctctgatggtgagtggcacttcgtcgaggtgatttttgctgaagctgttacactcacactaattgatgatagttgcaaggaaaagtgtatcgctaaggcaccaacaccgttggagagcgaccaatccatttgcgcctttcaaaattcgttcttgggaggactgcctgtggggatgacgtctaatggagtggcactgctgaacttttataacatgcccagcacccccagttttgtaggctgtctgcaggacatcaaaatcgactggaatcacataaccctggagaacattagttctggcagcagtttaaacgtaaaggccggttgcgtgcgaaaagactggtgcgaatctcagccctgtcaaagcagggggagatgtattaatctgtggctgtcttatcagtgcgattgtcatcggccttacgaggggcccaattgcctgcgggagtacgtggcaggccggtttggtcaggatgattcaaccggatacgtaatttttactttggatgagagttatggcgatacaatctctctgtctatgtttgtcaggacactccaaccatcggggctgctgttagcactagaaaacagcacatatcagtacatccgagtgtggctggagagaggaaggctggctatgctcactcctaactcacccaagctggtagtcaaatttgtccttaacgacgggaacgtgcatcttatctcccttaaaattaaaccctacaagatcgagttgtatcagtcatcccagaatctcggtttcattagcgcttcaacgtggaagatcgaaaaaggcgacgtgatctacataggaggactgcccgataagcaggaaactgaactgaatgggggatttttcaagggctgcatccaggacgtgagactcaacaatcagaacctcgaattcttccctaatccaactaacaatgctagcctgaacccagtgctcgtgaatgtgacccaaggatgcgcgggcgacaatagctgcaagtccaatccttgtcacaacgggggtgtgtgtcactcaaggtgggacgacttttcttgttcctgccctgccttgacaagcgggaaggcgtgtgaggaagtccagtggtgtgggtttagcccctgccctcacggagcccagtgccagcccgttctgcagggattcgagtgtattgctaacgccgtgtttaacggccaatctggccagattttgtttcggtccaacgggaatataaccagggaactgaccaatataacattcggcttccgcactagggatgccaatgtcatcattctgcacgcggagaaagaaccagaatttctgaacatctcaatccaggacagccggttgttttttcagcttcagtctggtaattccttttacatgttgtctctgaccagcctgcagagcgtcaatgatgggacttggcacgaagtaaccctcagtatgactgaccctctcagtcagacttctcgttggcagatggaagtggataacgaaaccccgttcgtgacttccaccattgcaacaggctctctgaacttcctaaaggacaataccgatatttacgtcggagatcgcgcgattgataatattaagggactgcagggatgcctgagcaccatcgaaattgggggcatttatctgagttattttgaaaacgtccacggatttatcaataagccccaagaagaacagtttttaaagatctccacaaattctgtggtgaccggctgccttcagctaaacgtatgtaattctaatccatgcctgcatggtgggaactgtgaggacatatattccagttatcattgctcttgccctctgggctggtccggcaagcactgcgagctgaacatcgatgaatgtttttcgaatccatgtatccacggcaactgctcagatcgcgtcgccgcgtaccactgcacatgcgaaccaggctatactggagtgaactgcgaggtggacatcgataactgtcagtcgcatcagtgtgctaatggtgcaacatgcatcagccacaccaatgggtacagctgtttatgcttcggaaattttaccggaaagttctgccgccagtcccggttgccctcaacagtctgcgggaacgaaaaaactaacctgacctgctacaacggcgggaattgcacagaattccagacagaactgaaatgcatgtgccgtccaggattcaccggagaatggtgtgaaaaggacatagatgagtgcgctagcgatccatgcgtaaatggcggactgtgccaggacctgcttaataaattccagtgtctctgcgatgtggcctttgccggggagagatgtgaagttgatctggcggacgacctgattagtgatatattcaccactattggctcggtgaccgttgccctcctcctgatcctgctgctcgctatcgtggcttctgtcgtgacttccaacaaacgggccacccaggggacttattcgccgtcccggcaggagaaagagggctctagagttgagatgtggaatctcatgcccccacccgcaatggagaggctgatctag

SEQ ID NO: 183974 - DNA, 3531 bp, synthetic construct
  misc_feature 1..3531: note = Description of Artificial Sequence: Synthetic coding sequence
  source 1..3531: mol_type = other DNA
atggccctggcccggcccggcacccccgacccccaggccctggcctcagtcctgttactcctgctctgggcacccgcgctctccctactggcgggaacagtaccatcagagccaccctctgcatgtgcttctgacccatgcgcccctggtacggagtgtcaagcaacagaatcaggtgggtatacctgcggaccaatggagcccagaggctgtgctacacagccatgccatcacggagccctctgcgtgcctcaggggcctgaccccaccggattcagatgttactgcgtccccggatttcagggaccccgatgtgagttggatatcgatgaatgcgcttcccgcccctgccaccacggggcaacctgccggaacctggctgacagatatgagtgccattgcccactgggatacgccggggttacatgtgagatggaagtcgacgagtgcgcatccgctccatgcttacacggtgggagctgtctggacggggtggggtcctttaggtgcgtgtgcgcgcctggatacggcggtacccgctgtcagctagaccttgacgagtgtcaatcccagccttgcgctcacgggggtacctgtcatgacctggtgaacggatttcgctgcgactgcgcaggtacgggctacgagggcactcactgtgagcgggaagttctagaatgtgctagcgctccctgtgagcacaatgcatcttgtctcgaaggtctgggctcttttcgctgtctgtgttggccagggtactctggtgagttatgcgaggtggacgaagatgagtgcgcctcttctccctgtcagcatggaggaagatgtctccagcgctcagacccggccctttacggcggggtgcaggccgcgttccctggcgctttctcttttcgacatgctgcaggcttcttgtgtcactgcccccccggctttgagggggctgattgtggcgtcgaagtagacgagtgtgccagccggccatgcctcaacggggggcattgccaggacctgccaaacggttttcagtgccactgcccagatgggtacgcgggccccacatgcgaagaggatgtggacgagtgtctctctgacccttgccttcacggcggaacttgctccgatactgtcgcaggctacatttgcaggtgcccagaaacatggggtggaagggattgctccgtgcagctgacaggctgccagggtcatacatgcccactggcagcgacatgcattcctattttcgaatccggggtacattcctatgtgtgccactgccctcccggcacacacggacctttctgcgggcagaatacaacgttcagcgttatggccgggagccctatccaggctagtgttccagctggcggaccgttggggctggccttgagattccgcacaacgcttccggcgggaaccctggctaccaggaatgatacgaaggagagcctcgaactcgccctcgtggccgcaacactgcaagcaaccctgtggagctattctacaaccgtcctagtcttaaggctgccagaccttgcactgaatgatggccactggcaccaggtggaagtggtgttacaccttgccacactggaactgcggctgtggcacgaaggctgccctgcccggctgtgtgtcgcctccggacccgtggctctagcaagcacagcgagcgccactccattgcctgccggcatcagcagtgcacagttaggcgatgccacattcgctgggtgcttacaggacgtccgggtcgatggccatctcttacttcctgaggatctcggcgagaacgtgctgctcggttgtgagaggcgtgagcagtgtcggcctttaccttgcgtccatggggggtcctgcgtggatctttggacccattttcggtgcgactgcgccagaccccataggggccctacatgtgcagacgagatccccgccgccaccttcggactggggggtgctccctcgtcagcttcctttttactccaagaattgcccgggccgaacttgaccgtctcgttcttattgagaacacgagagtccgctggattgctgttgcagtttgccaatgatagcgccgccggtctcactgtgttcctgagtgaggggagaatacgggcggaggtacccggttctccagcggttgtgctgccgggacggtgggatgacggcctacgtcaccttgtgatgctatcgtttggaccagatcagttgcaggacctggggcaacacgtgcatgtagggggaaggcttctggcagcagacagtcagccttgggggggccctttccgaggctgtcttcaggatctgcgtcttgatggatgtcatctgccgttctttcccctcccacttgataattcgagccaaccatcggaactgggaggcaggcaaagttggaatcttactgcaggctgtgtttccgaagatatgtgttcccccgacccctgctttaacggagggacgtgtctcgtgacctggaatgactttcactgcacttgcccagccaatttcacgggtcctacttgtgctcagcagctgtggtgccccggccagccctgtctgccacccgccacttgtgaggaggtccctgacggttttgtctgcgtcgcagaggccacattccgggaaggaccccccgccgcattcagcggacataatgcctcatcaggcagattgctgggaggtttgtcactcgccttcaggacacgggactcagaagcttggctgctccgggccgccgcaggcgcgctcgagggcgtatggctggcagtgcgaaacgggtccctcgccggaggcgtacgaggaggccacggcctgcctggtgccgtactccccataccgggcccccgcgtcgccgacggcgcttggcaccgagtgagactggctatggaaagacccgctgcaacaaccagccgctggctgctctggctggacggggctgcaacacccgtggctttacgaggtctcgcatccgatttgggttttttgcaggggccaggtgcagttcggatcttactggctgaaaactttacgggctgcctgggccgcgtggcactcgggggtctgcccctcccactggctaggcctcgtcctggagcagccccaggcgccagagaacattttgcctcctggcccggcacgccggcccccattctgggttgcagaggcgccccagtgtgtgctcccagcccttgcctgcacgacggggcctgccgagacctcttcgacgctttcgcatgcgcctgcggacccggatgggagggccccagatgcgaggcacatgtggatccttgtcacagcgcaccctgcgcacggggacggtgtcacacacacccagacggcagattcgagtgtagatgccctcccgggttcggtggcccaagatgcagatgggatggatgggctggtgggtgggctgccaacgctccgtggggctatgggggcgcggagaagtccgcccgttcggtggatgagagcctcccgttccccggaccacacgtcctgatctgcgatatgcggcgcaccgtgtag

SEQ ID NO: 183975 - DNA, 2862 bp, synthetic construct
  misc_feature 1..2862: note = Description of Artificial Sequence: Synthetic coding sequence
  source 1..2862: mol_type = other DNA
atggccatggagcccggcgccctgtggaccttcctgggccacctgtggctgcttgccggaccaacctgcgaggaggatgtggatgagtgtctaagtgatccctgcctgcacggcggtacatgctccgacacagtggcgggatacatctgccggtgtccggagacctggggggggcgggactgctccgtccagcttaccggatgtcaggggcacacatgcccccttgcagcaacctgtatccctatttttgaatccggggtccatagctacgtctgccactgcccccccgggacccacggtccattctgtggtcaaaacacgacattctccgtgatggccggctctccaattcaggcaagcgtccctgcagggggccctctgggcctggcactacgtttcaggactactttaccagctggaaccttggcaacacgtaacgacacaaaagagtcactagagctcgcattagtggccgctaccctgcaggccactctgtggagttattccacgactgttctggtgctccggctccccgatctagctctgaatgatgggcactggcaccaggtcgaagtggtgctgcacctcgcaactcttgaattaagattgtggcacgagggctgccccgctaggctgtgcgtagcctccgggcccgtcgcccttgccagcacagcctctgcgaccccactgcccgccggaatctcctctgcccagctgggcgatgccacttttgccggttgcctccaagacgtgagagtagacgggcacttgctgcttcccgaagacctgggtgagaacgtgttgctcggctgtgagaggcgcgaacagtgccgtccactgccttgtgtgcatggcggctcgtgcgtagacctatggacccactttcgctgtgactgcgcccgacctcatcggggtcctacctgtgctgacgagatcccagccgccacattcggattaggcggggccccttcatcagcttccttcttgctgcaagagctcccaggacctaacctgactgttagttttctcctaagaaccagggaatctgccgggctgctactgcagttcgcgaatgattcagcggccggccttacggtctttctgagcgagggacgcatcagggccgaggttccaggttccccggctgtggtgctccccggtagatgggacgatgggcttcgacatctcgtcatgttatcatttgggcctgatcaacttcaggatctgggccagcatgtgcacgtcgggggacggctgctggcagcggactctcagccctggggcggaccatttagagggtgtcttcaagatctgcgactagatggttgtcacctgccatttttccctctgcccttagataattcctctcagccttctgagctggggggcagacagagctggaacctgaccgcaggatgcgtgtcagaagatatgtgttcccctgatccatgtttcaatggcggtacatgcctggtcacgtggaatgattttcactgtacttgcccagccaattttacggggcccacttgtgcacagcaactgtggtgccccggtcagccctgcctcccacccgccacctgtgaggaggtccctgatggctttgtttgcgtggcagaggccactttccgcgaaggccctcctgcagctttcagcggccacaacgccagtagcggccgcttgctgggtggcctgtccttagcattccgaacgcgagactcagaggcatggcttctccgggctgcggctggtgctctggaaggcgtctggctggccgtgaggaatggttccctagcagggggggtacggggtgggcacggactgccaggcgcagttctgccgataccaggtcctcgcgtcgcagacggcgcctggcacagggtgcgcctggctatggagcgcccggccgccacaacgtcacgctggcttctgtggctagacggcgccgcaaccccggttgccctgaggggactggcatccgacctggggttcttgcaggggcccggtgctgtccgtatcctgctggcagagaacttcaccggttgcctggggagggtcgcattgggcggactgcctttgccactggcacgccccaggcccggggcagctcctggagctcgggagcatttcgccagctggccaggaactcccgcccctattctaggatgccggggtgcacccgtttgcgctccctctccctgtctgcatgatggggcttgtcgggatttgtttgatgccttcgcctgcgcttgcggtcctggttgggagggacctagatgcgaagctcacgtggatccctgtcactccgcaccttgcgccagagggaggtgtcatactcatccagacggaaggtttgaatgtcgctgccccccaggatttggcgggccgagatgtcgtctcccagtgccttctaaagaatgctctctgaatgtcacatgtctagacggttcaccttgtgagggcgggagccctgccgccaactgcagttgcctagaaggcctggcagggcagcggtgccaggtgccgacacttccttgtgaggccaacccatgtctgaacggcgggacctgtcgggcggccgggggagtctctgaatgcatctgtaatgcacgattctccggacaattttgcgaggtagctaaaggtctgccattaccactgcccttccctctcctggaagtcgctgtacctgccgcctgtgcgtgccttctgttgcttttgctcggtctcctcagcggtatccttgccgcaaggaaaagacgccagtctgaaggaacctatagcccatcccaacaagaggttgctggagcaaggctggagatggacagcgtgcttaaagtgccccccgaggagcgactgatttag

SEQ ID NO: 183976 - DNA, 3858 bp, synthetic construct
  misc_feature 1..3858: note = Description of Artificial Sequence: Synthetic coding sequence
  source 1..3858: mol_type = other DNA
atggccctggcccggcccggcacccccgacccccaggccctggccagcgtgctgctactcctgctctgggcacctgccctctcacttctcgctggaacagtcccttcagaaccaccttctgcatgcgcaagcgatccatgtgctccaggcacagaatgccaggccactgagtccggtggatacacttgcggtcccatggagccaaggggatgcgctactcagccttgtcaccatggcgcattatgtgtcccccaagggccagaccctaccggcttcagatgttattgcgttcccgggtttcaaggacctcggtgcgagctcgatatcgatgagtgcgcgtcgcgcccatgtcatcatggtgcaacttgcagaaacctggcggatagatatgaatgtcattgcccgttggggtacgccggcgttacgtgtgagatggaagtcgacgaatgcgcctccgccccgtgcctccacggaggctcttgcctggacggagttggctcttttagatgcgtctgcgcccctgggtacgggggtactcgctgccagctcgatctcgacgaatgtcaatcacaaccatgcgcccacggaggcacatgtcacgatttggtaaatgggttcagatgcgactgcgcagggaccggatacgagggcactcactgcgaaagagaagtcttggagtgtgcctctgccccgtgtgagcacaacgccagttgtctggagggcctcggctcctttaggtgcttgtgctggccgggctacagcggcgagctgtgcgaggtggatgaagatgagtgtgcttccagcccctgtcagcacggtggaaggtgtctacagcgaagcgatcccgccctttacgggggagtacaagccgcattccctggggccttcagctttaggcacgcagctggattcttgtgccactgtcctcccggcttcgagggagcagactgcggggtggaggtggatgagtgcgctagtcgaccctgtctgaacggcggccattgccaggacctgcctaacggcttccaatgtcactgtccagatggatatgcaggcccgacatgtgaggaggacgtcgatgaatgcctctccgacccttgtcttcacggagggacgtgctcagacacagttgccggatatatttgccgatgtcctgagacctgggggggccgcgactgtagcgttcagttaacagggtgccaggggcatacatgcccactggcagcaacctgtatacccatcttcgagtctggggttcattcctatgtgtgccactgtcctccaggaacccatggaccattttgcgggcaaaatactactttctcagtcatggctggaagtccgattcaggccagtgtgcctgctggcggccccctgggcctggctcttcgatttagaactacactccccgcgggcacactcgctactcgcaacgacacgaaagaatccctagaattggcactagtggcagctaccctgcaggccacactctggtcatacagtacaacagtgctggtcctcagactgcccgacctggcactcaatgacgggcactggcaccaggtagaggtggtactccacctggctactttggagctgcgcctctggcatgaggggtgccccgcaagattatgtgtggctagtgggcccgtcgcattggccagcaccgcatccgctactccactccccgctggcatctcctctgcccaactgggtgatgccaccttcgcagggtgtcttcaagatgttagggtagatgggcatctacttttgccggaagatctaggtgaaaatgtgctcttgggatgcgaacgccgggagcagtgtcgacctttaccttgcgtccatggcggaagctgcgtagacttgtggacacatttcagatgtgattgtgcaagaccccaccgggggccaacatgtgccgacgagattcccgccgccacattcggactggggggggcaccctcaagcgcatcgttcttattgcaggaattgcccggaccaaacttgacagtcagtttcctcttgcgcacacgcgagagcgccggcctactattacaatttgccaatgactccgcagcaggcctcacagtgttcctcagcgaagggcggattagagctgaggtcccaggttcacccgctgtcgtcctgcctgggcgctgggacgacggcttgcgacacctcgtgatgctcagctttggcccagatcagctccaggacctgggtcagcatgtccacgtcgggggcaggctattagccgccgacagtcagccatgggggggtcctttcagggggtgcctccaagacctcaggctggacgggtgccaccttccattcttccctttgccgctcgacaactcctctcaaccatccgagttaggcggtaggcaaagttggaatctgaccgccggttgcgtctcagaggacatgtgctcacccgatccatgtttcaatggggggacctgcctggtgacctggaacgacttccactgtacttgcccggctaattttaccggtccgacctgtgcccagcagctgtggtgcccaggccagccttgcctgcccccagccacttgtgaagaagttccggatggctttgtgtgtgttgccgaggcaactttccgcgagggtccacccgccgccttcagtggacacaacgccagttcaggacggcttcttggcgggctcagcttggccttccggacgagggactctgaagcctggctgcttcgggccgcggccggggcgctggagggggtctggctggccgttcgcaatggtagcttagccggaggagtacgtggaggacacggtctgcctggcgcggtattacctatccccggcccacgggtggctgacggcgcctggcatcgggtgcgccttgcaatggagaggcccgccgccaccacttcgaggtggttactgtggctggatggggctgcaaccccagtagctctccgggggctggctagcgaccttggttttttacaggggcctggcgccgtgcggatcctgcttgcagaaaacttcacaggatgtttgggacgagtggcccttggggggctgcctcttcctctggcccgcccgaggccaggagcagcccctggtgcccgtgagcacttcgcaagttggcctgggacaccagctcccattctgggttgcagaggggctcctgtgtgtgcacccagtccctgtctgcacgacggcgcatgtagagatctttttgatgccttcgcgtgcgcctgcggccctgggtgggagggccctaggtgtgaggcccatgtggacccgtgccacagtgctccttgtgcccgagggaggtgccacacccacccagacgggaggtttgaatgccgatgcccccctggatttggtggcccaaggtgtcgattacctgtgccaagcaaagaatgtagcctgaacgtgacctgcctggatggatccccatgtgaaggcggaagccctgccgctaactgctcttgcctggaaggcctcgcggggcagagatgtcaagttccaacgctgccgtgtgaggccaacccatgtctaaacggcgggacctgccgggctgcaggcggagtctccgagtgcatctgtaacgcacgtttttcgggccagttttgtgaggtggccaagggactgcccctccctctccctttcccattgctggaagtggctgtgcctgctgcatgcgcatgcctcctgcttcttctgctgggacttctgagcggcattctggcagctaggaagcgccgtcaaagtgagggcacttatagcccttcgcagcaggaagtggccggagcgcgcctggagatggacagtgtgttgaaggtgccccccgaagagcgcttgatctag

SEQ ID NO: 183977 - DNA, 363 bp, synthetic construct
  misc_feature 1..363: note = Description of Artificial Sequence: Synthetic coding sequence
  source 1..363: mol_type = other DNA
atggccaaccccggcctgggcctgctgctggccctgggcctgccctttttgctggccaggtggggacgcgcatgggggcagatccagaccacctccgccaatgaaaacagcacagtactgccttcatcaacgagctcgtcctccgacggaaacctgcgaccagaggctataaccgctataatcgtggtgttctctctcctggcggcactgttactggccgtaggtctggcgctgttggttagaaagctgcgtgaaaagagacagacagaagggacctaccggcctagttccgaggagcaggtaggggctagagtccctcctacaccaaatttaaagcttcctcccgaagagcggcttatctag

SEQ ID NO: 183978 - DNA, 372 bp, synthetic construct
  misc_feature 1..372: note = Description of Artificial Sequence: Synthetic coding sequence
  source 1..372: mol_type = other DNA
atggccaaccccggcctgggcctgctgctggccctgggcctgcccttcttgcttgccagatgggggcgggcctggggccagatccagactacctccgccaatgagaattcaactgtattaccctctagcacgtctagttcctcggatggcaacctgcgcccggaagctattacggccatcattgtcgtgttcagtctgctggcagccttgcttcttgctgtcgggctcgcactgctggtacgcaaactgagagagaagcgacaaactgaaggcacatatagacccagttccgaagagcaatttagtcatgcggccgaggcccgagcaccgcaggatagtaaggaaactgtgcaaggctgcctgcctatctag

SEQ ID NO: 183979 - DNA, 363 bp, synthetic construct
  misc_feature 1..363: note = Description of Artificial Sequence: Synthetic coding sequence
  source 1..363: mol_type = other DNA
atggccaaccccggcctgggcctgctgctggccctgggcctgccctttctgttggccagatgggggcgagcctggggacaaatccaaaccacctctgccaacgagaatagcaccgtcctgcccagcagcactagctcaagcagcgacgggaatttacgaccggaggccatcactgccattattgtggtttttagcctgcttgcagccctccttctcgccgtggggctggccctcctggtccgaaagctgagggaaaaacgccagaccgaaggtacgtaccggccttcttctgaagaacaggtgggtgccagagtgccgccaacacccaatctcaagcttccacctgaggaacgcctgatctag

SEQ ID NO: 183980 - DNA, 1599 bp, synthetic construct
  misc_feature 1..1599: note = Description of Artificial Sequence: Synthetic coding sequence
  source 1..1599: mol_type = other DNA
atgcccgccccccccggccggacccacacctggttcctgctgcagtccctggaggatctcgacaccagtctgcgcaaactgaacagtcgcctgtttgtcgtgcgcggacaacccgctgatgtgttccctaggttattcaaggagtggggagtcactcgcctaacttttgaatacgacagcgagcctttcggaaaggagagggacgcagcaatcatgaaaatggctaaggaagccggcgtggaagtggtgactgaaaattctcacaccttatacgatcttgatagaattatcgagttaaacggacaaaagccgccactaacctataagcgcttccaagccattatatccaggatggagttgccaaaaaaacctgtcggtctggtaacatcccaacagatggagagttgcagagcagaaattcaggagaatcacgacgagacctacggagttccgtccctggaggagctcggattccccactgaaggccttggtcccgccgtgtggcagggaggcgaaaccgaggccttagcaaggctggacaaacaccttgagagaaaagcctgggtggccaattacgagaggccccggatgaatgccaattccctgttggcctctcctactggtttatctccttacctccgctttggttgtctttcctgtagattattctattatcgactgtgggatctgtacaaaaaggtcaagcgaaattcgacgcctccgcttagcttgttcggccaacttctctggcgcgagtttttctataccgcggctactaacaatccccggttcgaccgcatggaaggcaacccgatctgcattcagatcccctgggaccggaatcccgaggccctggctaagtgggctgaaggcaagacggggttcccttggattgatgccattatgacacagctgcgtcaggagggctggattcaccatcttgcaagacacgccgtagcgtgtttcctgaccaggggtgatctgtgggtgagctgggagagtggtgtaagagtgtttgatgagcttctcttagacgcggatttttctgtcaacgcaggaagttggatgtggttgtcatgcagcgcctttttccagcaattcttccactgctactgtcctgtgggtttcggccgtcggacagacccctccggcgattatatccgtaggtacttacccaaattgaaggcgtttccatcccggtacatatacgagccctggaacgctcccgagtccattcagaaagctgccaagtgcatcatcggtgttgactatcccaggcctatcgttaatcatgctgagacctcccgtctgaacatcgagcgaatgaaacagatctaccagcagctgtcccgttaccggggcttgtgcctcctagccagtgtcccttcctgcgtggaagacctctcccatcccgtcgccgagccctctagtagccaggccggcagcatgtcctccgctggtcctcggccgctgccatccggccctgccagcccgaagaggaaactggaagcagctgaagaacccccaggggaagaacttagtaaaagggcccgggtcgccgagttgccaactcctgaacttccatccaaagatgcatag

SEQ ID NO: 183981 - DNA, 1845 bp, synthetic construct
  misc_feature 1..1845: note = Description of Artificial Sequence: Synthetic coding sequence
  source 1..1845: mol_type = other DNA
atgggcggcgtgcacgtggcctaccggggcggcgccggcgtggccggcgccgtatggacggttatggctgccacagttgctaccgcagccgccgtcgctcctgcacctgctcctggcacagactctgcctcatccgtgcactggttccggaagggattgaggcttcacgacaacccggctttattggcagccgtgcggggcgccagatgcgtgaggtgcgtctatatcttggacccgtggttcgccgcaagttcatccgtgggcatcaatcgctggcgcttcctgttgcagtcgcttgaggacctcgatacctcgctgcgaaagttgaatagtcgactgtttgtagtacgcggtcagcctgctgatgtcttcccaaggctgtttaaggaatggggggtgacgcggttaacctttgagtacgattcagagccctttggcaaggagcgggatgctgccattatgaaaatggctaaagaggctggagtggaagtggtgacagagaattcacacacattgtacgatttagaccggatcatcgagctgaatgggcagaagcctcccctgacctataaacgtttccaggcaataatctcccgcatggaattgcctaaaaaacctgtgggcctggtgaccagtcagcagatggagtcctgcagggctgaaatacaggaaaaccacgatgaaacctatggtgtcccctcgcttgaagaactcggattcccgactgagggcctgggacctgctgtatggcaaggaggagaaacggaggctcttgccagactggataaacacttggagaggaaggcatgggtcgccaactatgaacggcctagaatgaacgccaactctctgttggcaagtccaacaggtttgtccccctacctccggttcggctgcttaagctgccgactcttttattaccggctctgggacctgtataaaaaggtgaaacggaactctacacctcccctctcactgttcgggcagctgctatggagggagttcttctacacagcagccacaaataaccccagatttgaccgtatggagggaaaccccatttgtatccaaatcccttgggatcgtaacccggaggcacttgccaaatgggccgagggtaagacaggattcccttggatcgacgctattatgacccaactgcggcaggaggggtggatccatcaccttgcccgccatgccgtagcctgcttcttgacccggggggatctttgggtgtcctgggagtcaggcgttagagtgtttgacgaattgctgctggatgcagatttctcagttaatgccggatcgtggatgtggctttcatgctcggcgttcttccagcagttctttcactgctattgtccagttggctttggtcgacgcactgatccttcaggtgattatatccgtaggtacctgccgaagttaaaggcctttccgtctcgctacatttacgaaccctggaacgctcctgaatctatacagaaggccgctaaatgtattattggtgtggactatcctaggcccatagtgaaccacgctgaaaccagccggctgaatatcgagcgcatgaaacaaatctatcagcagctctcccggtaccgtgggttatgtcttctcgcctctgtgccctcatgcgtcgaggacctgagccaccccgttgccgaaccctcttcctcccaagcagggtcaatgtccagtgccggaccaagacccctacccagcggccctgcttcacccaagcggaaactggaggcggcagaagagcctcccggcgaagagctctccaagcgggcacgggtggcagagttgccgactcctgaattgccctctaaagatgcctag

SEQ ID NO: 183982 - DNA, 522 bp, synthetic construct
  misc_feature 1..522: note = Description of Artificial Sequence: Synthetic coding sequence
  source 1..522: mol_type = other DNA
atggacgtgaccatccagcacccctggttcaagcggaccctgggccccttttaccctagtagactcttcgatcaattctttggagagggactctttgaatacgatctcctgcccttcttgagttctacaatttctccctactatcgacagagcctcttccgcaccgtgttggattccgggattagtgaggtcagatcagatagagataagttcgtcattttccttgacgtcaagcacttttcacctgaggacctcactgtcaaggtgcaagacgactttgttgagattcacggtaagcacaacgaaagacaagatgatcatggctacatcagtcgtgagttccaccggcgctaccgcctgccgtcaaacgttgaccaatccgcactgtcctgtagccttagcgctgatggtatgctcaccttctgcgggcctaagattcagaccggactcgacgctactcacgctgagagggccatcccagtctctcgcgaggagaagcctacttcagcacccagttcctag

SEQ ID NO: 183983 - DNA, 570 bp, synthetic construct
  misc_feature 1..570: note = Description of Artificial Sequence: Synthetic coding sequence
  source 1..570: mol_type = other DNA
atggccctggtgcggggcggctggctgtggcggcagagcagcatcctgaggcgctggaaaagaaactggtttgcattgtggctggacggaacattgggatactaccatgatgaaactgctcaggacgaagaggacagagttctcattcattttaatgttagagacataaagattgggcctgagtgccacgacgtgcagccgccagagggaagatctcgggacggattgttgaccgtcaatctgcgagaaggcgggcgcctgcacctatgcgccgagactaaggatgatgccctagcttggaagaccgccctgctcgaagccaattccacgcccgtgcgagtatactcaccataccaggattactacgaggtcgtgccacctaacgcccatgaagcaacctatgtccggagctactatggaccaccttatgccggacccggcgttacccacgtcatagttcgggaggatccatgttactctgccggtgcccccctcgccatgggcatgcttgctggggccgctacaggcgcggccctggggtccttgatgtggagcccatgctggttttag

SEQ ID NO: 183984 - DNA, 528 bp, synthetic construct
  misc_feature 1..528: note = Description of Artificial Sequence: Synthetic coding sequence
  source 1..528: mol_type = other DNA
atggacatcgccatccaccacccctggatccggcggcccttcttcccttttcattctccttcacgcctatttgaccagtttttcggagagcacctgctggagtccgatttatttccaacttctacctcgttatcgcctttctatctcagacccccgtccttcctgagagcccccagctggttcgatacagggttgtcagagatgcggctcgagaaggacagattctctgtcaatttagacgtgaaacacttttctccagaggagttaaaagtgaaagttctgggggacgtgatcgaagtccatggtaaacacgaggagcgtcaggatgaacacggctttattagccgcgagttccatcgaaagtaccgtatcccagcagacgtagacccgctgactatcactagttcactttccagtgacggagtgctcaccgttaacggcccaaggaaacaggtgtcaggccctgagcgcacgatccctatcactagggaggagaaacccgcagtgactgctgctcccaagaaatag

SEQ ID NO: 183985 - DNA, 525 bp, synthetic construct
  misc_feature 1..525: note = Description of Artificial Sequence: Synthetic coding sequence
  source 1..525: mol_type = other DNA
atggacatcgccatccaccacccctggatccggcggcccttcttcccattccacagccccagccggctcttcgatcagttcttcggcgagcacctgctggaatccgatctgttcccgaccagtacatccctgtcacctttctatcttaggccacccagcttcctgagggcaccatcctggtttgacaccggcttaagcgaaatgcgactcgagaaagacaggttctctgttaacctcgatgtgaaacacttctcccctgaagaactcaaggtcaaagtgttaggagatgtgattgaagttcatgggaaacacgaggagagacaggatgaacacggctttatctcccgagagttccataggaagtatcgtattccggccgacgtggatcctctgacaattactagctccctctcatctgatggtgtactcaccgtgaacggaccccggaagcaagtgtcagggccagagcgaactatccccataacgagagaggagaagcctgccgttacagcagcacccaaatag

SEQ ID NO: 183986 - DNA, 528 bp, synthetic construct
  misc_feature 1..528: note = Description of Artificial Sequence: Synthetic coding sequence
  source 1..528: mol_type = other DNA
atggacatcgccatccaccacccctggatccggcggcccttcttcccattccactctccttctcgactctttgaccagttcttcggcgagcatcttctagagagtgacctgtttcccacttccacctccctgtcacccttctatctacgccccccgtcgtttctgcgtgcaccctcctggtttgacacaggcttgagtgagatgcgcctggaaaaggaccgcttttccgtgaacctggacgttaaacacttctcacccgaggagctcaaagtgaaagtgctcggcgacgtcattgaagtgcatggcaaacacgaggagcggcaagacgagcacggatttatcagtcgggaattccatcgaaagtacaggatcccagccgacgtcgaccctctcacaattacaagttctcttagtagcgacggagtcctgaccgtgaatggcccccgcaagcaagtgtcaggccccgagcgaaccataccaattacccgcgaggagaaacctgctgtaactgccgctcccaagaaatag

SEQ ID NO: 183987 - DNA, 234 bp, synthetic construct
  misc_feature 1..234: note = Description of Artificial Sequence: Synthetic coding sequence
  source 1..234: mol_type = other DNA
atggacatcgccatccaccacccctggatccggcggcccttcttccccttccatagtcccagccgcctgttcgaccagttttttggcgaacacctcttagagtcagatctgttccctaccagcacttctttgtccccattttaccttcggccccccagctttctgcgtgctcccagctggtttgataccgggctgtccgaaatgcgtctggaaaaggataggttctccgtctag

SEQ ID NO: 183988 - DNA, 393 bp, synthetic construct
  misc_feature 1..393: note = Description of Artificial Sequence: Synthetic coding sequence
  source 1..393: mol_type = other DNA
atggacatcgccatccaccacccctggatccggcggcccttcttcccatttcacagcccgagtcggctgttcgatcagtttttcggtgagcatttgctggagtctgatctgttcccgaccagtacctcactcagccccttttacctacgaccacctagcttcctgagggcaccctcttggtttgacacgggattatcagagatgcgtctggagaaggacaggtttagtgtgaacttggacgtgaagcatttctccccagaagaactaaaagtgaaggtccttggcgatgttattgaagttcacgggaagcatgaagaaaggcaggacgagcacggctttatcagccgcgaatttcaccgcaaatacaggataccggctgacgttgacccgtag

SEQ ID NO: 183989 - DNA, 528 bp, synthetic construct
  misc_feature 1..528: note = Description of Artificial Sequence: Synthetic coding sequence
  source 1..528: mol_type = other DNA
atggacatcgccatccaccacccctggatccggcggcccttcttcccttttcacagtccatctagactcttcgaccagtttttcggggagcacctgttggagagcgacctctttccaaccagtacctccttgagcccattttacttgcgcccgccaagtttcctgcgcgcaccctcatggtttgacaccggattgtcagaaatgcgcctcgaaaaggaccggtttagcgtgaatctcgatgtgaagcattttagtccagaggagctcaaagtgaaagtactcggcgatgttatagaggtccacggaaaacacgaggagcggcaggacgaacacgggtttatttcgcgagaatttcaccggaaatacaggattccggccgatgtggacccgttaacgattacctcaagtctgtcatcagatggggtgctcacagtgaatggcccccggaaacaagtgagtgggccagaacggaccatccccatcacccgcgaagagaaaccggcggtaacagctgcgcccaagaagtag

SEQ ID NO: 183990 - DNA, 528 bp, synthetic construct
  misc_feature 1..528: note = Description of Artificial Sequence: Synthetic coding sequence
  source 1..528: mol_type = other DNA
atggacatcgccatccaccacccctggatccggcggcccttcttcccattccactcgcccagccggcttttcgaccagttcttcggggaacacctcctagaatcagatctgttccctaccagcacctctctctctccattctacctaagacctccttcgtttctaagagcgccctcttggtttgacaccggtctgagcgaaatgcgccttgagaaagacagattttccgtcaacctggacgtgaaacacttcagccccgaggagcttaaggtcaaagtgttgggcgatgtgatcgaggttcacggcaaacacgaggagagacaagatgagcatggatttatctctagggagttccacagaaagtatcgaatccctgctgacgtggaccctctgactataacttcgagtttgagttccgacggagtgctgaccgtaaacggcccccgaaaacaggtgtccggcccagagagaactatccctattactcgggaggaaaagcccgctgtgacagctgctcctaagaaatag

SEQ ID NO: 183991 - DNA, 210 bp, synthetic construct
  misc_feature 1..210: note = Description of Artificial Sequence: Synthetic coding sequence
  source 1..210: mol_type = other DNA
atggacatcgccatccaccacccctggatccggcggcccttcttccccttccacagcccatcccgactgtttgaccagttctttggcgagcacctgctggagtctgacctcttccccaccagtacaagtctgtcccccttctacctcaggccacccagcttcctgcgggccccaagttggtttgatactgggttgtccgaaatgcgctag

SEQ ID NO: 183992 - DNA, 2148 bp, synthetic construct
  misc_feature 1..2148: note = Description of Artificial Sequence: Synthetic coding sequence
  source 1..2148: mol_type = other DNA
atgcacctgctgcccgccctggccggcgtgctggccaccctggtgctggcccaaccttgcgagggcacggatcccgcaagccctggtgccgtggaaactagcgtcctgagggattgtattgcagaggccaagctactggtcgacgccgcttacaattggactcaaaaatctattaagcagaggttgagatctggctcagcgagccccatggatctgctctcttactttaagcagcctgttgccgccacacggaccgtggtccgcgccgcggactacatgcacgtcgctctagggcttctagaggagaagttacagcctcagcgcagcggaccttttaacgtgacagacgtgttaaccgagccccagctgagacttctctcacaggccagtggatgtgcactgcgggatcaagccgagcgctgctctgataaatacagaacaatcactgggcgatgcaataataagaggcgacccctcctgggggcctctaaccaggcactggccaggtggctacccgcagaatatgaagacgggctgtcactgccttttggatggaccccctcccgcaggaggaatggcttcctgttaccactggtccgagcagtgagcaaccagatagtgagatttcctaacgagcgcttgaccagcgacagaggacgcgccttaatgtttatgcagtggggccagttcatcgaccacgacctggacttttccccagaatcgccagcccgagtggcctttacggccggcgtggactgcgagcgtacatgcgctcagctgccgccttgctttcccattaaaatcccccctaacgatcccaggatcaaaaaccagagagactgtataccttttttcaggtccgcgccctcttgtccacagaataagaatagggtcagaaatcagattaacgctctcaccagcttcgtagatgcgagcatggtgtatggctcagaggtgagtttgtcactgcggctacgcaaccgtaccaactacttaggcctgctggctattaaccaacggttccaggataacggcagggcacttctccctttcgacaatctccacgatgatccatgtctgctgacgaaccgttccgcacggatcccatgtttcctggcaggcgatacaaggagcaccgagactccgaagctcgccgctatgcataccctgttcatgagagagcacaatcggctggccaccgagctaagacgccttaacccccgctggaatggtgacaaattatacaatgaggctcgcaagattatgggtgctatggtgcagataattacctaccgcgacttcctgccgctggtgctgggcaaagcaagagcccgaaggacattggggcactataggggatattgtagtaatgtcgatcccagagttgccaatgtcttcacactggcatttcgatttggtcacaccatgctccagccctttatgttccgtttagactcccagtaccgggctagcgcaccgaactcacatgtacccctgagcagtgctttcttcgcaagttggcggatcgtctacgaaggaggcatcgatccaatcctgcgaggcctcatggcaacaccagcgaaattgaaccgccaggacgccatgttggtggatgagctccgggacagactgttccgccaagtgagacgaatcgggcttgacttggctgcactgaatatgcaaagaagtcgcgaccacggactgcctgggtataatgcgtggagacggttctgtggattgtcccagcccagaaacctcgcgcaattgtctcgagtcctcaaaaaccaagacttagcacgcaaatttctcaatttgtacggtactcctgacaacatcgacatctggattggagccatagccgaacccctactgccaggagcacgtgttggtcctctgcttgcctgcttatttgagaaccaatttcgccgtgctcgggacggagaccggttttggtggcaaaaaaggggcgtcttcacaaagagacagcgtaaggccctcagccgcattagcctcagtcgcattatttgtgacaacaccggaattacgactgttagccgtgatattttccgcgccaatatttatccgcgggggtttgtgaattgcagccgcattcctcgcttaaacctgagcgcatggcgaggcacctag

SEQ ID NO: 183993 - DNA, 594 bp, synthetic construct
  misc_feature 1..594: note = Description of Artificial Sequence: Synthetic coding sequence
  source 1..594: mol_type = other DNA
atgagcagcgcccccgcccccggccccgcccccgccagcctgaccctttgggatgaagaggacttccagggaagaaggtgtagattgcttagcgactgcgctaatgtgtgcgaacgaggcggtctgcctcgcgtgaggagtgtgaaggttgagaacggggtttgggtggccttcgaatatcccgatttccagggtcagcagtttatccttgaaaagggcgactatcccaggtggtccgcatggagcgggtcctccagccataattccaatcagctgctgagcttcaggcccgttctgtgtgcaaaccataatgactcccgagttactctgtttgagggagacaacttccaaggttgtaaattcgatctcgtcgacgattatccgagcctgccatctatgggttgggcgtctaaagacgtgggatcgctcaaagtgagttccggtgcctgggtggcataccaatatccaggttatcgaggctaccagtacgtgctggagagggataggcactccggggagttctgcacttacggtgaactggggacccaggcccacacaggccaattgcaatcaattagacgggtgcagcactag

SEQ ID NO: 183994 - DNA, 594 bp, synthetic construct
  misc_feature 1..594: note = Description of Artificial Sequence: Synthetic coding sequence
  source 1..594: mol_type = other DNA
atgagcagcgcccccgcccccggccccgcccccgccagcctgaccctctgggacgaagaggactttcaagggcgtcgttgccgattgctcagcgattgcgcaaacgtgtgtgaacgcggcggtctgcctagagttaggagcgtgaaggtggagaacggagtttgggtggcgttcgaatatcccgattttcagggccaacagtttattctggaaaagggcgactaccctcggtggtccgcgtggtctggtagctcttcacataacagtaaccagctcttgtccttcaggcccgttctatgcgccaaccacaatgactctagagtcactttattcgaaggcgacaattttcagggttgtaagtttgacctcgtggatgattatccgtccctaccaagcatgggatgggcctccaaagatgtagggagtcttaaagtatcatccggagcctgggtcgcctaccaatacccggggtacagaggctaccagtatgtcttggagcgcgaccggcacagcggtgaattttgcacatatggcgagttgggtacacaggcccacactggtcagctgcagtctattcgccgcgtgcagcattag

SEQ ID NO: 183995 - DNA, 390 bp, synthetic construct
  misc_feature 1..390: note = Description of Artificial Sequence: Synthetic coding sequence
  source 1..390: mol_type = other DNA
atgagcagcgcccccgcccccggccccgcccccgccagcctgaccctttgggacgaggaggattttcaaggacggagatgccgcctcctcagtgactgcgccaatgtttgtgagcgagggggcctgcccagggtgcgctccgtaaaggtcgagaacggggtttgggttgcttttgaatacccagactttcaaggtcaacagttcatattggagaaaggcgactatccacggtggtctgcatggagtggcagctctagccacaattctaatcagctactgtctttccgccctgtcttgtgtgccaatcacaatgattctcgggttacactgttcgagggggataattttcagggctgcaaattcgacctcgttgacgattatccaagctag

SEQ ID NO: 183996 - DNA, 591 bp, synthetic construct
  misc_feature 1..591: note = Description of Artificial Sequence: Synthetic coding sequence
  source 1..591: mol_type = other DNA
atgaccctgcagtgcaccaagagcgccggcccctggaagatggtggtttgggatgaagatggttttcagggtcgtcggcatgagtttacagccgagtgtccctcggttcttgagctcgggtttgagacagtcaggtcattgaaagtgctgtctggcgcttgggtcgggtttgaacacgcaggttttcaggggcagcagtacattttggaacgcggtgaatatccttcctgggatgcctggggaggcaataccgcctaccccgctgagcggctgacttctttccggcctgctgcatgtgctaaccaccgggacagcagattgaccatcttcgaacaggagaacttcctgggtaagaagggcgagttgagcgacgattacccatcccttcaggctatgggatgggagggcaacgaagtcggctccttccatgtgcacagcggcgcatgggtgtgcagtcagttcccaggttaccgaggctttcaatacgtcttggagtgcgatcaccatagtggggactacaaacactttagagaatggggaagtcacgcccctactttccaggttcagagcattagaaggatccagcagtag

SEQ ID NO: 183997 - DNA, 1614 bp, synthetic construct
  misc_feature 1..1614: note = Description of Artificial Sequence: Synthetic coding sequence
  source 1..1614: mol_type = other DNA
atggagcgggtgaacgacgccagctgcggccccagcggctgctacacttatcaggtgagccgacacagtacagagatgcttcataacctcaatcagcagcggaagaatgggggaagattttgtgacgtgcttcttcgggtgggcgacgaaagcttccctgctcaccgcgctgtgctcgctgcctgcagtgaatacttcgagagtgtgttcagcgcccagctgggggatgggggggccgccgacggtgggcccgccgatgtggggggtgcgacagcagctccgggcggcggtgccggaggcagccgtgaacttgagatgcacacgatcagtagcaaggtgttcggcgacattcttgattttgcctacacttccaggattgtggtgcgcctcgaatcgtttcccgaacttatgacagccgctaagttccttctgatgcgcagcgtcatagagatatgccaagaggtcattaaacagtccaatgtgcagatcctcgtgccccctgctcgggccgacatcatgctgtttcgccctcccggaacttctgacctgggtttccctctcgacatgacgaatggagcagcgctcgccgcgaactccaacggaattgccgggagcatgcagcctgaagaggaagctgcccgtgcagcaggggcagcgatcgcaggccaagccagcctgccagttttgccaggggtggacagactccccatggtggcagggcccctgtcccctcagctgctcacatccccttttcctagcgtcgcgagttctgcaccccccctaaccgggaagagggggcgtggaagacccagaaaggccaacttgcttgacagcatgttcggctcccctggtgggcttagagaggccggaattcttccatgtggtctgtgtggtaaagtttttacagacgctaatcgtctgcgacagcatgaggcccagcacggagtgacttctctgcagcttggctacattgatttgccaccccctcgcctgggcgagaacggcctgccaatatcagaggacccagacggcccaaggaagcggagtagaacacgcaaacaggtcgcctgtgaaatctgtggtaaaatcttccgcgacgtgtaccacctaaaccgacataagctgtcacattccggtgagaagccatatagttgtccagtctgcgggctgaggttcaagcgcaaagaccggatgtcctaccacgtgcggtctcacgatggaagtgtcggaaagccctatatttgccagagctgtggaaagggctttagcaggcccgatcaccttaacggacacatcaaacaggtacacacatcggaaaggccacacaagtgccaggtgtgggtcggcagttctagtgggctgcctcccctggaaccactcccaagcgacctgccatcctgggactttgcacagccagcactctggcggtcttcccactcggtgcccgataccgccttctccctaagcctgaaaaagtccttcccagccttagagaatcttggccccgcacatagctcaaacaccctcttttgtccagccccccctgggtacctgcgacagggttggaccacaccagagggcagcagggcctttacacaatggccagttggttag

SEQ ID NO: 183998 - DNA, 618 bp, synthetic construct
  misc_feature 1..618: note = Description of Artificial Sequence: Synthetic coding sequence
  source 1..618: mol_type = other DNA
atggccagcgaccaccagacccaggccggcaagccccagagcctgaatccaaagattataattttcgaacaggaaaacttccaagggcatagccatgaactgaatggtccctgtccaaacctgaaggagaccggagtggaaaaggccggttcagtgctcgtacaagctggcccttgggtcggatacgaacaagctaactgtaaaggggagcagttcgtgttcgaaaaaggcgagtacccgagatgggattcgtggacttccagccggcgcaccgacagtctgtcaagcctccggcctatcaaggtggattcacaagagcataaaattatcttatatgagaacccgaatttcaccggcaaaaaaatggagattatcgatgatgacgtgccctcgtttcacgctcacgggtaccaggagaaggtgtcatctgttagggtccagtcaggaacctgggtgggctatcagtaccccgggtatcgcggactacagtacttactggagaagggagactataaggacagctccgattttggcgcaccccacccacaggtgcagtccgtgagaaggattcgcgacatgcagtggcaccagcgaggagcgtttcaccccagtaattag

SEQ ID NO: 183999 - DNA, 1284 bp, synthetic construct
  misc_feature 1..1284: note = Description of Artificial Sequence: Synthetic coding sequence
  source 1..1284: mol_type = other DNA
atgcggcacctgggcgccttcctgttcctgctgggcgtgctgggcgccctgaccgagatgtgcgagatccctgaaatggatagccacttggttgagaaactcgggcaacatctgctcccctggatggatcggctgtcgttggaacacctgaatccaagcatttacgtggggctgcgcctgagctctctgcaggccggcactaaggaggacctgtacctgcattccctgaagctgggataccagcagtgtttgctagggagcgcatttagcgaggacgatggtgattgccagggcaagccctctatggggcagctggctctctacctgctcgcactgagagccaattgtgagttcgtgagaggacataagggggaccgactcgtcagtcaacttaaatggtttctggaggatgaaaaaagagccatcggacacgatcataagggacaccctcataccagctattaccaatatggattgggcatcttagccctgtgcctgcatcaaaagcgagtacatgactctgtcgtcgacaagctgctttacgctgttgagccattccatcaaggacatcactccgtagacaccgcagccatggctggcctcgcctttacatgtcttaaaaggagtaacttcaacccagggagaaggcagagaatcaccatggccattcggacagtaagagaagagattttaaaagcccagacgcccgaaggacatttcggtaatgtgtactcaactccactggccctgcagttcctcatgacttcacctatgagaggtgccgaattgggtactgcatgtttgaaggccagggttgcactgctggcttctctgcaggatggcgctttccaaaatgcactgatgatctcccagctcctgcccgtgctaaatcacaaaacgtacatcgatctgatctttccagattgcctggctccccgggtgatgctcgagcctgccgccgagacaatcccccaaacccaggagatcatctctgtgacactccaagtcctgtcgttgctcccaccatatcgccaaagtatatctgtgctggctggatcaacagtggaggatgttctcaagaaggctcacgagctgggcggatttacctatgaaactcaggcctctctgtcaggcccatatctcacatccgtcatggggaaagccgcgggcgagcgggaattctggcaactgttaagagaccctaacacccctttgctgcaggggattgctgactaccgaccaaaggacggtgaaacaatcgagctcagactcgtttcatggtag

SEQ ID NO: 184000 - DNA, 525 bp, synthetic construct
  misc_feature 1..525: note = Description of Artificial Sequence: Synthetic coding sequence
  source 1..525: mol_type = other DNA
atgggcaagatcaccttctacgaggaccgggacttccagggccggtgttacaactgtatctctgactgtcccaacttgcgcgtttatttttcccggtgtaactctatccgcgtagatagcggttgttggatgttgtacgaaaggcctaactatcagggacaccaatacttcctccgccggggcaaataccccgactatcagcattggatgggcctgagcgactccgtccaatcctgtagaataatcccccacacatccagccataagctccgactctatgagagggatgactatcgtggactgatgtccgagctgacggacgattgtgcctgcgtgcctgaattatttcgcctgcccgaaatctattctctgcacgtactggaaggctgctgggtgctgtacgaaatgccaaattataggggccgacagtatcttctgcggccaggcgattaccggcgataccatgattgggggggcgccgacgccaaggtgggtagcctccgtagagtgactgatctgtactag

SEQ ID NO: 184001 - DNA, 528 bp, synthetic construct
  misc_feature 1..528: note = Description of Artificial Sequence: Synthetic coding sequence
  source 1..528: mol_type = other DNA
atgggcaagatcaccttctacgaggaccgggccttccagggccggtcatatgaatgcaccaccgactgtccgaacctgcagccatacttctcacggtgcaatagcatcagggtggaatccggatgctggatgatttacgagcgccctaactaccaaggtcaccagtactttctccggcgcggcgagtacccagactatcagcagtggatgggactgtccgattctattcggtcatgctgcctgatcccgccccactccggtgcataccggatgaagatctacgacagggacgaacttcgaggacagatgtcagagctgacagacgattgcatctcagtgcaagaccgctttcatttgactgaaattcactctctgaatgtgctcgaggggtcctggatcctgtacgagatgccaaactataggggtcggcaataccttctgagacctggcgaatatagaaggtttctggactggggagcacccaacgccaaagtgggtagtttgcggagagtaatggacctatattag

SEQ ID NO: 184002 - DNA, 525 bp, synthetic construct
  misc_feature 1..525: note = Description of Artificial Sequence: Synthetic coding sequence
  source 1..525: mol_type = other DNA
atgggcaagatcaccttctacgaggaccgggccttccagggccggagctatgagacaacgactgactgcccgaacctgcagccttatttcagtaggtgcaatagcatccgagttgaatccggctgctggatgctatacgagcgtccgaattaccaagggcaacagtatttactgcgcaggggagaataccccgattatcagcagtggatggggctgagcgattctatcagatcttgttgcttgattcctcagactgtgagccatcgcttaagactctacgaaagagaggaccacaagggactcatgatggagctcagcgaggattgtccctctatccaggaccggttccatttgagtgaaatccgatctcttcatgtgctggaggggtgctgggttttatatgagttacccaactacagaggaagacagtacctcctgcgaccgcaggagtaccggagatgtcaagactggggcgccatggatgctaaggccggttctctgagaagggtggtggatctctactag

SEQ ID NO: 184003 - DNA, 525 bp, synthetic construct
  misc_feature 1..525: note = Description of Artificial Sequence: Synthetic coding sequence
  source 1..525: mol_type = other DNA
atgggcaagatcaccctgtacgaggaccggggcttccagggccggcactacgagtgtagttcagatcatccgaatttgcagccttatcttagcaggtgcaacagcgcccgggtggactcaggctgctggatgttatacgagcagccaaattactcaggcctgcaatattttctgcggcgcggtgattacgcagaccatcagcagtggatgggtctgagtgattcagtgcggtcttgccggctgatcccacactcaggctcccatcggatacgcctgtacgagagagaagactatagaggtcagatgatcgagttcaccgaagactgtagctgccttcaggatagattcaggtttaatgaaattcacagtctgaacgtgttggagggctcctgggtgctctatgaactgtctaattaccgcggacggcaatacctactgatgcctggtgattaccggagataccaagactggggggctactaacgccagagtgggcagcttacgccgggtgattgactttagctag

SEQ ID NO: 184004 - DNA, 537 bp, synthetic construct
  misc_feature 1..537: note = Description of Artificial Sequence: Synthetic coding sequence
  source 1..537: mol_type = other DNA
atgagcaagaccggcaccaagatcaccttctacgaggacaagaactttcaaggaagacgctacgattgcgactgcgactgcgccgactttcatacctatctgtctagatgcaatagtatcaaggtggagggaggaacttgggcggtttatgagcgtcctaattttgcaggttacatgtacatcctcccgcagggagagtacccggaataccagcgctggatgggcctcaacgatcggttgtcttcatgcagggctgtgcatctccctagtgggggccaatacaagattcagatatttgaaaagggcgattttagtggacaaatgtacgaaactactgaagattgtccaagcattatggagcagtttcacatgcgagagatccattcttgtaaggtcctggagggggtgtggatcttctatgagcttcccaattatagaggcagacagtacctgcttgacaagaaagagtataggaagcctatagattggggcgctgcatccccagccgtgcagagctttcggaggatcgtggagtag

SEQ ID NO: 184005 - DNA, 537 bp, synthetic construct
  misc_feature 1..537: note = Description of Artificial Sequence: Synthetic coding sequence
  source 1..537: mol_type = other DNA
atgagcaagaccggcaccaagatcaccttctacgaggacaagaactttcaggggaggcgctacgactgtgattgtgactgcgccgatttccatacttatctgagccgctgtaattcaattaaggtggaagggggaacttgggctgtctacgagagacccaatttcgccgggtatatgtatatcctgccccagggcgaataccctgagtaccagagatggatgggactgaatgataggttgtcctcctgtcgcgccgtacatctgccttccggcgggcaatacaagattcagatcttcgagaaaggcgactttagtggacagatgtacgaaacaaccgaagactgcccctccataatggagcaattccacatgagagagatccactcatgtaaggttctcgaaggggtgtggattttttacgaactgcccaactatagagggcggcagtatctcttggacaagaaggaataccggaagcccatcgattggggggccgcttcacctgcagttcaaagcttcaggcggattgtcgagtag

SEQ ID NO: 184006 - DNA, 960 bp, synthetic construct
  misc_feature 1..960: note = Description of Artificial Sequence: Synthetic coding sequence
  source 1..960: mol_type = other DNA
atggccagcagcgccgccggctgcgtggtgatcgtgggcagcggcgttataggccgctcttgggcgatgttgttcgctagcggaggatttcaggtgaagctctacgacatcgaacagcagcagatccggaatgccctcgaaaacatccgcaaagaaatgaaacttctagagcaggcgggatctctgaagggatctttgagcgtggaagaacagctctcccttatttctggctgcccaaacatacaggaagctgtggagggcgccatgcatatccaagaatgcgtgcctgaggatttagaactgaagaaaaaaatttttgctcagctggattctatcattgacgaccgcgtgatcctgagcagttctacaagctgtctgatgccgagcaagctttttgctgggctggttcacgtcaagcagtgcatagtagcacatcccgtcaatccaccttactatatccccctggtcgagctggtccctcacccagaaaccgccccaacaacggtggacagaacacatgcactgatgaaaaagattggacaatgtccaatgcgtgtccagaaggaggtagctggctttgtgctcaatcggttgcagtatgcaatcatctccgaagcttggcggttggtggaggaagggatcgtgtctccctcggatttagatctggtaatgtctgaaggtctgggcatgaggtatgcctttatcggaccactggagacaatgcatctgaatgccgaaggcatgctgtcatactgtgatcggtattcagaaggaataaaacacgtgttgcagacatttgggccaattcccgaattttctcgcgctaccgcggaaaaggtaaatcaggatatgtgtatgaaggtaccagatgaccctgagcacctggccgccagaaggcagtggagagatgagtgccttatgcgactggcaaagctgaagagtcaggttcagccgcagtag

SEQ ID NO: 184007 - DNA, 2346 bp, synthetic construct
  misc_feature 1..2346: note = Description of Artificial Sequence: Synthetic coding sequence
  source 1..2346: mol_type = other DNA
atggccaagacccccagcgaccacctgctgagcaccctggaggagttggttccctacgatttcgaaaaattcaaattcaaactacagaacacgagcgtgcaaaaggagcattcgcggataccacggtctcaaatacagcgtgcgcgtcctgtcaagatggctactctgctggtaacttactacggggaggaatatgccgtacagctcaccctccaggtccttcgggcaatcaatcaaagactattggctgaggagctgcaccgagcagcaatccaggaatatagtacccaggagaatggaaccgatgactctgcagcgtcctcctccctgggggaaaataagccaagaagtctgaagacaccggaccatccagagggaaatgagggaaatggcccaaggccgtatggcgggggcgcagcttctctgagatgcagtcagcccgaggctggccggggcctttctaggaagcccctgtccaaaagacgggaaaaagcatccgagggcttagatgctcaaggcaaaccaaggaccagaagcccagccctgcctggcgggagatctccaggaccctgcagagcactggagggtggacaggctgaggtccggctgaggcgaaacgccagcagtgctggacggttgcaaggcctggctggcggggcgcccggccagaaagaatgtcgcccattcgaagtatacctgccctcaggcaaaatgagaccccgctcgctggaggtgaccatctccaccggagagaaggcccccgcaaatccagaaattctccttactctggaggagaagaccgccgctaacttagacagcgccaccgagccccgagctagacctacgcccgacgggggagcctccgctgatctgaaggagggacccgggaatcctgagcactctgttacaggacggcctcccgacacggcagcgagtccgcgctgtcatgcgcaagagggtgaccccgtcgatggaacatgcgtgcgggattcttgctcttttccggaagcggtaagcggtcacccccaggctagcggctctaggagtccaggttgccccaggtgtcaagactcacacgagcggaaatctcccggatcactgtccccccagcccttaccacagtgcaagcggcatttgaagcaggtgcagctactcttctgcgaagaccatgatgagcctatatgcctgatatgttcactaagtcaagaacatcaggggcatagagtgaggcccatcgaggaagtggctctcgagcataagaagaagattcagaaacagctcgagcacctgaaaaaactgagaaaaagcggcgaggaacagaggagctacggcgaggagaaagcagtgtcatttctgaagcagaccgaagcactcaagcagcgggtacaaagaaaactggagcaagtctactactttctcgaacagcaggaacatttttttgttgcctccttggaagacgtgggacaaatggtcggacaaatcaggaaggcttacgatactcgggtatcccaggacatcgctctccttgacgctctgatcggggagctggaggctaaggagtgccagtccgaatgggagctgctgcaggacatcggggacatcctgcaccgtgccaaaactgtgcctgtgccagaaaaatggacaaccccccaggaaataaagcaaaaaattcagctgttgcaccagaagagtgagttcgtggagaagagtacaaagtacttctccgagacactgcggtccgagatggagatgtttaacgttcctgaacttattggcgcccaggcccacgccgtgaatgtaatcctggacgcggaaaccgcgtacccgaatctgattttctctgatgatcttaagagtgttcgcctaggcaacaaatgggaacgcttgcccgacggcccccaaagattcgattcatgtatcattgttttaggctccccgagttttctgagcggcaggaggtattgggaagttgaggttggtgacaagaccgcatggatcctgggagcctgtaaaacaagcatttcccgcaagggtaacatgacactcagcccagaaaatggatactgggttgttatcatgatgaaagagaacgaatatcaggcttcttctgtgccccccacacgcctgcttataaaggaaccccccaaaagagtcggtattttcgtagactatcgagtcggaagcatttcattttacaatgttacagctagaagccacatctacacatttgcctcatgtagcttttctggtccattgcagcctattttctcccctggcacccgtgatggcgggaagaacaccgcccctctcactatttgtcccgtaggtggccaaggaccggattag

SEQ ID NO: 184008 - DNA, 945 bp, synthetic construct
  misc_feature 1..945: note = Description of Artificial Sequence: Synthetic coding sequence
  source 1..945: mol_type = other DNA
atgagccgggtgcccgccttcctgagcgccgccgaggtggaggagcatcttagatcaagttcactgttgatcccccccctagagacagccctggcaaacttcagctctgggccagagggtggcgtcatgcaaccagttcggacggttgtgccagttaccaaacatcgcggatatctgggcgttatgccagcttactccgcagcagaagacgctctgactactaagcttgtgaccttctacgaagatcggggtatcacgtcggtagtgccttcacaccaggcaacagtgctgctgttcgaaccctccaatggcaccttgctggccgtgatggacggaaatgtcataaccgccaaaaggacagctgccgtatcggcgattgctacaaaatttctcaaacctccgagctcagaagtgctgtgtattctaggcgcaggagtgcaggcttactcccattatgaaatcttcaccgaacagttcagctttaaggaggttcggatctggaatcggaccaaggagaatgccgaaaagttcgccgacaccgtgcagggcgaggtacgagtatgttcctcggtccaagaagcagtagcgggggcggatgtcattattactgtgacactggcaaccgagcccattctttttggggagtgggtcaagcccggcgcacacatcaacgccgtgggtgcttcacggcccgactggcgcgagctcgatgatgagctgatgaaggaagccgtgctatatgtggattctcaagaagctgctcttaaagagtcgggcgatgtactgctcagcggagcagaaatcttcgccgaactcggcgaggttataaaaggtgtaaaacctgcccattgcgagaagacaacagtgttcaagagtctgggcatggctgttgaggatactgtagccgcgaagttaatctacgacagctggtcttctgggaaatag

SEQ ID NO: 184009 - DNA, 819 bp, synthetic construct
  misc_feature 1..819: note = Description of Artificial Sequence: Synthetic coding sequence
  source 1..819: mol_type = other DNA
atgcagcccgtgcggaccgtggtgcccgtgaccaagcaccggggctacttgggtgtcatgccagcgtactccgctgcagaggatgctctgactaccaagcttgtcacattttatgaagatagggggattacgtcagtggtcccctctcaccaggcaaccgtcttattatttgaaccatctaatggcactttgttagccgtgatggacggaaatgtgatcactgctaaacgcaccgccgcagtatccgctattgcgaccaaatttctgaagccaccttcatccgaggtgctgtgtattctaggcgcaggggtgcaggcctacagtcattatgagattttcactgaacagtttagctttaaagaggttagaatttggaatcgtaccaaagagaatgctgaaaaatttgccgacacagtccagggggaggtcagggtatgcagcagcgtacaggaggcagttgcaggggctgacgtgatcattacggtcactttggcaacagagcctatactatttggtgaatgggtcaagcctggcgcccatattaatgccgtgggcgcaagccggcctgactggcgagagttggacgatgaactgatgaaggaggcagtactgtacgttgactcacaggaggccgctctgaaagagagtggggatgtacttctgtccggggctgagatctttgccgagttgggcgaggtgatcaaaggcgtaaaacctgcccactgcgagaagacaacggtgttcaagagcctcggcatggccgtggaggataccgtggcagccaagctcatctatgatagttggagctcaggcaaatag

SEQ ID NO: 184010 - DNA, 945 bp, synthetic construct
  misc_feature 1..945: note = Description of Artificial Sequence: Synthetic coding sequence
  source 1..945: mol_type = other DNA
atgagccgggtgcccgccttcctgagcgccgccgaggtggaggagcacctgaggtctagctccctcctgatcccaccgcttgaaacagccctggctaacttcagcagcggccctgaggggggggtaatgcaaccagttcgtaccgtcgttccggtgacgaagcaccgcggatacttgggcgtcatgcctgcttactctgctgcagaagatgcacttacaaccaaattagttacattttacgaagatcggggaatcacaagtgttgtcccttcccaccaggccactgtattattgtttgaaccctccaacggaacgctgctggccgtcatggacggcaatgtaattacagccaagcggacagccgccgtgagcgccattgccaccaaattcctgaaacccccttctagcgaggtgctttgtattctcggggccggcgtccaggcctacagccactacgagatcttcacagagcagtttagttttaaggaggttcgcatctggaataggacaaaagaaaacgccgagaaatttgctgataccgttcagggggaggtgcgggtgtgctcttcagttcaggaggccgtcgccggcgccgacgtgatcattacagttaccctggcaaccgagcctatcctgtttggcgagtgggtgaagcccggggcacatatcaatgccgtgggagcatcccggccagactggcgagagcttgacgacgaactcatgaaagaagcagtgttgtacgtggactcccaggaagccgcactgaaagaaagcggcgacgttttgctaagcggggccgagatctttgcggagctcggagaagtgatcaagggcgtgaagcccgcccattgtgaaaagacaaccgttttcaaaagcctgggcatggccgtggaggatactgtggccgcaaagctgatatacgatagctggagctcgggcaagtag

SEQ ID NO: 184011 - DNA, 990 bp, synthetic construct
  misc_feature 1..990: note = Description of Artificial Sequence: Synthetic coding sequence
  source 1..990: mol_type = other DNA
atggccaccggccagaagctgatgcgggccgtgcgggtgttcgagttcggggggccggaggtgcttaaactccgctccgacatcgccgtgccaattcctaaggaccatcaggtgctcatcaaagtgcatgcatgtggcgttaatccagtcgagacatatatccgctctggcacttattccaggaagccgctattaccttacaccccgggaagcgatgtggcaggagtgattgaagccgtgggtgataacgcaagcgcgttcaagaagggagatagagtgtttaccagttctacaattagcggcggttacgcagaatacgctttggccgctgatcacaccgtttataagctgccagagaagctggatttcaagcagggcgctgctatcggtatcccctatttcactgcttaccgagcgctcattcattctgcctgtgttaaagcaggcgagtccgtgcttgtacatggcgcgtccggcggcgtcggattggctgcctgccagatcgccagagcttacgggctaaagatcctgggaacagccggtacagaggagggccagaagatagtgttacagaatggggcacatgaggtgttcaaccatcgggaggtcaactacattgacaaaatcaaaaagtatgtaggggagaagggcattgatattatcatcgaaatgctggcgaacgtgaatctgtcaaaggatctctccctcttgagtcatggcggcagggttatcgtcgtgggcagtcgcggcaccattgaaattaatccaagagacactatggcaaaggagtcatcgatcatcggcgttaccctgttctcatcaactaaagaagagtttcaacagtacgcagcggcactgcaagctggcatggaaatcggatggctgaagcctgtgatagggtcacagtatccactggagaaggtcgcggaggcccacgaaaacattatccacggctccggagccacaggcaaaatgatccttctcctttag

SEQ ID NO: 184012 - DNA, 732 bp, synthetic construct
  misc_feature 1..732: note = Description of Artificial Sequence: Synthetic coding sequence
  source 1..732: mol_type = other DNA
atggccaccggccagaagctgatgcgggccgtgcgggtgttcgagtttggaggaccagaggttctgaagctaaggagcgacatcgcagtccctataccgaaagaccaccaggtgctgatcaaggtgcacgcgtgcggagtgaatccagtggaaacctatatccgcagtggcacgtattcccggaagccgctgttaccatacaccccaggcagtgacgtcgccggagtgatcgaggcggtgggggataacgcttccgcctttaaaaagggggatagggtgttcaccagcagcacgattagtggcgggtatgccgaatacgctctggcggccgaccatacagtttataaactgcctgaaaagctggactttaaacagggggcggctattggtatcccatactttaccgcttatcgtgccctaatccactcagcatgcgtaaaagcaggagaatcggtgctggtccatggcgcctcgggaggggtaggcctggctgcgtgtcagatcgctcgagcatacggactaaaaatcctggggactgctggtacagaagagggtcagaaaatagtgctgcagaatggcgcccatgaggtgttcaatcaccgcgaagtgaactatattgataagatcaaaaaatacgtcggcgaaaaggggatcgatataattatagaaatgttagcaaacgtcaatctatccaaggatttgagcctgctctcgcacggagggcgagtgtag

SEQ ID NO: 184013 - DNA, 888 bp, synthetic construct
  misc_feature 1..888: note = Description of Artificial Sequence: Synthetic coding sequence
  source 1..888: mol_type = other DNA
atggccaccggccagaagctgatgcgggccgtgcgggtgttcgagtttggtggacctgaggtgttgaaactgagaagcgacatcgcagttccgatccccaaggatcaccaggttttgatcaaagtccatgcatgtggcgtgaacccagtggagacctacataagatcaggcacttattcacgaaagcctctgctcccatatacccctggttctgacgtcgccggagtcattgaagccgtgggcgataatgcgtccgcttttaagaagggggaccgcgtgttcacttcttcgacaatcagtgggggttacgcagaatacgctctcgccgcagatcacacggtctacaagctgccggagaagctggactttaaacaaggggccgccatagggatcccctactttactgcttaccgggccttgatccatagcgcatgtgttaaagcaggagaaagtgttctggtccatggggctagtggaggggtgggtcttgcggcctgtcagatcgctagagcatatggcttaaagattctcggcactgccgggaccgaggagggccagaagatcgttctgcaaaacggagctcacgaggtgtttaaccatagagaagttaactacatagataagattaaggttgttggttctcggggcaccattgaaatcaacccacgtgataccatggccaaggaatcttcaatcatcggggtgacactcttctcttctaccaaagaagaatttcagcagtacgctgctgcactgcaagccggcatggaaatcggatggttgaaacctgtgatcggctcccagtacccacttgagaaagttgcagaggcccatgaaaacatcatacacggctctggcgcaacaggcaagatgatccttttgctctag

SEQ ID NO: 184014 - DNA, 579 bp, synthetic construct
  misc_feature 1..579: note = Description of Artificial Sequence: Synthetic coding sequence
  source 1..579: mol_type = other DNA
atgcacctgctgagcagcgcctgcgtgaaggccggcgagagcgtgctggtgcacggcgccagtggcggggtcggcctggcggcatgtcagattgctagggcctatgggcttaaaatccttggcaccgccgggactgaagagggtcaaaagatcgtcttacaaaacggcgcccacgaggttttcaaccaccgcgaggtgaactacattgacaaaatcaagaagtacgtcggcgaaaaaggcattgacatcatcattgagatgctggcaaacgtgaatttgtcaaaggacctctcactcctgtcccacggcggccgcgtgattgtcgtggggtcacgggggactatcgagattaatccaagggacactatggccaaggagtcaagtatcatcggggtaacactgtttagctcaaccaaagaggaattccagcagtatgccgccgccctacaggcaggcatggagattggatggttgaagccagtgataggctcacaatatccactggagaaggtggctgaggctcacgaaaatattatccatggctccggcgcaacagggaaaatgatcctgctactgtag

SEQ ID NO: 184015 - DNA, 990 bp, synthetic construct
  misc_feature 1..990: note = Description of Artificial Sequence: Synthetic coding sequence
  source 1..990: mol_type = other DNA
atggccaccggccagaagctgatgcgggccgtgcgggtgttcgagttcggcggaccggaagtcctgaaacttaggagcgacatcgccgtgccaatccctaaagaccatcaggtacttatcaaagtgcacgcgtgtggagtgaacccggtggaaacatacatcagatctgggacctacagcagaaagcccctgctgccttacacccccggcagcgacgttgcgggagtgatcgaagccgtcggcgacaacgcgtccgcctttaaaaagggcgaccgtgtcttcacttcctctaccattagcggcggatatgcggagtacgctcttgcagccgatcacacagtgtacaagctgccagaaaagttggactttaagcagggggccgctatcggcattccgtattttacagcctatagggcactcattcactcggcgtgcgttaaggcaggggagtcagttttggtgcacggcgccagcggcggggttggtctcgctgcttgtcagatcgcccgcgcatacggcctgaaaatcctcggaactgctggaaccgaggagggtcagaagatagttttgcagaacggcgctcatgaggtgtttaaccacagggaagtgaactacatcgacaagataaagaagtacgtgggggagaaaggcatcgatattatcattgaaatgctagctaatgtaaacctttccaaggacctgagtttactgtctcatggagggagggtgatcgtggtggggtccagggggaccattgagatcaatccccgagatacaatggccaaagaatctagcatcattggtgtgaccttgtttagttcaacgaaggaggagttccaacagtatgcagccgcgttacaggccggcatggaaattggctggctgaagcccgtgatcggatcccaatatccactggagaaggtcgccgaagcgcacgaaaacatcattcacggatcaggcgccactggcaaaatgatcctactactttag

SEQ ID NO: 184016 - DNA, 621 bp, synthetic construct
  misc_feature 1..621: note = Description of Artificial Sequence: Synthetic coding sequence
  source 1..621: mol_type = other DNA
atggccaccggccagaagctgatgcgggccgtgcgggtgttcgagttcggcgggccagaagtacttaaactgcgatctgatattgctgtgcctatcccaaaggaccaccaagtgctcatcaaagtacacgcctgtggcgtgaatcctgtcgagacctacatcagaagcggcacatatagccgaaagccactgttgccatacaccccgggatctgacgttgccggcgtaatcgaggcagtgggagacaacgcttctgctttcaagaaaggcgatagggtgtttacctctagtaccatttcgggcggctatgcggaatatgctttggcagccgaccataccgtttataagctcccagaaaaactcgacttcaagcagggagcagccatcggcatcccctattttaccgcttacagggcactcatccactctgcctgcgtgaaggccggggagtcggtgctggtgcacggtgcgagcggtggcgtgggcctggccgcttgccagatagcacgggcgtatggactgaagatattgggtaccgcagggacagaggaaggtcagaagatagtactgcagaatggggcacatgaggtgtttaatcaccgcgaggtgaattacatctag

SEQ ID NO: 184017 - DNA, 1050 bp, synthetic construct
  misc_feature 1..1050: note = Description of Artificial Sequence: Synthetic coding sequence
  source 1..1050: mol_type = other DNA
atgaagggcctgtacttccagcagagcagcaccgacgaggagatcacttttgttttccaagagaaggaagaccttcctgtcacagaagataactttgtcaaactgcaggtgaaggcatgcgcgctgtcgcaaatcaacaccaagttgctcgctgagatgaaaatgaagaaagacctgttccctgtgggacgagagattgccggcatcgtcctggatgttggatccaaagtatcctttttccagcccgatgatgaagtggtgggcatcctgccactcgactccgaagatccggggttatgtgaggtcgtgagggtacatgagcattatctggtgcacaagccggaaaaagtaacgtggaccgaggccgccggtagtatccgggacggcgtccgcgcctataccgccctgcactacctttctcacctgtccccagggaaatccgtacttattatggatggcgcgtctgcattcggaaccatagccatccagctcgctcaccacaggggcgctaaagtaatcagcaccgcgtgcagcctggaagataagcagtgtctagagcgcttccggccacctattgcaagagttatagacgtgtcaaacggtaaagtccacgtcgccgaatcttgtttggaggagactggaggacttggcgtcgacattgtactcgacgctggtgtgcgactttacagtaaggatgatgagcccgctgttaagctgcaactgctgccccataagcacgatatcatcaccctgttgggcgtgggtgggcattgggtgaccacagaggagaatttacaattagacccacctgacagccactgccttttcctgaagggcgcaacacttgcgttcctgaatgacgaggtttggaacctgagtaacgtgcagcaaggcaagtacctgtgtattctgaaggacgtgatggagaagctgagcactggtgtgtttaggcctcaactggatgaacccatacctctctacgaagccaaagtgagcatggaagctgtgcagaagaaccagggacgcaagaaacaagtggtccagttctag

SEQ ID NO: 184018 - DNA, 546 bp, synthetic construct
  misc_feature 1..546: note = Description of Artificial Sequence: Synthetic coding sequence
  source 1..546: mol_type = other DNA
atgaagggcctgtacttccagcagagcagcaccgacgaggagatcacatttgtgttccaggagaaagaggacctgcctgtcacggaagacaatttcgtgaaactccaggtcaaggcgtgcgctctctcccagattaacaccaagttgctggcagagatgaagatgaagaaggatctgttccccgtcggacgtgagatcgcaggcatcgtgctggacgttgggagcaaggtgtccttcttccagccagacgatgaggtagtgggaatattgcccctggacagcgaagatcccggcttgtgcgaggtcgtgcgagttcatgagcattacttggtccataagcctgaaaaggtcacttggacggaagccgcaggttccattcgcgacggggttcgcgcatacaccgctttacactatcttagccatctcagtcccgggaagagcgttttgatcatggacggtgcctcagccttcgggaccattgcaatacagcttgcacaccatcgcggagctaaggtcatcagcacagcctgctcgttagaagattag

SEQ ID NO: 184019 - DNA, 60 bp, synthetic construct
  misc_feature 1..60: note = Description of Artificial Sequence: Synthetic coding sequence
  source 1..60: mol_type = other DNA
atgaagggcctgtacttccagcagagcagcaccgacgaggagatcacctttgttttttag

SEQ ID NO: 184020 - DNA, 597 bp, synthetic construct
  misc_feature 1..597: note = Description of Artificial Sequence: Synthetic coding sequence
  source 1..597: mol_type = other DNA
atgaagggcctgtacttccagcagagcagcaccgacgaggagatcactttcgtcttccaggagaaagaagatctcccagtcaccgaagataattttgtcaagctgcaggtaaaggcatgcgccctgagccaaattaataccaaattgcttgccgagatgaaaatgaagaaggacctattccccgtggggcgggagattgctggtattgtcctagacgtcggctcaaaggtgtcgttctttcagcctgacgatgaagtggtggggatactgccccttgactccgaagacccaggcctgtgcgaagtggtgagggtgcacgagcattacctagttcacaagccagaaaaagtcacatggactgaggcagccggctcaattcgggacggcgtgagagcttacacagctctgcattacctgtctcatctcagcccaggcaagagtgttctaatcatggatggggcaagcgcctttggcaccatcgccatccagttagcacatcaccggggagctaaggttatatctaccgcatgcagtctggaggataaacagtgtctcgaacgctttcgccctccaatcgagaattccaccattgcatag

SEQ ID NO: 184021 - DNA, 2916 bp, synthetic construct
  misc_feature 1..2916: note = Description of Artificial Sequence: Synthetic coding sequence
  source 1..2916: mol_type = other DNA
atggagctgagcgacgccaacctgcagaccctgaccgagtacctgaaaaagaccctggatcctgacccagccatcaggaggcccgccgagaagtttctggaatcagtagaaggcaatcagaattatcccctccttcttctgactctccttgagaaaagccaggacaacgtaatcaaagtgtgcgcaagtgtgacgttcaaaaactacattaagagaaattggagaattgttgaggatgagccgaataagatttgcgaggctgatcgggtggccattaaggcaaatatcgtgcatctgatgctgtccagccccgagcagatacagaaacaactttctgatgcaatttcaatcatagggcgggaagattttcctcagaagtggccggatctgctcaccgaaatggtgaatagatttcagtcaggtgatttccacgtgattaatggagtccttcgcactgcccatagcctattcaagcgttacaggcatgaattcaagtccaacgagctgtggacagagattaagctggtccttgacgcattcgcccttcctctgaccaatttattcaaggctacgatagagctctgctccacccatgctaatgacgcaagcgcattaaggattctgttttctagtctaattctaatcagcaaactcttctactctctgaactttcaagatctccctgagttcttcgaagacaatatggagacctggatgaacaattttcacaccttgctgactcttgacaacaagttgctgcagacagacgacgaagaggaggctggcttgctcgaactcctgaaaagtcaaatctgcgacaacgcggccctctacgctcagaaatacgacgaagaattccaaaggtacctgcctcggttcgttacagccatctggaatctgcttgtaacgacgggccaggaagtcaaatacgaccttcttgtgagcaacgctatacagtttttagccagcgtgtgcgagcgcccccattataagaacctctttgaagatcaaaataccctgaccagcatttgcgagaaggtgatcgtgcctaatatggagtttagagctgccgacgaagaagcatttgaagacaacagtgaagagtatatccgccgtgacctggaggggagcgacattgacacacgccggcgtgccgcttgcgatctggttcgtggattgtgcaaattttttgaagggcctgttactggcatcttttctggttacgttaacagtatgctgcaggagtatgccaaaaacccttcagtcaactggaagcacaaggacgcagccatatatcttgtcacatcactagcaagcaaagcgcaaactcagaagcacggtatcacccaggctaatgagcttgtcaatttaaccgaattttttgtgaatcacatcttgcctgacctgaagagtgctaacgttaatgagttccctgtcctgaaggccgatggcataaaatatatcatgatcttccgtaatcaggtgcctaaagagcatcttctggtaagcatccccctcttgataaaccacctgcaggcagagtctatagtggtgcatacttatgcagctcacgccctggaaagattatttacaatgcggggccccaataatgccaccctgtttacggccgccgaaattgctcccttcgttgagatcctcctcaccaacctgttcaaagctctgacattgccagggagctcagaaaacgaatacatcatgaaagctattatgcgcagctttagtctgctacaggaggcaatcattccttacatccccacgctcatcacacagcttactcagaaattattggccgtgtctaagaatccatctaaaccgcattttaatcactacatgttcgaggcgatctgcctgtccattaggattacatgcaaggccaatcctgcagctgtggtgaacttcgaggaggcactattcttggtctttaccgagatacttcagaacgacgtccaggaattcatcccatacgtgtttcaggtgatgagtctgctcttggagacacataagaacgatataccgtcgtcctacatggcgctcttcccacacctgcttcaacctgtgctgtgggaacgaaccgggaatattccagctctggtgagactcctgcaggcttttctggaacgggggagcaataccattgcgtccgccgccgccgacaaaatcccaggcttgttgggcgtttttcagaagctgatcgcgagcaaagccaacgatcaccagggtttttacctgctcaactctatcatagaacacatgccacctgagtccgttgaccaatataggaaacaaatcttcatcctgctgtttcagagactgcagaactcgaagaccacgaagtttattaagagctttcttgtgttcatcaatctgtattgcataaagtacggggcgcttgcgctgcaagaaatttttgatggcatacaacccaagatgtttgggatggttctggaaaagattataattcccgaaattcagaaagtgtctggaaacgtcgaaaagaagatatgtgcagtaggaatcacaaagctgctgaccgaatgcccccctatgatggacaccgagtacaccaagctctggactccactactccaatcccttatcgggctcttcgagcttccagaggacgacacaatacccgacgaggaacactttattgatatcgaggatacaccaggctatcagaccgcatttagccagctcgccttcgccggtaaaaaagaacacgatcccgtcggtcaaatggtcaacaatcccaagatccacttagctcagtctttgcacaagctgtcgaccgcttgcccgggcagagttccctcaatggtctccacatctttgaacgcggaagctctgcagtacctgcaaggatatcttcaggccgcttccgtaacattactgtag

SEQ ID NO: 184022 - DNA, 2748 bp, synthetic construct
  misc_feature 1..2748: note = Description of Artificial Sequence: Synthetic coding sequence
  source 1..2748: mol_type = other DNA
atggagctgagcgacgccaacctgcagaccctgaccgagtacctgaagaaaacactggatccagatcctgccatccgccgcccagctgagaagtttcttgagtccgtagaagggaaccaaaactacccactcctgctcctaaccctgctggagaagagtcaggacaacgtgataaaagtgtgtgcaagcgtcacgtttaagaactacattaagagaaactggagaatcgttgaggacgagcccaacaaaatttgtgaggctgatagagtcgccattaaagccaacatcgtgcatctcatgcttagcagccccgagcagattcagaaacagctcagcgacgccatctcaatcattggccgggaggactttccccagaaatggcctgacttacttactgaaatggttaatagatttcaaagcggagatttccatgtaatcaatggcgtgctacggactgcacacagtctcttcaagcgttacaggcacgagtttaagtctaacgagctgtggactgagattaagctggttctggacgcctttgcactcccactgacaaatctgtttaaggctacaattgaactgtgtagtacacacgcaaatgatgcttccgccctgcgcatcctgttttcctcactgatactcattagcaaattattttacagcttaaactttcaggatttgccagagttctttgaggacaacatggagacttggatgaataactttcacacgctgctgacgttggacaacaagctcttacagaccgatctggtctccaacgctatccagtttctggcatccgtgtgcgaacggcctcattacaagaatctattcgaggatcagaacacactaacctctatttgcgagaaggtgatcgtacccaatatggaattcagggccgccgatgaggaggcgtttgaagataactcagaagaatatattaggcgggacttagagggaagtgatatcgatacacggcggcgggcagcctgcgatctggtgaggggactttgcaaatttttcgaaggccccgtaacaggcatcttttcaggctatgtgaattcaatgctgcaggagtatgcaaagaacccatcggtcaattggaagcacaaagatgccgccatctacctcgtgaccagcttagcctctaaggcccagacccagaaacatgggattacgcaagccaacgagctcgtgaatctgactgagttttttgtgaaccacattttgcctgaccttaagtctgccaatgtcaacgaatttcccgtgttaaaggctgacgggattaaatacattatgattttccggaaccaggtccctaaggagcacttgctcgtttccatcccactgctcatcaatcatctgcaggccgaaagcattgttgtgcacacttacgccgctcacgccctcgagagattattcaccatgagggggccaaataacgcaaccctgtttacagcggcagaaattgccccttttgtagaaattctgcttacaaacctctttaaagcattgactcttccagggtccagcgagaacgaatacatcatgaaagcgatcatgcggtcctttagcttgctgcaagaggccatcattccctatattcctacattaatcacgcagttaacacagaagctgctagccgtcagtaagaacccttccaagccacacttcaatcactacatgttcgaggctatctgtctctcaattcggattacatgcaaggctaatccagccgctgtcgttaactttgaggaagccctcttcctggtgtttacagaaattctccagaatgatgtgcaggaatttataccctacgtgtttcaggtaatgtctctgttattagagacccataagaatgacattcctagcagttacatggccctattcccccatcttctacagcctgtgctgtgggagagaacgggaaatattcccgccctcgtgcgactgttacaggcctttttagaaaggggctcaaatactattgcatctgccgccgccgacaagataccaggtctattaggcgtgtttcagaaattaatcgcaagcaaggctaacgatcatcagggattttatctgctgaattctatcatagaacatatgccccctgaatccgtggatcagtaccggaagcagatcttcatacttctctttcagcgcctccagaatagtaaaaccacaaagttcattaagagttttctggtgttcataaacctttactgcatcaagtacggcgcgttggcactacaggaaatctttgatggaatccagccaaagatgttcggaatggtgcttgaaaagatcataatccccgagatccagaaggtctcaggaaatgttgagaagaagatctgcgccgttggtatcacaaagttgcttacggaatgccctccaatgatggacaccgaatataccaaactgtggactcccctactccagagcctgatcggtctttttgagctccctgaagacgacactatccccgacgaggagcattttatcgacattgaggatacgcccggttatcaaactgcgttctctcagttggcttttgccggaaaaaaagagcatgatcccgtcggacagatggttaataaccctaagatccatttggcccagtcgctccacaagctgagcactgcctgtccaggccgggtgccttccatggtgagtacctcactgaacgccgaggctcttcaatatttacagggttatctgcaggccgcctcagttacactgctgtag

SEQ ID NO: 184023 - DNA, 1710 bp, synthetic construct
  misc_feature 1..1710: note = Description of Artificial Sequence: Synthetic coding sequence
  source 1..1710: mol_type = other DNA
atggagacctggatgaacaacttccacaccctgctgaccctggacaataagcttcttcaaactgacgatgaagaggaggccggcctgttagagctgctaaagtcccaaatctgtgacaatgccgcactctatgcccagaaatatgatgaggaattccaaaggtaccttcccaggttcgtaactgccatttggaacctgctggttactacaggacaggaagtcaagtacgaccttctcgtgtccaatgcgattcagtttctggcctctgtgtgcgagcgacctcattacaagaacttattcgaagaccaaaacacacttacatcaatctgtgaaaaatctatagttgttcacacttatgcggctcatgcactagagcggctgtttacgatgcgcggtcctaataatgcaactctatttaccgccgcagagatagctcccttcgtcgagatccttctgaccaaccttttcaaggcactcacccttccaggaagttctgagaacgaatacatcatgaaggcaattatgcggagtttctcactcctgcaggaagccatcattccctatattcccaccctcattacccagctcactcaaaagctgttagctgttagtaaaaatccatcaaagccccatttcaatcattacatgttcgaagccatttgtctgtccattcggattacttgcaaggccaatccagctgccgtagtgaattttgaagaggcactgtttttggtctttacagagatcctgcaaaacgacgtccaggaattcatcccctatgtgtttcaagtcatgagcctgctgctcgagacccacaaaaacgacatcccgagtagctatatggccttgttcccccatcttttgcaaccagtcttgtgggagaggaccggaaatatcccagcgctagttcgactattgcaggcgttcttggagcggggcagtaacaccatcgcctcagccgccgctgataagattcccgggttactcggagttttccagaagctgatagcttccaaggctaacgaccaccagggattctacttgttgaacagcatcattgaacacatgcctcctgagtcagttgaccaatatcgaaagcagatctttatactcctgtttcagcggctgcaaaactctaagacaacgaaatttattaaatcctttcttgtgtttataaacctgtactgtatcaagtatggcgctctggccttgcaagagatctttgacgggatccagcccaaaatgtttggtatggtgctggagaaaatcatcatcccagagatccaaaaggtgtcggggaatgtcgagaaaaagatctgtgcagtcggaattactaagttgctgaccgagtgcccccctatgatggataccgaatataccaagttgtggacccccctactgcagagcctgatcggcctattcgagttgccggaggatgatacaattccagacgaagagcacttcatagatatcgaggatacgccggggtaccagaccgccttctcccagctggccttcgctggaaaaaaagaacacgatccagtcggtcaaatggttaataatccaaagatacatttggcgcaaagtctccataagcttagcacagcttgtcccggtagggtcccctcgatggtgtccacgtctttaaacgcagaagctctgcagtacctgcaggggtacctgcaagccgccagtgtaacattgctctag

SEQ ID NO: 184024 - DNA, 2265 bp, synthetic construct
  misc_feature 1..2265: note = Description of Artificial Sequence: Synthetic coding sequence
  source 1..2265: mol_type = other DNA
atgctgagcaacctgaacttccaggacctgcccgagttcttcgaggataatatggagacatggatgaataacttccacaccttactgacattggacaacaagctgctgcaaacagacgatgaagaggaagccggcttgctcgagctcctgaagagccagatctgtgacaatgccgcactgtacgctcagaagtacgatgaggaattccaacgctacctcccccggtttgttacagccatttggaacttacttgtgacaactggacaggaggtgaagtacgatctgctagtgagcaatgctatacagttcctggcatccgtttgtgaacggccccattacaaaaacttatttgaagatcagaatacccttaccagcatttgtgaaaaggtgattgtgcccaatatggagtttagggctgctgatgaagaagcctttgaagacaactccgaagagtacatccggagggatcttgaagggtctgacatagataccaggcggagagcagcctgcgacttggtgcgtggcctgtgcaaattcttcgaaggaccagttacaggcatcttctctggttacgtgaactcaatgctacaggaatatgctaaaaatccatccgtcaactggaagcacaaggatgctgctatttacctggttacgtctttggcaagcaaggcccagacccagaagcacgggatcactcaagccaacgagcttgttaatctgacagaattctttgtgaatcacatcttgccagacctaaaatcggcaaacgttaacgagtttcctgtgctgaaggcggatggcataaaatatattatgatctttaggaaccaagtacccaaggagcacctgctagtttccatcccgttgttgattaatcatctgcaggccgaatctatcgtcgtgcacacatatgcagctcacgctctcgagaggctttttactatgcgcggacctaataatgcaaccttgtttacagctgctgagatcgcgccgttcgtggaaattctactgaccaacctgttcaaggccctgacactccccgggagttcagaaaatgagtacatcatgaaagcgataatgagatcatttagcttgctgcaggaggccattatcccttatattccaaccctgattactcaattaactcagaaactcctggctgtaagcaagaatcctagcaagccacactttaaccactatatgttcgaagctatttgcctgagcattagaatcacctgtaaagccaatcccgccgccgtggtgaatttcgaggaagcccttttcctggtgtttaccgagatcttgcagaacgacgttcaggagtttattccttacgtttttcaggtaatgtccctgctgctggagacacacaaaaatgatatacccagcagttacatggccttgttcccccacctcctgcagccagttctttgggaacgcacgggaaacattcccgctcttgtcagactcttgcaggcctttctagagcgaggtagcaacaccatcgccagcgccgctgcagacaagatcccggggctactaggtgttttccagaaactgatcgctagtaaggccaatgaccatcaaggattttatcttctgaactcaatcatagaacacatgccccctgaatcagttgatcagtataggaagcagatatttatcctccttttccaacggctgcagaacagtaagaccaccaaatttatcaaatccttcttggtctttataaatctttattgcattaagtatggtgccttggcactgcaagagattttcgatggaatccagcctaaaatgttcggcatggtgctggagaagattataattccagaaattcagaaagtgtctgggaatgtagagaagaaaatctgtgctgtggggataaccaaactactgaccgaatgtccgccaatgatggacacggagtataccaaactgtggactcccttgctgcagtccctcatcggactgtttgaactgcccgaggatgacactatcccggacgaagaacatttcatagacattgaggacacacccggctaccagaccgctttcagccaacttgcttttgctggaaaaaaggagcatgatccagtcggccagatggtgaataatcccaaaatccacctggcacagtcacttcataaattgagcacggcctgtcccggccgcgtgccctcgatggtatctacaagtctgaacgcagaggccctgcaatatttgcaggggtacctccaggccgcatctgtgaccttattgtag

SEQ ID NO: 184025 - DNA, 888 bp, synthetic construct
  misc_feature 1..888: note = Description of Artificial Sequence: Synthetic coding sequence
  source 1..888: mol_type = other DNA
atgcagcccgagggcgccgagaagggcaagagcttcaagcagcggttggtcctcaaatcatccttggccaaagagacactgtccgaattcctgggaacatttatcctgatcgtcctcggctgcgggtgtgtggcccaggctatcctttcacgcgggaggttcggtggtgttattacaattaacgtaggcttttctatggcagtcgcaatggccatatacgtggctggaggcgtttccgggggacacattaacccagcagttagcttggccatgtgcctgttcgggcggatgaagtggttcaaactccctttctatgtaggtgcccagtttctcggtgctttcgtgggagcagcaactgtcttcggcatatattatgacgggctcatgtcttttgccggtggtaagctcctaattgtgggcgaaaacgccacagcccacatcttcgcaacttatcccgccccttacctgagtctcgccaacgcttttgcagaccaagtcgttgctacgatgattctgctgataatcgtattcgctatctttgactcccggaacctgggggcgccacgcggactagaacctatcgctattggactcctgatcatcgtaatcgccagcagtctcggacttaacagcgggtgcgccatgaacccagcacgagatctcagtcctaggctgtttaccgctctggccggctgggggttcgaagtgtttagggcaggcaataacttttggtggatccccgtggtcggtcctctagtcggcgcggtgattggcggactgatctacgtgcttgttattgagatccatcacccagagcctgactccgtgttcaaaaccgagcagtccgaggacaagcccgagaaatacgagctctccgttattatgtag

SEQ ID NO: 184026 - DNA, 1353 bp, synthetic construct
  misc_feature 1..1353: note = Description of Artificial Sequence: Synthetic coding sequence
  source 1..1353: mol_type = other DNA
atgagcgccatccaggccgcctggcccagcggcaccgagtgcatcgccaagtataactttcacgggacggcggagcaggatcttcccttctgtaaaggagatgtgctgactattgtggccgttaccaaggaccctaactggtataaagctaaaaacaaagtcggccgcgaggggataattccagccaattatgtgcagaagagggagggcgtgaaggcgggaaccaaactgagcctcatgccatggttccatggcaaaataaccagggagcaggcagaacgcctactgtacccacctgaaaccggtctcttcctggtgcgggaatccactaactatccaggggattacacattgtgtgttagttgtgatgggaaagttgaacactatcgtatcatgtatcacgcatcaaagttgagcattgacgaggaggtgtattttgaaaacctgatgcaactggtcgaacactatacatcagacgctgacggattatgtaccagactgatcaagcccaaagtcatggaagggacggtggccgctcaggatgaattttacaggagtgggtgggccttgaatatgaaggaattaaaattgcttcaaaccatcgggaagggtgaattcggcgacgtgatgctcggcgactatcgcgggaataaagtcgcagtgaagtgcataaaaaacgatgcaactgcccaggcattcctggctgaggccagcgtgatgacccagctgaggcattcgaatctcgtccagctgctgggtgttatcgtggaggagaaaggagggctgtatattgtaactgaatacatggctaaaggcagtctcgtggactacctgcgatcacgcggaagatccgttttagggggtgactgtctgctgaaattcagcctcgatgtctgtgaggcgatggagtacctggaaggaaataacttcgtccatcgggatctggccgccaggaacgtcctggtctcagaagataacgtagcgaaggttagcgatttcggtctgactaaagaggcctcaagtacccaggacacggggaagctccctgtgaagtggactgctcccgaggcgctccgggagaagaaattctccaccaaatctgatgtctggagcttcggaattctcttgtgggaaatctacagtttcggccgtgtgccctatccgaggattccactgaaagacgtggtaccccgagtggagaagggctataaaatggatgctcccgacgggtgtcccccagcagtgtatgaggtcatgaagaattgctggcacctggatgcagcaatgcgcccaagtttcttgcagctcagggagcagctcgagcatatcaaaactcatgaattgcacctctag

SEQ ID NO: 184027 - DNA, 1353 bp, synthetic construct
  misc_feature 1..1353: note = Description of Artificial Sequence: Synthetic coding sequence
  source 1..1353: mol_type = other DNA
atgagcgccatccaggccgcctggcccagcggcaccgagtgcatcgcaaaatataactttcatggaactgccgagcaggacctgcctttctgtaagggcgacgtgctgacaatcgtggctgtcaccaaagatcctaactggtataaagccaaaaacaaggtcgggcgtgaagggatcatccctgctaattatgtgcagaagagggagggcgtaaaggccggaaccaagctatccctcatgccatggttccatggtaagattacgagagagcaagctgaaaggctgctgtatccccctgagaccggcctcttccttgtacgagagtccacaaactaccctggagactacaccctgtgtgtgtcttgcgatggcaaggtcgagcactatcgcatcatgtaccatgcatccaaactgagcattgatgaagaggtgtacttcgagaatcttatgcagctggttgaacattatacttccgacgctgacgggctctgcaccagactgatcaagcccaaagtgatggagggaaccgttgccgcccaggacgaattctataggtccggctgggcactgaacatgaaagagcttaaactcctgcagactataggaaagggtgaattcggtgacgttatgttgggggattatagaggcaataaagtggcagtcaagtgcatcaagaacgatgctaccgcccaggccttcctagcggaagcaagtgttatgacacagttgaggcattctaatctggtgcagctactgggcgttatcgtggaagagaagggagggctatatatcgtcactgagtacatggcaaagggcagtctggtcgattatcttcgatctagaggaagatctgtgttaggaggggactgcttgctcaagttttctctggacgtctgtgaggctatggaatacctggaaggcaataatttcgtacatagggacctggccgctcgtaatgtgctagtaagtgaagataacgtcgctaaggttagcgactttgggttgaccaaggaggccagcagcacacaggacacaggaaagctcccagttaaatggaccgcccctgaagcactgagagagaagaaattttctactaaatcagacgtgtggtcattcggcatcctgctgtgggaaatctattcttttgggagagtaccttaccctcgtatcccgctcaaagatgtggtccctcgcgtagagaagggatataagatggacgcccccgacgggtgccctccggcagtgtacgaggtcatgaaaaactgttggcacctcgacgccgcgatgagacccagctttctgcaattacgcgagcaactagaacacatcaaaacacacgaactccatctttag

SEQ ID NO: 184028 - DNA, 1200 bp, synthetic construct
  misc_feature 1..1200: note = Description of Artificial Sequence: Synthetic coding sequence
  source 1..1200: mol_type = other DNA
atgagcgccatccaggccgcctggcccagcggcaccgagtgcatcgccaagtataatttccatggcacagccgaacaagacctccctttctgtaagggcgatgtcctcacaattgttgccgtaacaaaggacccaaattggtacaaggctaagaataaagttggcagggagggaattatacccgcgaactatgttcagaaacgtgagggggtgaaggctggtacaaaactttcattgatgccgtggttccacggcaaactaagtattgatgaggaagtgtacttcgaaaatctgatgcagctcgtcgagcactatacctcagacgctgacgggctttgcacgcggttaatcaagccgaaagtgatggagggtacggtcgccgcacaagacgagttctacagatctggctgggccctcaacatgaaggagttgaaactgctgcagacgattggaaagggagagtttggcgatgtgatgcttggagattatcgaggcaataaagttgccgtcaagtgcattaagaatgacgctacagcgcaagcctttcttgccgaagccagcgtaatgacccaactcaggcatagtaatttggttcagctgctgggcgttattgtcgaagagaaggggggcctgtatatcgttactgagtacatggccaagggatccctggttgattacctgaggtcacgagggaggtcagtgcttggtggcgattgtcttctcaagtttagccttgatgtgtgcgaggcgatggaatacctcgagggaaataatttcgtgcatagagatttggccgcccgaaacgtcctcgtgtcagaagataatgttgcgaaagtgagtgacttcggactgacaaaggaggccagctcaacgcaagatacaggtaagcttccagtaaagtggacagctccagaggcattaagagagaagaagtttagcaccaagtctgatgtgtggagtttcggcattcttctgtgggagatctactccttcggccgcgtgccctacccccgcattcctcttaaagacgtcgtgccacgagtggagaaggggtacaaaatggatgccccagatggctgccctcctgcagtgtatgaggtcatgaaaaattgctggcatctggatgctgccatgcgccccagtttcctgcaactccgcgagcagctggaacacattaagacccatgaactccatttgtag

SEQ ID NO: 184029 - DNA, 783 bp, synthetic construct
  misc_feature 1..783: note = Description of Artificial Sequence: Synthetic coding sequence
  source 1..783: mol_type = other DNA
atggtggccgccccctgggccacccaggagcaggaggagggccggggcatccagcctggcgataggggcgaccagaagagcgcagccagccagaaaccgcgcagtcggggcatactgcacagccttttctgttgcgtatgccgtgacgacggcgaggcccttcctgcccactctggcgcaccactcctcgtagaggaaaatggcgcgattcccaaaacgccggtgcagtaccttttgccagaggctaaagcccaggacagtgacaaaatttgtgtagtcattgacctggacgagaccctggtccactcgagctttaaaccagttaacaacgccgattttatcattcctgttgagattgacggcgtcgttcaccaagtttatgtgctaaagcggccccacgtggacgagttccttcagcgtatgggagaactgttcgaatgcgtgctgtttactgccagtctggccaagtacgccgatcctgtggctgatctcctcgacaaatggggcgccttccgcgctcgactgttcagggaatcctgtgtgtttcacagaggaaattacgtcaaggatctgagtcgcttagggcgcgacttgcgtcgcgtgcttattctggataatagccccgccagctacgttttccatccagacaacgccgtgccagtcgccagttggtttgacaacatgagcgacactgagctccacgacttgttacccttcttcgagcagttaagccgggtggacgatgtgtactccgttctgcggcagcctcgtccagggagttag

SEQ ID NO: 184030 - DNA, 2604 bp, synthetic construct
  misc_feature 1..2604: note = Description of Artificial Sequence: Synthetic coding sequence
  source 1..2604: mol_type = other DNA
atggaggtgcccgccgccggccgggtgcccgccgagggcgcccccacagccgcagtggccgaagtgaggtgcccaggtccagccccgctgagattactggagtggagagtggcggcgggtgctgcggttcggattgggtccgtcctggccgtgtttgaagccgctgcaagcgcccagtcttcaggcgcgagtcaatcgcgtgtggcctccgggggctgcgtcagaccagcccggcccgaacgccgtctgcggtccgaaagagccggagtggtgcgcgaactctgtgctcagcctggccaggtggttgcacctggggccgtgctggtccgcctcgaaggctgctcccatcctgtggtcatgaagggtctgtgtgcagagtgtggtcaggatcttacccaattgcaaagtaaaaatgggaagcagcaggtgcccctgagcacagccacagtaagcatggtgcacagcgtcccagaattaatggtctcatccgaacaggctgaacagctgggccgagaggatcaacagaggctacatcgtaaccgtaagctggtgctcatggtcgatctcgaccaaaccctcatccatacgactgaacagcactgtcaacagatgagcaataagggcatctttcatttccaactggggaggggcgagccaatgctacatactcgtctgcggccgcattgcaaggactttctcgaaaagatcgccaaactttacgaattacacgtgttcacctttggctcccggctgtacgcccacacaatagccgggttcctcgatcctgaaaaaaaactgttctcgcacaggatcctatcccgcgacgagtgtattgatccattctctaaaaccggaaatctgagaaatctgtttccatgcggagattccatggtttgcattattgatgaccgggaagacgtgtggaagtttgctccaaatctcattaccgtaaagaagtatgtgtactttcagggtaccggagatatgaatgcccctcctggtagcagagaatcccagacccgcaaaaaggtgaatcactcacggggcacggaggtctccgagccctctccccccgtgagggatccagagggggtcacccaggccccgggagtggaaccctccaacgggcttgagaagcccgcacgtgaactgaacggatcagaggcggccacgccccgtgatagtccacgacccggaaagcccgacgagagagatatttggccccccgctcaggcccccaccagcagtcaagagctagccggagcccctgagcctcaaggaagctgtgcgcagggaggcagagtggctcctggtcagagacccgctcagggtgctaccggaaccgatctcgactttgatctaagcagcgacagcgaatcatcaagcgagagcgagggaacaaaaagtagtagtagcgcaagcgacggagagtcagaaggaaagcggggccggcagaaacctaaagcagctccagagggagccggggcacttgctcagggctcaagtctggagccaggacggccagcggcaccttctttgcctggagaggcagagcccggcgcacacgcgcccgacaaagaacccgaattgggaggacaggaggagggcgagcgcgatggtctgtgtggactaggcaacggctgcgccgaccgcaaagaggccgaaacagagtcacagaactccgagttatccggtgtgaccgccggggagagtcttgatcaatcaatggaagaagaggaagaagaggacacggacgaggatgaccacctgatctaccttgaagagatacttgttcgcgtgcacactgactattacgccaaatacgacaggtatttgaataaagagattgaggaggcgcctgatatcagaaagatcgtccctgaactcaaatccaaggtgctggccgacgttgcaatcatattctccggcctgcatccaacgaattttcctatcgaaaaaaccagggaacattaccacgctaccgcattgggcgccaagatcctgaccagactggtcctaagtcccgatgcccccgacagagctacccatcttatcgctgctagggccggaacagagaaggtgttacaggcccaggaatgcgggcacttacacgtggtgaacccagactggctgtggtcatgcctcgaacggtgggacaaagttgaggaacaactttttccgcttcgggacgatcatacaaaagcccagcgggaaaactcccctgccgcattccctgaccgcgagggtgtgccaccaactgccctcttccaccccatgcctgtcctcccaaaggcccagcctggaccagaagtgcgtatttatgattcaaacactggcaagctgattcgcactggggcacggggtccgcccgctcccagcagcagcctgccgattagacaagagccctcatcctttaggtggactacaagtctggagaaggccgccaccacagccacggcccgtaggggcggcttgaggagtcgaaggcgctcgcccagtcccggaagccagggccccgcaggctccggccggagcggacacttgcgccctgctagaggggcgcgacaaggcgcaggcggacccgaggctacccgcggcagctag

SEQ ID NO: 184031 - DNA, 2886 bp, synthetic construct
  misc_feature 1..2886: note = Description of Artificial Sequence: Synthetic coding sequence
  source 1..2886: mol_type = other DNA
atggaggtgcccgccgccggccgggtgcccgccgagggcgcccccacagcggccgtagcagaggtcagatgtcccggcccagccccactgcggctgctggagtggagggtagctgctggcgcagccgtaagaatcggaagcgttttggcggtgttcgaagccgccgcttccgcccagagtagcggggccagccagagccgcgtcgcatctgggggttgtgtgcggcccgccaggccggagcgcaggctgagatctgaacgggcaggggttgtgagagagctctgcgctcagcctggacaggtggtcgccccgggcgcggtcctggtgcgcctcgagggatgttcacacccggtggtgatgaagggcctgtgcgctgaatgcggccaggatctcactcaactgcagagtaaaaatggcaagcagcaggtgccactatccaccgccaccgtctccatggtgcactctgtgccagagctgatggtatcgtccgagcaggccgagcagttagggcgcgaggaccagcaaagactgcatcggaatcgcaaattagtgttaatggtggatctcgaccagacgctgattcatactacggaacaacactgccagcaaatgagtaataagggaatctttcattttcagctggggcgcggcgagcctatgctgcacacacgcctgagaccacattgtaaagacttcctcgaaaagattgctaaactgtacgagctccatgtgttcacatttggcagcaggctttatgcccatacaattgctggcttcctggatcctgagaagaaactattctcacataggatcttgagtagagacgagtgtatagaccctttctctaagaccggcaacctgcggaacctgttcccttgtggagactcaatggtgtgtatcattgatgatagagaggatgtctggaaattcgccccaaatcttataactgtgaaaaaatacgtgtattttcagggaaccggtgacatgaatgcaccgccaggctctagggagtctcagacaaggaaaaaggtcaatcattccaggggaactgaggttagtgaaccaagcccccctgtcagggaccctgagggggtgacacaggcacccggagtggaacccagcaacggattggaaaagccagcccgagagcttaacggctcagaagcagcaacccctcgtgatagtccccgtcccgggaagccagatgagcgagatatttggcctccagctcaggcccccaccagttcacaggagctggccggggctcctgagcctcagggctcttgcgctcaaggaggcagggtagcgcccggtcaaaggccagcacagggcgccactggaactgacctggattttgatttatccagtgactccgagtcatcatcggaatcggaggggaccaaatcgtcctcatcagcctctgatggtgagtcagaaggaaagagaggccgacagaaacctaaagctgcgcctgagggtgctggcgccttggcccaagggagctccctagagcctgggcggccagctgcgccctccctgcccggcgaagcagaacctggggcgcacgcccccgacaaagagcctgaactgggagggcaagaagagggcgagcgcgacggcctttgtggtctgggcaatggttgcgcagacaggaaggaggccgaaaccgagtctcaaaactctgagctgtctggagtcacggccggagaatctttagaccaatctatggaggaagaagaagaagaggatacagatgaagatgatcacctgatctatctggaagaaattctggttagagtgcacactgactactacgctaaatacgacagatatctgaacaaggagatcgaggaagctcctgatattcggaagattgtcccggagctcaagtctaaggttctcgcagacgtggccataatattcagcggcctgcaccctaccaattttccaatcgaaaaaacaagggagcattaccacgccacagctctaggagctaagatattgactcgactagtgctgagcccagacgcacctgacagagccacccacttaatcgccgcccgggccggaaccgagaaggtacttcaagcacaggagtgcgggcatctgcacgttgtgaatccagattggctatggtcatgcctggaaaggtgggataaggtagaagagcagctgtttccactgcgcgacgaccacaccaaggcgcagagagagaattccccagccgcgttccccgatcgggagggagtgccccctacagcgctgtttcacccaatgccagttctgcccaaggcccaaccaggccccgaggttaggatctatgactctaatacaggcaagctgattaggacgggagcacgcggcccgccagctccctctagctcactgcctattcggcaggaaccatcatcatttagagccgtaccgcctccgcagccccagatgttcggcgaagagctgcctgatgcgcaggatggcgagcagcccggaccttctcgcaggaaacgccagccaagtatgtccgagacaatgccactgtacacgctgtgcaaagaggacctggagtcaatggataaggaagtggacgatatacttggagaggggagcgacgacagtgattctgagaaaaggcgccccgaggaacaagaggaggagccacagcccagaaagcccggtacacgccgtgagaggaccctcggggcacctgcttcctccgagcgctcagccgcaggtgggaggggaccccggggacataagaggaaactgaatgaggaggatgcagccagtgaatcatcccgggaatcttccaatgaggacgagggaagctccagcgaagccgatgagatggctaaagctctggaggctgaattgaacgatctgatgtag

SEQ ID NO: 184032 - DNA, 786 bp, synthetic construct
  misc_feature 1..786: note = Description of Artificial Sequence: Synthetic coding sequence
  source 1..786: mol_type = other DNA
atggacagcagcgccgtgatcacccagatcagcaaggaggaggcccggggcccgttaagagggaagggagaccagaaatcagctgcctcccaaaaacctagatctagaggaatcttacactctctgttctgttgtgtgtgccgagatgacggagaggcacttccagcacactccggtgctcctcttctggtcgaagaaaacggtgccattccaaagcagacaccagtgcaatatctcctacctgaagccaaagcccaggatagtgataaaatatgtgttgtaatcgacctggacgaaacactggtgcactcttcttttaaacccgttaacaacgctgacttcattatccccgtagaaatcgatggtgtggttcatcaggtgtatgtgctgaagaggccgcatgtcgatgagtttctgcaacggatgggagagcttttcgaatgtgtcttatttaccgcctccctggctaaatatgccgatcctgttgccgatctgctggacaaatggggcgcgttcagggcccgcttatttagagagagctgcgttttccaccggggcaattatgttaaggacctgagccggctcggaagagacctgcgaagggtgctgatccttgacaatagccctgcaagctacgtcttccatcccgacaatgccgtaccagttgcatcttggttcgacaatatgagcgacacagaacttcatgatcttttgccgttcttcgaacaactgtcacgcgttgacgacgtgtactctgttctgagacagccacgtccgggctcatag

SEQ ID NO: 184033 - DNA, 2928 bp, synthetic construct
  misc_feature 1..2928: note = Description of Artificial Sequence: Synthetic coding sequence
  source 1..2928: mol_type = other DNA
atggaggactacgagcaggagctgtgcggcgtggaggacgacttccataatcagttcgctgcggaactcgaagtcctcgcagaactggagggcgccagcacccctagcccttctggcgtgcctctgtttacagcggggcgcccaccaaggacttttgaggaagccctggccagaggcgacgccgcttcatctcccgcgccagcagctagcgtggggagtagtcagggcggagcaaggaagaggcaggtggacgcggacctgcagccggcgggcagcctcccccatgctccccggattaagcggccccgcctccaagttgtgaaacgactcaatttccggtctgaggaaatggaagagcctccaccgccagacagtagtcccaccgacattacgccaccacctagccctgaagatctcgcagaactttggggccatggtgtgagcgaagctgctgccgacgtcggcctgactcgcgcatccccagcggcaaggaatcctgtgcttaggagaccccccatcttggaggactacgtccatgtgacgtcaactgagggcgttagggcctacctggtcctgagagctgatcctatggcgcccggcgttcagggcagcttgctgcacgtgccttggcgaggcggaggccagctggatttgctgggagtctcattagcttcactgaaaaagcaggtggacggcgagcggcgggagcggctcctccaggaggcccaaaaactgtccgacacactccatagcttgcgctccggggaagaagaggccgcgcagccacttggagcgcctgaggaagaacccaccgatggccaagatgcctccagtcactgcctttgggtagatgaattcgctccaagacattatacagagctactttccgacgacttcaccaatcgttgtctgttaaaatggctgaaactgtgggacctcgtggtgtttggacatgagagacctagccgcaagccgcggccgtcagtggaacccgcccgagtgagtaaagaggctactgcgcctggcaagtggaagagccacgagcaggtgctggaggaaatgctggaggctggactcgatccttctcaacgccccaaacagaaggtggccctgttatgtggaccacctgggctcggaaagacaaccttggcgcacgtaatcgccagacatgctggatattcggtcgtggaaatgaatgcgtccgatgatcgctcaccggaagtttttcggacccgtatcgaggccgcaactcaaatggaaagcgtactgggcgcaggtggcaaaccaaattgtctcgtcatagatgaaatcgacggggcccccgttgccgctatcaatgtgctgctgagcattttgaacaggaaaggaccacaggaagttgggccacaagggccagccgtgccctctggcggtggcaggaggagacgagctgaaggcgggctactcatgcgacccattatatgcatctgcaacgaccagtttgcacctagcctacggcagttaaaacaacaggccttccttctgcattttccaccaactctgccgtcacggctagtgcagcgtctccaagaagtttccctgaggcagggcatgagagccgatcctggagtgctcgcagccttgtgcgagaagacggacaacgacatacgcgcctgcatcaacactttgcaatttctatatagccgagggcagcgcgaactatctgttcgcgacgtgcaggcaactagagtcggccttaaggatcagcgccggggcttgttcagtgtctggcaggaggtgtttcagctgccccgcgctcagaggcggcgtgtcgggcaggaccctgctctccccgcagataccttactgctcggtgatggagacgcaggcagtctgacttccgctagccagcggttttatcgcgtgctccatgcagcggcttctgccggcgagcatgagaaggttgtacagggcctgttcgataacttcctccgcctacgcctgcgcgactcttcactgggagcagtatgtgtggcacttgactggttggcatttgacgacttgctggccggcgccgcgcatcacagtcagtcctttcagcttctgaggtatcctcctttcctccccgtcgcattccacgtgctcttcgcctccagtcatacacccaggatcacgttcccttcctcacagcaagaagcccaaaaccggatgtctcaaatgcggaaccttatccagacactagtatccggcatcgccccagccacacgtagtcgagccacgccgcaggccctcttgttggacgccctgtgcctcctgttggacattttggcaccaaaactccggcccgtgagtactcagttgtactctacccgggagaaacagcagttggcatctctggtggggacgatgctcgcatactctctgacataccggcaggaaagaacaccagatggccaatatatctacagattggagccaaatgtcgaggagctgtgccggtttcccgagctcccagccagaaaacctttgacttaccagacgaaacagcttatcgctagggagatagaggtcgagaaaatgcgcagagcagaagccagcgcacgggtagaaaatagtccacaggtggacgggagccctcctgggctcgagggtctactcggaggcatcggagaaaagggagttcaccgacctgccccacggaatcacgaacaaagactggaacacatcatgagaagggccgcccgggaggagcaaccagagaaggatttcttcggaagagtcgtcgtgcgatccaccgctgtcccaagcgccggcgacacagcccctgagcaagacagcgtcgaaagaagaatggggactgcagtcggcaggtcagaagtttggtttagatttaatgagggtgtcagtaatgcggttaggcgatccctgtatattagggacctactgtag

SEQ ID NO: 184034 - DNA, 3555 bp, synthetic construct
  misc_feature 1..3555: note = Description of Artificial Sequence: Synthetic coding sequence
  source 1..3555: mol_type = other DNA
atgcacgtgaacgccagcgcccggcggtggggccggggcggcgccgccgcactgcccggcccagctgcctctccgagacgccctgctcccaggaccggccccgtggggaggcctacattggcaccatccccatcgcgggcgcacgctcatgctaaaaccaacctcctgccagggcgggctgtacaggcgcctgatgctgtccctggagctggatcaagtagagcacctgcacgctggagaccaagagaccctgggtcttcagcacccgatgcatggcagcggtttagacccgcccccctcagggcgcagccacgcccgcctccccgtcctgctcccggcccgcccccacctcggaagggaggatgcggtggccaatggagggccccgcaggacagaactagggggcttagaagcaggaattctccaagaccccctcttgcccagccacggctccggcacgcaaatcagtggagagccccgccagggacgccagctgccgattggaggcgtccagccagaagcggccgcgccgtcagagacggcggcgggggcgcggggggatccgaacgcgagcttggccttgcggatggtatggaggattatgaacaggagctttgcggggtggaggatgacttccataatcagtttgctgcagaactggaagtgctggctgaacttgagggcgcttccacacctagcccctccggagtgccgctctttactgctgggaggcccccacggacattcgaggaggccctcgccaggggtgacgccgcaagttctcccgcccctgctgcctccgtggggtcgtctcaaggcggcgcgcgtaagcgccaagttgatgctgatttgcaacccgcaggctcactgccacatgcccctcggattaagcggcctcggcttcaggttgtgaaacggctgaactttagaagcgaagaaatggaggagcccccaccccccgactcttcccccaccgatatcactcccccgccaagtcccgaggatctggccgagctgtggggccacggctttagcgaagccgccgcagatgtggggttgacccgggcttctccggccgcaagaaatcccgttctgaggagaccccccatactcgaggattacgtgcatgtaaccagcaccgagggcgtgagagcatacctggtgctgagagcagatcctatggctcctggcgtccagggatccctcttgcacgtcccctggcgggggggggggcagctcgatctactcggggtgtcactagctagcctaaaaaagcaagtggatggtgagcgaagagaaagactactgcaggaggctcagaagctgtccgataccctgcatagaagtggagaggaagaggccgcacagcctcttggcgctcccgaggaggagcccacggatggccaggacgcgtcgtcccactgcctttgggtggatgagtttgctcctagacactataccgagcttctcagtgatgacttcaccaataggtgcctgctgaaatggctgaagctttgggacttggtggtttttggacacgaacggcccagtcggaagcctagacctagtgtcgaacccgccagggtcagcaaggaggctactgccccgggcaaatggaagagccacgagcaggtgctggaggagatgctcgaagcagggctggatcctagtcagagacccaagcagaaagtggccttgctgtgcggtccacctgggctgggcaaaactaccttggcacacgtaattgccaggcacgctgggtactctgttgtagagatgaacgcctccgatgaccggagccccgaggtttttcgcacccgcatcgaagcggcaactcagatggagtccgtgctgggagccggcgggaaaccaaactgcctggtcatagatgagatcgacggcgctcctgtggctgctattaatgtgcttttgagcattctcaatcgcaagggcccacaggaggtaggcccacagggccctgccgtaccttccggcggtgggaggagaaggagagccgagggcggcctgctgatgaggccaatcatttgtatctgcaacgaccagttcgctcccagcctgaggcagcttaagcaacaggctttcctcctacatttccccccaactttgccaagccgcttggtgcagcggctccaggaaggtatgcgggcagacccaggagttcttgcagccctctgtgaaaagaccgacaatgacattcgcgcttgcattaacaccttgcagtttttatattctagaggccagcgggaattatctgtgcgcgatgtccaggcaaccagagtgggcctcaaggaccagaggcgagggctgttttccgtgtggcaggaggtgttccagctgcctcgagcccagagaagtagtcagcatgtaagcgtgttgacctgccacggtactccgggagacgctggccttgtggtgctccaggacatgggcgacgcagggctggggctatgggacgtccttctgctagcctggacaagacgggggacattccccggccgcttctatcgcgtgttgcacgccgccgcgtccgcgggcgagcacgagaaagtggtgcagggcttgttcgacaactttctgaggttgcggctcagagattctagtttgggagctgtgtgcgtggcactagactggctagcgttcgacgacttgttggccggtgccgcacatcactctcaaagcttccagctcctccgctatccccccttcctccccgtggcatttcatgtgctcttcgcctccagccacacgcccaggattaccttcccttcttcacagcaggaggcccagaatagaatgtcccagatgcgcaatctaatccagacactggtgtccggtatcgctccagctaccaggagccgggccaccccccaggctctcctgctggatgccttgtgcctgctgctcgacattctggccccaaaactccgccccgtcagtacccagctctatagcacccgcgagaagcagcaactggcctccctggtcggaactatgttggcttatagcctgacttatcgccaggagcgcacccccgatggccaatatatttaccgacttgaaccaaatgtggaggagctctgtcggtttcccgagcttcccgcccgaaaacctctgacttaccagactaaacagcttattgctagggagatcgaggtcgagaagatgaggcgcgccgaggcctcagccagggttgaaaattcacctcaggtagatgggtctcctccagggctcgaggggctccttggtggcatcggcgagaaaggcgttcatcgaccagcccctcggaaccatgagcagaggctggaacacatcatgcgcagagcagctcgggaggagcagcctgagaaggatttcttcggacgggtggttgttaggtccaccgcagtcccgtccgccggagacacagctcctgaacaggatagtgtcgagagaagaatgggcaccgccgtcggccggtccgaagtgtggttccggttcaatgagggagtctccaatgctgtgcgtcgttcactgtatatcagagacctgttatag

SEQ ID NO: 184035 - DNA, 3012 bp, synthetic construct
  misc_feature 1..3012: note = Description of Artificial Sequence: Synthetic coding sequence
  source 1..3012: mol_type = other DNA
atggaggactacgagcaggagctgtgcggcgtggaggacgacttccataatcaattcgctgccgaattagaggtgttagcagagttggaaggtgccagtacaccttccccatccggcgttccgctctttacagcagggcgacccccccggacctttgaggaggccctggcgagaggggatgcagcatcctcgcccgcgccagccgcctctgttggaagcagccagggaggtgcacggaagcgtcaggtcgacgcggacctgcagcccgccggatccctcccccacggaagactggcggccttgccgcagggattgcggtctggcagagaggccgaggaagcctcgggctccctgcacgtatccccccccgcccctcgcattaaaagaccacggctgcaggtcgtcaagcggctgaattttcggtccgaagaaatggaagagccacctccgcctgattccagccctacagatattactcctcccccctcccccgaggatctggcagaactctggggccacggagttagcgaggctgcagccgacgttggtcttacccgcgccagccccgccgctcgcaaccctgtcctcaggaggcctccaatcttggaagattatgtccacgtgacctcaaccgagggggtccgagcctacctcgtgctgagagcggacccgatggccccgggtgtccagggttcacttctgcacgtgccatggagaggaggcggacaactcgacctcctcggcgtctctctggcatccctgaaaaaacaggtggatggagagcggcgggagaggttactgcaggaagcccagaaactgtcagacacgctgcacagcctacggagtggagaagaggaggctgctcagcctctgggcgctcccgaggaggaaccgaccgatggtcaggatgcttcttcccactgcctgtgggtagacgagttcgctcctagacactacactgagctgctttcagacgattttaccaaccgttgtctgctgaagtggctgaaattatgggatcttgttgtcttcgggcacgaaaggccttcccggaaaccgagaccatccgttgagcctgcgcgggtgagcaaggaggccacagcccctgggaagtggaagtctcatgagcaggttctggaggaaatgctagaggcaggtctcgatccttcccagcgaccgaagcagaaagtggcgctcctgtgcgggcctcccgggttaggcaagactaccctggctcacgttattgcacgtcatgctggatactctgtggtggagatgaatgccagcgatgatcggtccccggaggtgttccggactcgcatcgaagccgcgacgcagatggaaagtgtgctgggagctgggggcaagcccaactgtctggtgatcgatgagatcgatggagcgccagtcgccgccatcaatgtactgctctccatacttaaccgaaaaggcccccaggaagtggggcctcagggtcctgccgttccctccggtggtggccggaggagacgcgcagaggggggactacttatgaggccaattatatgcatctgtaacgaccaattcgcaccgtccctcaggcagttgaagcaacaggccttcttgttacactttccacccactctaccatctagactggtccagcggctgcaagaagtctcacttagacagggcatgcgggcagatcccggcgtgctcgccgctctgtgtgagaagactgacaatgatatccgtgcatgcatcaacacactgcagtttctgtactccaggggccagcgcgaactatctgtacgagacgtgcaggctactcgcgtcggccttaaggaccagcgccggggtctcttttccgtgtggcaggaagtattccaacttccaagagctcagagaaggcgggtgggccaagaccccgcgttaccagccgacacacttctgcttggggatggagatgcgggctcattaaccagtgcttcacagcgcttttaccgtgtcctgcatgccgccgccagcgccggcgagcacgagaaggtggtccaagggttgtttgacaattttctgcgtttgcgcctgcgagacagctccctgggcgctgtgtgcgtggctctagactggctggcgttcgatgaccttctcgctggggcagcgcaccactcgcagagtttccagctattgcgttatcccccttttctgcctgtggcctttcatgtgctctttgcaagctcccacaccccgaggataacctttccaagctcgcagcaggaggcacaaaacagaatgagccagatgcgaaacctgattcagacacttgtctcaggtattgcgcctgccaccagaagtagagctaccccacaagccctgctcctggacgccctgtgcctcctcttggacattctggcacctaaattgagacccgtgtccacccaactatattctactcgtgagaagcagcagttggcctcgctggtaggcaccatgctggcctattccctcacatacagacaagagcgaacccccgacgggcagtacatttacaggctggaacccaacgtggaggagctgtgcagatttccagaactcccagccaggaaacctctgacctaccaaacgaaacagctgattgccagagagattgaggtggagaagatgaggcgcgctgaggctagtgctagggtcgagaactctccacaggtggacggctcccctcctggcctggagggactgcttggagggattggagagaaaggcgtgcataggcccgctcctaggaatcacgaacagcgcctggagcatattatgcggcgtgccgcaagagaagaacagccagagaaagacttcttcggcagagtcgtcgtgcggagcacagccgtcccatccgcaggtgacacagccccagagcaggatagcgtggaaaggcgcatgggtacagctgtgggccgctctgaagtgtggttccgtttcaacgagggcgtctcaaacgcagtgaggcgttctttgtatattcgggatctgctgtag

SEQ ID NO: 184036 - DNA, 1575 bp, synthetic construct
  misc_feature 1..1575: note = Description of Artificial Sequence: Synthetic coding sequence
  source 1..1575: mol_type = other DNA
atgaaggagccccggatcttcccccgggagcggcccaccccctggactcgcgctccactcccaccccgcggtcggcttgacggatctctgggcccacagggcggcccagtgctgaatacgggtcatcctctcggggtgaatagtgaccccttcttgatggccgctggaagcctgggggggaatctgaccccgttcccaagaaatccaagcccttttcctgcctcttccgggtcactcgcctcaaatcccgccccattcccagctggagcccgggacccctccatggcgtcgttcccacgcgggatgaatccaaccggtaccggggccgttagctttccccgtcctggcggtctgctgggacccgggcccggccccggaccgaccctgaatccccgcaccggggctctccctggccctgggcccttgagcaacccccggcttggcggactgcccggaccggggccaatgagcaatcccagagccggcggcctattgggagccgggcctgatccacgcggagggggaccaatgggcccgggatctggccctaatctgagagcaggggtgctgctgacaagcgggaatggccctcctaatcctcgcccagttggtcttggtcccggtcccaatcccaatttacggagtggctttcttggcacgaatccagctccgcgctctggcgttttcccaggcccaggcctgggcccaaacccgagaccctcagggttggggcccgggccaaacctcgacgcgcgagcgggaggcctcctcgggacagggagtggactaaacctgaggatggccggaccccagggcctcgacttggccccgatccttcgggccgcggggttgctaggcgctaactctgcctctttcagccaggcatccggaaacatggggacatcgccttccagtatggccagagtgcctggcccgatgggcccaaactctggccccagctcacgtgggattggcttacctggaccaaatcccagtcctatgtcccgtgccccaggccctatcggccctaacagcgctcatttttcacggccagttggcccgatgggcgtcaatgctaaccccttcccccgaggggccgggagctcggctttctctcaatcgtccggcaccctggcaagtaaccccgctacctttcagcggtcagccggcctgcagggatccaaccccacaattttcccgagagccagcggcccgctcggccctaacccagccaattttccccgggccacgggactccagggcccctccccaacgacatttcccagatcaacaggaccactcggacctggccaggtcactttcccccggccagccgctggacacctgggtccatcccctgcaggcccagttggaatcaaccccgctccctttactcgccccaccggcacccttggcctgaaccctgcctcctttcccaggatgaacgggccagctggaaagtcttttgtgccattcccccgggtgggcagtctgccaggcaccaatcccgccgcttttccccgcccgggcggaccaatggccgccatgtacccaaacggcatgctaccgccatag

SEQ ID NO: 184037 - DNA, 366 bp, synthetic construct
  misc_feature 1..366: note = Description of Artificial Sequence: Synthetic coding sequence
  source 1..366: mol_type = other DNA
atggtgcagatcgtgatcagcagcgcccgggccggcggcctggccgagtgggttttgatggaactgcagggcgaaatcgaggctcgctactctacgggactggccgggaaccttcttggggatctgcattacaccactgaagggattccagtgctgattgtgggacaccacattctgtacggtaaaatcatccacttagagaagccctttgctgtgttagtgaagcataccccaggagaccaggattgtgacgaattggggagagagacaggaactcgataccttgtcaccgcactgatcaaagataaaattctctttaagaccagaccgaagccaatcatcacctcagtgccgaaaaaagtgtag

SEQ ID NO: 184038 - DNA, 366 bp, synthetic construct
  misc_feature 1..366: note = Description of Artificial Sequence: Synthetic coding sequence
  source 1..366: mol_type = other DNA
atggtgcagatcgtgatcagcagcgcccgggccggcggcctggccgagtgggttctgatggagcttcaaggcgagattgaggcacgatacagtaccggcttggccggtaacctgctgggagaccttcactataccacagaaggtattccagtgctcatagtcggacaccatattctgtatggtaagataattcatctcgagaagccctttgctgtcctcgtcaagcacacaccaggggatcaggactgtgacgagctgggtcgggagaccggtacgaggtatctagtgacagctctaatcaaagataaaattttgtttaaaacaaggccaaagcccatcatcacgtcagtgccaaagaaagtctag

SEQ ID NO: 184039 - DNA, 1776 bp, synthetic construct
  misc_feature 1..1776: note = Description of Artificial Sequence: Synthetic coding sequence
  source 1..1776: mol_type = other DNA
atgaagtacatcctggtgaccggcggcgtgatcagcggcatcggcaagggaatcatcgcaagtagtgttggcacaattctgaagtcctgcgggctgcacgtgacaagtattaaaattgacccttatataaatattgatgccggaactttttcgccctacgagcatggcgaggtgttcgtgctggacgacggcggggaggtggacctggatttgggcaactatgagcgcttcctggatattcggctcaccaaggacaataatctcaccacaggaaagatctatcagtatgtgatcaataaagaaagaaagggagactatctaggaaagacagtacaggtggtgccacacattaccgacgcaatccaggagtgggtgatgcgtcaggccctcatccctgtggatgaagatggactagaaccacaagtgtgcgtaatagaactaggcgggaccgtgggcgatattgagtcaatgccatttattgaggcgtttcgccagttccagttcaaggtgaagcgggagaatttttgtaacatccacgtgtcgctggttccccagccgtccagcaccggagaacagaaaaccaaacctacgcagaattcagtaagggagcttcgaggcttaggcctgagcccggatttagtggtgtgcagatgttcaaaccccttggatacttccgtgaaggaaaagatttcaatgttctgtcacgtggagcccgaacaggtcatctgcgtccacgatgtgagcagcatctatcgcgttcctttgctgctggaggaacaaggcgttgttgactattttctccgtcggttggacctgccaatcgagcggcagcctagaaaaatgcttatgaaatggaaagaaatggccgaccgctatgatcgtctgttggagacctgctctatagccctcgtcggaaaatacactaaattttctgacagttacgccagcgtgatcaaagcgctcgagcatagcgccctagccatcaatcacaaactggagatcaaatacatcgattccgccgatctcgagccgattacctcccaggaagagcctgtccgctatcacgaagcatggcagaagttgtgtagcgctcatggggtgctggtgccaggcggcttcggcgtcagagggacggaaggcaaaatccaggctatcgcctgggcgagaaaccagaaaaagccgttcctgggcgtgtgcctcggaatgcagctggccgtggtagagttttctcggaatgtgctagggtggcaggatgcgaactccaccgaatttgaccctactacctctcaccccgttgtcgtcgacatgcccgagcataatccgggacagatggggggcaccatgagacttgggaaaagacgaaccctgttccagaccaaaaacagcgtcatgaggaagctgtatggagacgctgattacctggaagagcgacacagacaccgattcgaagtcaacccagtgtggaaaaaatgcttagaggagcaaggactcaaattcgttggccaggacgtggaaggagagcggatggaaatagttgaactggaggatcatccattcttcgtgggggtccagtaccaccctgaatttctctcaagaccaataaagccttcacccccgtacttcggcctactgttagctagtgtggggcgtctgagccattatctccagaaggggtgccgcctatcaccaagggatacctactctgatagatcgggtagcagttccccagacagcgaaatcaccgagctgaagttcccatctatcaaccatgactag

SEQ ID NO: 184040 - DNA, 1776 bp, synthetic construct
  misc_feature 1..1776: note = Description of Artificial Sequence: Synthetic coding sequence
  source 1..1776: mol_type = other DNA
atgaagtacatcctggtgaccggcggcgtgatcagcggcatcggcaagggtattatcgcttcttctgtggggaccatcctcaaaagttgtgggttgcacgtgactagcatcaagatcgacccttatataaatatagatgctggaacattctcaccgtacgagcacggggaagtgttcgtgcttgatgacgggggagaagtggacctagacctaggcaattatgagcgcttcctggacattcgcctgacaaaagataacaacctgacaaccgggaagatatatcagtacgttattaataaagaacgaaagggcgattacctcggcaaaaccgtccaggtggttccgcacatcaccgacgcaatacaggaatgggtcatgcggcaggctttaatccccgttgatgaggatggcctcgagccacaggtgtgcgtgatcgagctgggcggaaccgtcggggatattgaatccatgccattcatagaggccttccggcaattccagttcaaggttaagcgagaaaacttttgtaacatccatgtgtcactcgtcccacaaccatccagcaccggggagcaaaaaactaaacctacccaaaacagcgtacgcgaacttcggggccttggactcagccccgacctcgttgtttgccggtgcagcaacccgctggacaccagtgtgaaggagaagatttccatgttttgccatgtcgaaccagagcaagtcatatgcgttcacgatgtgagtagcatctaccgcgtacccctgctgctcgaggagcagggagttgtcgattatttcctgaggcggttggacctgcccatcgaaagacagccaaggaagatgcttatgaagtggaaggaaatggcagaccgctatgataggctgctggaaacgtgctccattgcgctggtgggaaaatataccaagttttcagacagctatgcgagcgtaataaaggctctcgaacacagcgctttagctattaatcacaagctcgagataaaatacattgattctgcggatctggagcccattaccagccaagaagagcctgttcggtaccatgaggcttggcaaaagctgtgcagcgcccatggtgttctggtgcctggtggattcggggtgcgcggcacagaaggcaagatccaagcaatcgcgtgggctcggaaccagaagaagcccttcctgggggtgtgcctggggatgcaactcgccgtggttgaattctcccgcaacgtgttggggtggcaggacgctaattctactgagttcgatcccaccacaagtcacccagttgtcgtcgacatgcctgagcacaacccaggacagatgggcgggacaatgcgcctaggtaagagaaggactttgttccagactaaaaacagcgtcatgcggaaactgtatggggacgcagattacctggaagagagacaccggcacagatttgaggttaaccccgtctggaaaaaatgtctagaagaacagggactgaaatttgtaggccaagacgtggagggagagcggatggagatcgtagagttagaggatcacccatttttcgtgggggttcagtatcaccctgagttcttatcgagacctatcaagccttctccgccatactttggcctgctactggcgtctgtgggccgactctcacattacctgcagaaaggatgtcggctttcgccgcgggatacttatagcgaccgcagtggttcctccagccccgattctgagattacagaattgaagttcccctccatcaatcatgattag

SEQ ID NO: 184041 - DNA, 1083 bp, synthetic construct
  misc_feature 1..1083: note = Description of Artificial Sequence: Synthetic coding sequence
  source 1..1083: mol_type = other DNA
atgttctgccacgtggagcccgagcaggtgatctgcgtgcacgacgtgtcaagcatttaccgcgtgcctctcttgctggaggagcagggtgtagttgactatttccttaggagattggacctccctattgaacgccaaccaagaaaaatgcttatgaagtggaaagagatggcagacagatacgatagactcctggagacctgctccattgcactagtcggcaagtacacaaaattcagcgactcttacgcctccgtaattaaagctctagaacactcggcgttagccatcaaccacaagctggagatcaagtacattgacagcgccgaccttgagccaattacaagccaggaagagccagttaggtaccacgaagcatggcaaaagctctgttctgcgcacggggtgctcgtacccggcggcttcggcgtgcgaggcaccgaaggaaaaattcaggcgatcgcctgggcacggaatcaaaaaaagccgttcctgggggtttgtctcggcatgcagctcgcggtcgtggagttctctcgcaatgtcctggggtggcaggacgctaatagcactgaatttgaccctactacatcacatcccgtggtggttgatatgcccgaacacaatcctgggcagatgggcggaacaatgcggctagggaagcggagaactttgtttcagaccaaaaattccgtcatgcgtaagctgtatggggacgccgattatttggaagagcgccataggcacaggttcgaggtgaaccccgtctggaaaaagtgcttagaagagcagggcttaaaattcgtaggtcaggacgttgaaggggaacgcatggagatcgtggaattagaggaccaccccttcttcgttggtgtgcagtatcatccagagttcctgtcacggcccatcaagccctcaccaccttatttcggactgctgttggccagtgtaggacggctctcccactacctgcagaagggctgccgactatctcctcgagacacatattcagaccggtccggcagctcttcacccgattccgagatcactgaattaaagtttccatcgataaaccatgactag

SEQ ID NO: 184042 - DNA, 945 bp, synthetic construct
  misc_feature 1..945: note = Description of Artificial Sequence: Synthetic coding sequence
  source 1..945: mol_type = other DNA
atgcccaagagcaagagcaagatgaagtacatcctggtgaccggcggcgtaattagcggcattggcaaaggtatcatcgcaagtagtgtgggcaccatattaaaatcttgcgggttacatgtgacctcaattaagatagatccatatattaacatcgacgctggcacgtttagcccctacgaacacggtgaggtgttcgttctggatgatggaggcgaagtcgacctggacttaggcaattacgagaggtttctcgacattcgactgacaaaagacaataacctgactactgggaaaatctaccaatacgtcatcaacaaggagcgtaaaggggactatttgggcaagaccgtacaggtagtgccgcacatcactgatgcgatccaggagtgggtcatgagacaggcgttgatacctgtggatgaagacggacttgaaccccaggtgtgcgtgatcgagctgggcggcactgtgggagacatcgaatccatgccatttattgaggcattcagacagttccagtttaaggtgaagagggagaatttctgcaatatccacgtcagccttgttccgcagccttcaagtacaggagaacaaaaaacgaagccaactcagaactctgtgcgcgagctcagaggtctcggcctgtctcctgatttagtggtatgtaggtgttccaatccactcgacacttccgtcaaggagaagatatccatgttttgccacgtcgaacccgaacaggtcatctgcgtgcatgacgtgtcttcaatctatagagtaccactgctcctggaagaacagggggttgtggactacttcctgcgaaggttggacctgcccatcgagcgacagcctagaaagatgctgatgaaatggaaagagatggccgacagattcgcttgcaacgaggagttgggagtgttggcgagctttacactgctgtag

SEQ ID NO: 184043 - DNA, 1761 bp, synthetic construct
  misc_feature 1..1761: note = Description of Artificial Sequence: Synthetic coding sequence
  source 1..1761: mol_type = other DNA
atgaagtacatcctggtgaccggcggcgtgatcagcggcatcggcaagggcatcattgctagcagtattggtaccattctaaagagctgcggactccgggtgaccgcaatcaaaattgatccttacatcaacattgatgctggaacgttcagcccttacgaacacggtgaggttttcgtactaaatgacgggggggaagtagatttagacctgggaaactacgaacggtttctcgacattaatctgtacaaagacaacaacatcacaacaggcaagatataccagcacgtcatcaacaaggaacggagaggggattacctcggtaagacagtgcaggtggtaccccacatcaccgatgccgtgcaagaatgggtaatgaaccaggcaaaggtgccagttgacggaaacaaggaagagccccagatctgtgtgattgagttaggaggtaccattggggacattgaaggaatgcctttcgtggaagcgtttaggcagttccagttcaaagcaaagagggagaacttttgcaacatccatgtgtctctggtgccccagctgagtgccactggcgagcaaaagacaaagcctactcagaactcagtgcgagccctgcgcggactcggcctgtcccctgatctgatagtctgccgaagttccacccctattgagatggctgtgaaggagaaaatcagtatgttttgccatgttaatcctgagcaggtcatttgtatccatgacgtctcctccacatatagagtgcctgtgctcctggaagaacagagcatagtaaagtacttcaaagagagactgcatctgcccatcggcgattccgcctcgaatctgttatttaagtggagaaatatggccgaccgatacgagagacttcagaaaatctgtagtatcgcgttggtcgggaagtacacaaaattacgtgattgctacgcatccgtgttcaaggcactggagcacagcgcactcgccattaaccacaagctgaacctgatgtatattgatagtatcgatctggaaaagataactgaaacagaggacccagttaagttccatgaagcctggcagaaactctgtaaggctgacggcatactggtgccaggcggtttcgggattcgcggcacattaggtaaactgcaggccatttcgtgggctcggacaaagaaaatcccttttcttggcgtgtgccttggaatgcagcttgctgtgatagagttcgcacggaattgcttgaatctcaaagacgctgacagcactgaattcaggccaaatgcccccgtgcctctggtgatcgacatgcccgaacataatccagggaatctaggaggcacaatgaggctcggtatacgccgaaccgttttcaagactgagaattccatactgaggaagctctacggagacgtgccctttatagaagaacgccatcgccataggttcgaggtcaatcctaaccttattaagcaatttgagcagaatgatctcagctttgttggacaggacgtggatggagatagaatggaaatcatcgaactggcaaaccacccttactttgtaggcgttcaattccaccctgaatttagttctaggcccatgaagcccagccctccctacctggggctgttgcttgccgcaacagggaacctgaacgcctaccttcaacaggggtgcaagcttagctcctccgatcgatattcagatgcctctgatgattccttttcggaaccaagaatcgctgagctcgagatctcttag

SEQ ID NO: 184044 - DNA, 531 bp, synthetic construct
  misc_feature 1..531: note = Description of Artificial Sequence: Synthetic coding sequence
  source 1..531: mol_type = other DNA
atgtacatcgacagcatcgacctggagaagatcaccgagaccgaggatccagtaaagttccatgaggcttggcagaagctttgcaaggcagatggcattcttgtgccggggggcttcggcatcaggggcacgctgggtaaattacaggccatctcatgggcaagaaccaaaaaaattccttttctaggcgtgtgcctgggcatgcaactggctgttatcgaattcgcccggaactgtctgaatttgaaggatgcagactcaacggagttcaggccgaatgccccagtgcccctcgtcattgatatgccggagcacaaccctggcaacctcggcggcacgatgcgactgggaatacggagaaccgtgtttaagaccgagaatagcattctcattagcttgtctttggggcttgcgtcagttgagcacaccgagtgccccagcgccttcgacttacgggattcactgtttatcggattgttttgtgaactcccaatgctattagagatgaacctggattgggacctggactag

SEQ ID NO: 184045 - DNA, 1761 bp, synthetic construct
  misc_feature 1..1761: note = Description of Artificial Sequence: Synthetic coding sequence
  source 1..1761: mol_type = other DNA
atgaagtacatcctggtgaccggcggcgtgatcagcggcatcggcaagggtattatagcgtcatcgattggaactatactgaagagctgcggcctccgcgtcaccgcaatcaaaatcgacccatacattaatattgatgcagggacattctctccctacgagcatggcgaagtgttcgttttaaatgatggcggagaggtcgacctggatttagggaattatgaacgattcctcgatataaacctctacaaggataacaacataaccacggggaagatataccaacacgtgattaacaaggagaggagaggggattacttaggtaaaactgtccaggtcgtgccacatattacagacgcagttcaggaatgggtgatgaatcaggctaaagtcccagtggatggcaataaagaagagcctcaaatttgtgtaatcgaactcgggggaactatcggggatatagagggaatgccattcgtcgaagcatttagacagtttcaattcaaggctaagcgggagaacttttgtaatatccacgtctccctggtccctcagctcagcgcgaccggggaacagaaaaccaagccaactcagaacagtgttagggccttgcggggactcggcttgtctcccgatctcatcgtctgccgtagcagcaccccgattgagatggccgtcaaggagaaaatttctatgttctgtcacgtcaatccggagcaagttatctgcattcatgacgtctcatcaacgtatcgggttcccgtccttttagaggaacaaagtatcgttaaatactttaaagagaggttacatttgcccatcggcgactccgctagcaacctattgttcaaatggaggaatatggccgacaggtatgaaagactgcaaaaaatttgctccattgccctggtgggcaagtacacgaaactccgcgactgttatgcgtccgtcttcaaagctttagagcattctgctctggcgatcaaccataagctcaatctgatgtacattgatagcatcgatctggagaagattaccgagactgaagatcccgttaagttccacgaagcctggcaaaagctttgcaaagcggatggtatactcgtgcctggcggattcggcattaggggtacactcggcaaactccaggccatcagttgggccaggaccaaaaaaatccccttcctcggtgtttgcctcgggatgcaactcgcagtgatcgagtttgctcggaattgccttaacctcaaagatgccgattctacagaatttcgaccaaatgctccggtgcctttggtgatagacatgcctgagcacaatccaggaaatcttgggggtaccatgcggctcgggatccgcagaacagtatttaagaccgagaatagcatcttacgaaaactgtacggggatgtgccgttcattgaagagaggcacaggcatagattcgaggtaaaccccaacctgattaaacagtttgaacaaaatgatcttagcttcgtcgggcaggatgttgacggcgacagaatggagataatcgaattagccaatcacccatactttgtcggcgtgcagttccatcccgaattcagctcccggcccatgaaaccgtcccctccgtatctaggcctgctcctcgcagcgactggtaacctaaatgcttacctccagcagggatgcaagttatcttccagcgaccgatattcggatgcgagcgatgacagtttctctgaaccacgtatcgctgagctggaaatatcttag

SEQ ID NO: 184046 - DNA, 1761 bp, synthetic construct
  misc_feature 1..1761: note = Description of Artificial Sequence: Synthetic coding sequence
  source 1..1761: mol_type = other DNA
atgaagtacatcctggtgaccggcggcgtgatcagcggcatcggcaaggggatcattgccagctctattggtactatccttaaatcctgcggattacgcgttacagcgattaaaatcgacccctatattaacattgacgccggtaccttcagcccatacgaacatggggaagtcttcgtgctcaatgacgggggcgaggttgatttggaccttggcaactacgagcggtttctggacataaacctgtacaaggataacaacatcactactgggaaaatctaccagcacgtgattaacaaagaacgaaggggagactacctgggtaaaactgtgcaggtggtgccacacatcactgatgctgtgcaggagtgggtgatgaaccaggccaaggtgcccgtcgatggaaacaaagaagagccgcaaatctgcgtgatcgaactcggcgggacgatcggggatatcgaaggcatgccctttgtggaagccttcagacagttccaattcaaggctaaacgcgaaaacttctgtaatatccacgtcagtctggtgcctcagctctccgccacgggcgaacagaaaacaaaacccacgcagaatagcgttcgcgctctgcggggactgggtctgtcccctgacctgatcgtgtgccgctcaagcacacctatcgaaatggccgtcaaagagaaaatcagcatgttttgtcacgtgaaccccgaacaagttatatgtattcatgatgtgagctccacctatagagttcccgtgctcttggaagaacagtccattgttaagtacttcaaggagcgcctgcaccttcccatcggagactccgcttccaatctcctgtttaaatggcgcaatatggccgatcggtacgagaggctgcagaaaatttgctccatcgccctggtaggaaaatacacaaagctgcgggactgctacgccagcgtgtttaaagcgctggagcattcagccctggcaatcaatcacaagttaaacctgatgtatattgacagcattgacctggagaagattacagagaccgaagaccccgtaaagttccatgaagcttggcagaagttgtgtaaggcggatggcatcctggtgcccggagggtttggcatcaggggcacactgggaaagttgcaagccatatcttgggcacggactaaaaagattccctttctcggggtttgcctaggaatgcaactagctgtcatagagtttgccagaaactgtctcaacttgaaagatgctgactcaaccgagtttaggcccaatgcgcctgtcccgctggtcatagatatgcccgagcacaatcccggtaatttggggggcacaatgagactggggatccgcagaaccgtgttcaagacggagaactccatcctccgtaaactctatggggatgtcccctttatagaggaacggcacagacatcgattcgaagtgaacccgaatctcataaagcaatttgagcagaacgatctcagtttcgttggccaggacgtagacggtgaccgaatggagattattgagctggcaaaccacccgtactttgtaggggtgcagttccacccggagttcagctctagacccatgaagcctagcccaccttacctcgggttactgctggccgccacaggcaacttgaatgcatacctgcagcaggggtgcaagttatcctcctcagaccgctactctgacgcttcagatgatagttttagcgagcctcgcattgccgagcttgaaatctcttag

SEQ ID NO: 184047 - DNA, 399 bp, synthetic construct
  misc_feature 1..399: note = Description of Artificial Sequence: Synthetic coding sequence
  source 1..399: mol_type = other DNA
tgaggcaagctgcaggccatcagctgggcccggaccaagaagatccccttcctgggggtctgtctcggtatgcagctcgctgtgattgagtttgcacgcaactgcttgaatctgaaggacgctgatagtactgagttcaggcctaatgcccctgtcccccttgttatcgatatgcccgaacacaaccccgggaacctcgggggcacgatgcggctgggcatcaggagaacggtgttcaaaacagaaaacagcatccttatctccctgagtctcggcctggccagcgtggagcatactgagtgtccttctgcctttgacctgcgagacagcctgttcatcgggctgttctgtgaactgccaatgctcctggagatgaatctcgactgggatctcgattag

SEQ ID NO: 184048 - DNA, 3654 bp, synthetic construct
  misc_feature 1..3654: note = Description of Artificial Sequence: Synthetic coding sequence
  source 1..3654: mol_type = other DNA
atggccgccggccgggcccaggtgcccagcagcgagcaggcctggctcgaagatgcacaggtgtttatccagaagacattatgccctgccgtgaaagagcccaacgttcagctgacccctctggttatagattgtgtgaagactgtgtggctttcccagggtcgaaatcagggatctaccctacccctgagctatagcttcgtgagtgtgcaggatctcaaaacccaccagaggttgccctgctgcagccacctcagttggtcttcctctgcctaccaggcttgggcccaagaagctggcccaaatggcaatccgctgccccgggagcaactgttactcttgggcaccctgactgacctctcagccgatcttgaacaagagtgccgaaatggttctttatacgtccgtgacaataccggggtgttgagttgcgaactgatagatctggacctgagttggcttgggcatctgtttctctttccgcgctggagctacttgccgcctgcccggtggaactcctccggagaagggcacctggagttatgggatgccccggtgccagtgtttcccctcaccatctccccaggtcccgtgacccctataccagtgctgtaccctgaatctgcgagttgcttgcttagactgaggaataaattaaggggagtccagcgcaatctcgcggggtcactcgtaagactgagtgcccttgtcaagagtaagcagaaggcatactttatactcagtctcggccggagtcatccggcagtgacccatgtgagcataattgtgcaggtccctgctcagttagtgtggcacagagcccttagaccaggaaccgcttatgtgcttaccgagctaagagtgtcaaaaattcggggtcagagacaacacgtgtggatgacttcccagtctagcaggctgttgctgttaaagcccgaatgtgtgcaggaattagagctggagctggaggggcctctcttagaagccgatcctaaacctctcccgatgccttctaatagcgaggacaaaaaggaccctgagtccctggtgagatactcaagacttctctcctactctggtgccgtgacaggagtcctgaacgagccagccgggttgtacgaactcgacgggcagctaggattatgtctagcctaccaacagtttaggggcttgcgtcgggtgatgagaccaggggtttgcctgcagctgcaagacgtccatcttctccaatctgtgggcggggggacccgccgtccggtcctggctccgtgtctgagaggagccgttctcttacaatccttctcccggcagaagcccggtgctcattcatccaggcaggcctatggtgcatccctgtacgaacagctggtctgggagaggcagttaggcctgcctctttacctgtgggctactaaggccctagaggaactggcctgcaaactttgcccgcacgtccttagacaccatcagtttctacagcattccagcccgggatctccatccttaggcctacagctcctggcccccacattagatctgttagccccccctggttcgcctgtacggaatgcgcacaacgaaatcctcgaagagccgcaccactgcccccttcagaaatataccaggctgcagacaccttccagtttccctacactggcaactctcaaagaagagggtcagcgcaaggcttgggccagcttcgatcccaaggctctccttcctctgcccgaagctagctatctgccaagctgccagctcaataggagacttgcatggagttggttgtgtctgctcccctcagccttctgccctgctcaggttctgctgggagtgctggttgctagttctcacaagggctgtctgcagctcagagatcagagcgggagtctcccctgtctgctgctggccaaacactcccaacccttgagtgatcctaggctgatcggctgcttggtgagagcagaaaggtttcagcttatcgtggagcgtgacgtgaggagctccttccctagttggaaagagttatccatgcccggattcatccaaaagcagcaagcccgggtttacgtacagttcttccttgcggatgcgttgattttgcccgtccctagaccatgtctgcatagcgccaccccgtcaacaccccagactgacccgacaggccccgaaggcccccatctgggccagtctcgcctgttcttgctctgtcataaagaagcgctgatgaaacgcaatttctgtgttccaccgggagcatcacccgaagtgcctaaacccgctctgagtttttatgtgcttggcagctggttaggagggacccagcgcaaggagggcaccggttggggcttaccagagccccagggtaatgatgacaatgaccagaaagtgcaccttattttcttcggaagttccgtgcgctggtttgagttcctgcacccaggccaggtgtatcggctgatcgcgcccggccctgccacccctatgttgttcgaaaaggacggaagcagctgcatttcccggcgcccccttgaactggctgggtgtgccagttgtttgacagttcaggataactggaccttggagctggagagcagtcaggatatacaggatgtgctggatgcaaataagtcccttcctgaaagttctctgacagatcttttgtctgacaatttcacagatagtctagtgagcttttccgcagagattttgagccgcaccctttgtgagcctctcgtagctagtctgtggatgaaactggggaataccggagcaatgagacgctgcgtgaaacttaccgtagccctggagacagcagagtgcgagtttcctcctcatttggatgtttatatagaagatccccacctgccgccctctttggggctgctgcctggcgctcgggtacatttcagccagctggaaaaacgggtgtctcgttctcataacgtttactgttgttttcggagtagtacatacgtgcaagtgctctcctttccccccgagacaaccatctcaatccccttgccccatatttatctggccgagctgctacagggggggcagtcaccatttcaggctaccgcatcgtgccatatcgtttcagtgttcagcttgcagctcttttgggtgtgcgcttactgtacctccatctgtcggcagggcaaatgcactcgacttggttctacatgccctactcagacagccatatctcaggccataatcaggctcttagtggaggacggaaccgccgaagctgttgtcacctgtagaaaccatcacgtggcggccgcgttgggactctgtccaagggaatgggcttctctcctggattttgtgcaggtcccgggccgggtggtgctgcaattcgccggtccaggcgcccagcttgaatcgagtgctagagtggacgaacccatgaccatgtttctgtggaccttgtgtactagtcctagcgtgctgcgcccgatcgtcctcagcttcgagctggaacgcaagcccagtaagattgtgcccctggagcccccacgactgcaaaggttccagtgcggagagctcccttttcttactcacgtgaatcctcggctacgactgtcctgcctcagcatcagggagtccgagtacagctcaagcctaggtatccttgcctcaagctgctag

SEQ ID NO: 184049 - DNA, 3096 bp, synthetic construct
  misc_feature 1..3096: note = Description of Artificial Sequence: Synthetic coding sequence
  source 1..3096: mol_type = other DNA
atggccgccggccgggcccaggtgcccagcagcgagcaggcctggttggaggacgcccaggttttcattcagaagaccctgtgcccagcagtcaaagaacctaacgtgcagctgacaccccttgttatcgactgtgttaagacggtgtggctgtctcagggtcgcaatcagggctccacactcccattgtcatatagtttcgtttctgtgcaggatctgaagacacaccagcgcctaccttgttgttcgcacctaagttggagtagcagcgcttaccaggcatgggctcaggaagccggacccaacgggaacccactgcctcgtgagcagctgctgttgctgggcactctgacagatctgagtgcagacttagagcaggaatgtcgtaacggctcactgtacgtacgtgataacacaggcgtgctcagctgcgagctgatcgatttagacctttcttggcttggccaccttttcttgtttcccaggtggtcctacctaccacctgccaggtggaacagttcaggggaagggcatttggagctctgggacgctcctgttccagtgttccctctgacgatctctccgggcccagttacacccatccccgttctctaccccgaatctgcgagctgcctgttgcgccttaggtctcatccagccgtgacccatgtgtccatcatcgtgcaagtcccagcccagctggtttggcatcgcgccctgagacctggcacggcttacgtgttaactgagcttcgtgtttctaaaatccgcggccagcgacagcacgtgtggatgacatcccaaagctccaggcttttgctgctgaaaccagagtgtgtacaagaactcgagttagaactcgaggggcctctgttggaggcagatcctaaaccgcttccaatgcctagcaacagcgaggataagaaggatccagagagtttggttaggtacagcaggctgctttcatactccggggcggtcactggcgtgctgaacgagcctgctgggttgtacgagctggatggccaattgggtctgtgccttgcctaccagcaattccgagggctcagacgcgtgatgaggccaggcgtctgcctgcagctccaggatgttcacctgctgcagtcggtcggaggtggcaccagaaggccagtactggctccctgcctgagaggtgccgtgctgctgcagtcatttagccgtcaaaaacctggagcccactcaagcagacaggcatacggcgcttccctgtatgagcagctggtctgggagcggcagctgggcttgccactgtacctctgggctacaaaggccctggaggagctggcctgcaaactctgtcctcacgtgcttaggcaccaccagtttctacagcattcctcgcctggctctccctcactagggctacagctcttggcgccgaccctggatttgctggccccaccgggaagtccggtgcggaacgcccacaacgaaattctagaagagccccatcactgcccgctgcaaaaatataccagattgcaaactccaagcagtttcccgacactcgcaactcttaaggaggagggccaacgtaaagcatgggcaagcttcgatcccaaagccctcctccccctcccggaggcctcctatttaccgtcgtgccagctgaatagaaggcttgcttggtcttggctgtgcttactgccttcagccttttgtcccgcccaggttctgctcggggtattggttgccagcagtcacaaaggctgtcttcagctgagagatcagagcggttctctgccctgcctgttgcttgccaagcattctcaaccactttctgatccacgcctcattggctgtctggtcagggccgagaggtttcagctgatcgtggagcgagacgtgaggtccagctttccctcatggaaggaactctctatgcccggcttcattcagaaacaacaggcccgtgtttatgtacagtttttcctcgcagatgccctgattctccccgtgcccaggccctgcctccactccgctacacccagcacgccacagacggaccctaccggaccagaaggccctcacctgggccaatctagactgttccttctgtgtcataaagaggccctcatgaagaggaatttctgcgttcccccaggcgcctcacctgaggtgccgaaacctgccctatccttttatgtgcttgggtcctggctcgggggcacgcaaaggaaggagggcactggatggggcttgccggaaccacagggcaacgacgataacgaccagaaggtgcacctgattttcttcggaagttctgtgcggtggtttgagtttctgcacccaggacaggtttaccggctcattgcaccaggaccagcaacccctatgctgtttgaaaaagacggatctagctgtatatcccggaggcccctggagttagccggatgcgcaagctgccttactgtgcaggacaactggactctggagctggagtccagccaagatatccaggacgtgttggatgctaataagtcacttccagagtcctctctgacagacttactcagtgataatttcaccgattcccttgtctccttcagcgccgaaattctaagtcgtacgttgtgcgaacccctggtcgcaagtctgtggatgaaattggggaatacgggggctatgagaaggtgcgtgaagttgaccgtcgcacttgaaacagctgaatgcgaattcccgccacacttagatgtttacatcgaggacccacacctgccaccaagcctgggattgctgcctggagccagggttcattttagccaactcgagaagcgggtttccagatcccacaacgtgtactgctgttttaggagcagcacatacgtccaggtactctccttcccacccgagacgaccatctcgatccctctgcctcacatctatttggctgaattgcttcagggcggccagagcccctttcaagctacagcctcctgccatatcgttagcgtcttcagtctgcagctgttttgggtgtgcgcgtattgtaccagcatttgtcgccaggcacctgggggcggttgggactgccgttctaggggcgatttgtag

SEQ ID NO: 184050 - DNA, 843 bp, synthetic construct
  misc_feature 1..843: note = Description of Artificial Sequence: Synthetic coding sequence
  source 1..843: mol_type = other DNA
atgcaggccaagtacagcagcacccgggacatgctggacgacgacggagatacgactatgtctttacatagtcagggcagcgccacaacacgccaccccgagccccggcgcactgagcaccgggcgccctcctcaacttggaggcccgtggccctgactctcctgacattgtgcctcgtgctgttgatcggactcgctgccctcgggctcttatttttccaatactatcagctgtccaacaccggacaggacactataagccagatggaggaacgcctgggaaacacctcccaagagcttcaaagcctccaagtacagaatattaagctggccggatctctgcagcatgtagcggagaagctttgccgggaactgtataacaaagctggtgcacaccgttgctccccttgcacagaacagtggaaatggcatggagacaattgctaccagttttataaggactctaaaagttgggaggattgcaagtatttttgcctctctgagaatagtactatgctgaagattaataagcaggaagatctggagttcgcagccagccaaagctattccgagttcttttacagctattggaccggtctacttagaccagactccgggaaggcctggttatggatggatggtactccttttaccagtgagctgttccacatcattatcgacgtgacaagtcctagatcgcgcgactgtgtggccatcctgaacgggatgatatttagtaaagattgcaaggagttgaaacgctgtgtgtgcgaaaggcgagctgggatggtgaagccagagtcattgcatgtgccaccggaaactcttggcgaaggcgactag

SEQ ID NO: 184051 - DNA, 213 bp, synthetic construct
  misc_feature 1..213: note = Description of Artificial Sequence: Synthetic coding sequence
  source 1..213: mol_type = other DNA
atgcaggccaagtacagcagcacccgggacatgctggacgacgacggtgacaccaccatgtctctacatagccagggctctgccactactaggcatccggaaccaaggcggacagagcatcgcgcgccctccagtacctggaggccagtagccctcacgctcctgaccttgtgcctcgtgctccttattggcttagcggccctcggactctag

SEQ ID NO: 184052 - DNA, 879 bp, synthetic construct
  misc_feature 1..879: note = Description of Artificial Sequence: Synthetic coding sequence
  source 1..879: mol_type = other DNA
atgacccggacctacgagaacttccagtacctggagaacaaggtgaaggtccagggattcaagaatggtcccttgcctctgcaatcgctcctacagagactctgcagcgggccctgccacctactgttaagtctggggctgggtctgctcctattagttattatctgtgtcgtgggctttcagaactctaagtttcagcgtgatctggtcactcttcgcactgacttctctaattttacatctaacactgtcgctgagatacaagcgctgactagtcaggggtcttctttggaggagacaattgcctctctcaaagcagaagttgaggggttcaagcaggaaagacaagcggtccactccgagatgctcctgcgggtgcaacagctcgttcaggacctgaaaaaactgacgtgccaggttgctactctcaataacaatggtgaagaggcgagcaccgaaggaacctgctgtcctgttaactgggttgagcaccaggatagctgttattggttctcacactcaggcatgtcctgggccgaggccgagaagtattgccagctgaaaaatgcgcatctcgtggttatcaattcccgcgaagagcagaatttcgttcagaagtacctcggttctgcatacacctggatggggctctccgatcctgagggagcttggaaatgggttgatggaacggattacgctacaggatttcaaaattggaagcccggccagcctgatgattggcaggggcacggcttgggaggcggagaggactgcgcgcacttccacccggacggcaggtggaatgacgatgtgtgtcagaggccctaccactgggtgtgcgaagccggcctgggacagacaagccaagaaagccactag

SEQ ID NO: 184053 - DNA, 951 bp, synthetic construct
  misc_feature 1..951: note = Description of Artificial Sequence: Synthetic coding sequence
  source 1..951: mol_type = other DNA
atgacccggacctacgagaacttccagtacctggagaacaaggtgaaagtgcagggatttaagaacggccccctaccgctgcagtccttgctgcagcggctctgctctgggccgtgtcatctccttttgtctcttgggctgggactccttctgctggttatcatttgcgtggtcgggttccagaactctaagttccagcgggacctggtgactctgaggacggacttcagtaacttcacctccaataccgtggccgagattcaagccctgacctctcagggttcatccctggaagagactattgcttcgctcaaagcagaagttgaagggtttaagcaggaaaggcaggctggcgtttctgagcttcaggagcacactacccagaaagcacacctcggccactgtccccactgcccatcagtttgcgtgcccgtccactcggaaatgctgctgagagtccagcagctcgtgcaggacctgaagaagttgacgtgtcaggtcgctacgctcaacaacaatgcatcgaccgaggggacatgttgtcccgttaactgggtagaacaccaagactcgtgctattggttctcccacagcgggatgtcctgggccgaggcagagaagtactgccaactcaagaacgcccacttggtcgtgattaattcccgggaggagcaaaattttgtccagaagtatttaggttccgcttacacatggatgggcctgagtgaccctgagggagcatggaagtgggtggacggtacagattacgccacagggtttcagaactggaagccaggtcaacctgacgactggcagggccacgggctcggcgggggcgaggattgcgcgcatttccaccctgacggtagatggaacgacgatgtttgccaacgcccctaccactgggtgtgtgaggctgggctggggcagactagccaggagtctcattag

SEQ ID NO: 184054 - DNA, 879 bp, synthetic construct
  misc_feature 1..879: note = Description of Artificial Sequence: Synthetic coding sequence
  source 1..879: mol_type = other DNA
atgacccggacctacgagaacttccagtacctggagaacaaggtgaaagtacagggctttaaaaacgggcccctgcccctgcagagcctactgcagaggctatgctccgggccctgccatctgcttttgagcctgggactaggcttactattgcttgtgattatctgcgtggttggcttccagaattcaaaattccagcgcgacctggttactttgagaaccgatttctcaaactttacctctaacactgtcgccgagatccaggctcttacatcccaaggctcctccctagaagagactatcgcgtcactcaaagcagaagtcgagggattcaagcaggaacggcaagcagttcactcagaaatgcttttaagggtgcagcagctggtgcaggatcttaaaaagctaacttgtcaggtcgccaccttaaacaataatggcgaagaggcttccacagaaggtacctgttgccccgtaaactgggtggagcaccaagacagctgttattggttctcacatagcggtatgtcctgggctgaggccgagaagtattgtcagctaaagaatgcgcacctggtggtgatcaacagccgggaagagcaaaacttcgtgcagaagtatctcggatccgcatacacctggatgggcttatccgacccagagggagcctggaagtgggtagacggcacagactatgccactgggtttcagaattggaagcccggtcagccagatgattggcagggacacggtctgggcggaggcgaggattgcgcccatttccatcctgacggtcgctggaacgatgacgtctgtcagaggccgtatcactgggtttgcgaggcgggattgggccagacttcccaggaaagtcactag

SEQ ID NO: 184055 - DNA, 798 bp, synthetic construct
  misc_feature 1..798: note = Description of Artificial Sequence: Synthetic coding sequence
  source 1..798: mol_type = other DNA
atgagcgaggaggtgacctacgccgacctgcagttccagaacagctctgagatggagaagatccctgagatcgggaagtttggtgagaaagctccacccgcaccgtctcatgtatggcggccagccgcccttttcctgaccttattatgccttctgcttcttatcggtctgggcgtgcttgcgagtatgtttcatgtgacattgaagattgagatgaagaaaatgaataagctgcaaaacatctctgaggagttacagcgtaacatatcattgcaattgatgtccaatatgaacatctcaaacaagattcgtaatttatctactacattgcaaacaatcgccaccaaattgtgtcgggagctatattcaaaggagcaggagcacaaatgtaagccttgcccccggcgctggatatggcacaaggactcctgctatttcctgtccgacgacgtacagacttggcaggaaagcaaaatggcatgcgcagcgcagaacgcgtccctgttgaaaataaacaacaaaaacgcattggaattcatcaagtcacagtccaggagctacgattattggctgggcctttcgcctgaagaggacagcaccagaggcatgagggtggacaacatcatcaacagctcggcatgggtcatcagaaacgctcctgatcttaataacatgtactgtggctacatcaacagactctatgtgcagtactaccactgcacgtataagaaacggatgatatgtgaaaaaatggcaaaccctgtgcaactgggcagcacttattttcgggaggcctag

SEQ ID NO: 184056 - DNA, 699 bp, synthetic construct
  misc_feature 1..699: note = Description of Artificial Sequence: Synthetic coding sequence
  source 1..699: mol_type = other DNA
atgagcgaggaggtgacctacgccgacctgcagttccagaacagctctgagatggaaaagattccagaaattgggaagttcggagaaaaagtacacgttaccctgaagatcgagatgaaaaaaatgaacaaactgcagaatatttctgaagagctacagcggaatatctccctgcagctcatgtctaacatgaatatctctaacaagattcgaaacctgtctactactctacagacaatagcgacaaagctttgtcgagagctgtactcaaaagagcaggaacataaatgtaaaccatgccccaggcggtggatctggcataaggattcgtgctactttctgagtgacgacgtgcagacttggcaggagagtaaaatggcctgcgccgcccagaatgcttctctccttaaaattaacaataaaaacgcattggaattcataaaatcccaatcacggtcctacgactattggcttggactgtcgccggaagaggatagcactaggggaatgagggtagacaacataatcaactcctcagcctgggtcattaggaacgccccagatctcaacaacatgtactgtggatacatcaatcggttgtacgtgcagtactatcactgcacctacaagaaacgcatgatttgtgaaaaaatggctaacccggttcagctaggcagtacctatttccgcgaggcttag

SEQ ID NO: 184057 - DNA, 828 bp, synthetic construct
  misc_feature 1..828: note = Description of Artificial Sequence: Synthetic coding sequence
  source 1..828: mol_type = other DNA
atgtggatcgacttcttcacctacagcagcatgagcgaggaggtgacttatgctgacctacagttccagaatagcagtgagatggagaagattccagaaattgggaagttcggggaaaaagccccccccgctccctctcacgtttggcgccctgcagctctgttcctgaccctgctctgcttgctgctgctgatagggcttggcgtgctggcctctatgtttcacgtcacacttaaaattgagatgaagaagatgaacaaacttcaaaatatcagtgaggagctgcaacgtaacatttctctgcagctcatgagcaacatgaacatcagtaacaaaatcagaaacctgtcaacaaccctacagaccatagccaccaagctctgcagagagctttattctaaagaacaggagcataaatgtaagccctgtcctagacgctggatatggcacaaagattcgtgttacttcctgtctgatgatgtccagacctggcaggagtcgaagatggcgtgcgctgctcagaatgccagtctgcttaaaatcaacaacaaaaacgccctggagttcatcaaaagccagagccggagttatgactactggctcggcctgagtccagaagaagatagcacaagaggtatgcgtgtggacaacataatcaattcctctgcctgggtcatacgcaatgccccagatctgaataacatgtactgtgggtatatcaaccgactttacgttcagtactatcactgtacttataagaagcgcatgatctgtgagaagatggcaaacccggtacagctggggagtacttactttcgcgaagcctag

SEQ ID NO: 184058 - DNA, 264 bp, synthetic construct
  misc_feature 1..264: note = Description of Artificial Sequence: Synthetic coding sequence
  source 1..264: mol_type = other DNA
cacaagtgcaagccctgcccccggcggtggatctggcacaaggacagctgttatttcctgagcgatgatgttcagacatggcaggaaagtaagatggcatgcgcagctcagaacgccagtctgctgaaaatcaataacaagaatatatttagcgttattaagaagaagaccgaaaagtttttctggctggggttaagttgggacagctcaggaaggtcttggttttgggaagacgggtcagtaccctctccaagtctgtattag

SEQ ID NO: 184059 - DNA, 498 bp, synthetic construct
  misc_feature 1..498: note = Description of Artificial Sequence: Synthetic coding sequence
  source 1..498: mol_type = other DNA
atgagcgaggaggtgacctacgccgacctgcagttccagaacagctcagagatggagaaaattccagaaatcggtaagttcggcgagaaggctccccccgctcccagccacgtctggagacccgctgccctcttcctgaccctgttatgtctcctgctgctgatcggacttggagttcttgcttccatgttccatgtgaccctcaaaatagaaatgaaaaagatgaataagcttcagaatatctccgaggagctccaacgcaacatctccttgcagcttatgtctaatatgaacatctcaaacaagattcggaacctcagcaccaccttgcagacaattgctaccaagttatgccgggagttatattccaaggaacaggaacataagtgcaagccctgtcctcggagatggatttggcataaggattcctgctatttcctgtcagacgacgtccagacgtggcaggagagtaagatggcctgcgcagcccagaattag

SEQ ID NO: 184060 - DNA, 642 bp, synthetic construct
  misc_feature 1..642: note = Description of Artificial Sequence: Synthetic coding sequence
  source 1..642: mol_type = other DNA
atgagcgaggaggtgacctacgccgacctgcagttccagaacagcagtgaaatggaaaagatccccgagatcggaaaattcggggagaaagcccctccagctcccagccacgtgtggaggcccgctgctctgttcctgaccctgttgtgcctcttgctgctcattggcctcggtgtgctcgcctctatgtttcatgtcaccctcaagattgaaatgaagaagatgaacaaactgcagaatatctccgaggagttgcaacgtaacatatctctgcaacttatgagcaacatgaatatcagtaacaagatccgtaatctgtcgaccaccctgcagaccatagccacaaagctttgcagggagctttattctaaagaacaggaacacaagtgtaaaccatgtcctaggcgctggatctggcataaggattcttgttatttcctcagcgacgatgtgcaaacctggcaggaaagcaagatggcctgtgcagcacaaaatgcatccctgctgaaaataaacaacaagaatgccctggagtttatcaagtctcaaagtcgaagttatgattactggctcggtctctcccccgaagaagactcgacaagaggcatgcgggtggataatataatcaatagctccgcatag

SEQ ID NO: 184061 - DNA, 423 bp, synthetic construct
  misc_feature 1..423: note = Description of Artificial Sequence: Synthetic coding sequence
  source 1..423: mol_type = other DNA
atggccgccaccggcttcagcgcccccaacggcagctgccacggcacatccaggacagtgaatagcgatgcccctatgtcccccgagctccccaaaccccacctgcccgaccaattggtgattgtcaacgaaactgaggccgactcaaaaccaagcaaaaacgtagcaaggagcgctgccgtcgaaactgcttcccttagcccctccctcgtccctgccaggcaaccgacgattagcttactctgtgaggatactgcagataccctgagcgttgagtctcttactctagtgccacccgtggatccccacagtctccgatcactcaccgggatgccacctctgagtacaccagctgcagcatgcactgaacctgttggtgaggaagctgcctgcgctgagccagtggggaccgctgaggactag

SEQ ID NO: 184062 - DNA, 2721 bp, synthetic construct
  misc_feature 1..2721: note = Description of Artificial Sequence: Synthetic coding sequence
  source 1..2721: mol_type = other DNA
atgttcggccggagccggagctgggtgggcggcggccacggcaagacaagtcgaaatatccacagcctcgaccacttgaagtacctataccacgtactcacaaaaaatacgactgttacggagcagaatcgcaacctgctcgtcgaaactatccgtagtattacagagatcctgatatggggtgaccaaaatgactcttcagtgtttgacttctttctcgagaagaacatgtttgttttcttcttgaacatcctgcgtcagaaatcaggcaggtatgtatgcgtgcagctgttgcagaccctgaacatcctgtttgagaacatctcccacgagaccagcctttactatctgctatccaacaattacgtgaattcaataatcgtccacaagtttgacttctcagatgaggagatcatggcctactatattagctttctgaagaccttgagtctcaagctgaataatcacaccgtgcatttcttttataacgagcacacaaatgacttcgccctctacacagaggcaattaaatttttcaatcatccagagagcatggtgcgcattgccgttagaacaataacactcaacgtatataaagtggacaatcaggccatgctccactacattagggataaaactgccgtgccttacttcagcaatttggtgtggtttatcggcagccacgttatcgaactggacgactgcgtccagaccgatgaagagcaccggaaccgaggtaagctgtccgatcttgttgccgagcatctagatcacctgcactatctcaacgacattctgatcatcaactgtgagttccttaacgacgtgctaacagaccacctactgaacaggctctttctaccactctacgtatactctttggagaaccaggataagggtggtgagagacctaaaatttctctccctgtttcactatacctgctgtctcaggtctttctcataattcaccatgcacctttggtcaacagcttagcggaggtgatattgaacggcgacctatccgagatgtatgctaagactgagcaagatatccagcggagttctgcaaaaccttccatcagatgtttcatcaagccgactgagaccttggagaggagcctggagatgaataagcataaggggaagcggcgcgtgcagaaaagaccaaactacaagaatgtgggcgaggaagaggacgaagagaaggggccgaccgaggatgcccaggaagatgccgaaaaggctaaagaaattgagatggtgatcatggaaagatctaaactgtctgagctggctgcctctacctccgtacaggaacagaataccaccgatgaggaaaaaagcgctgccgcgacctgcagtgagagcacccaatggtcacgacctttcctcgatatggtctaccacgcactagacagccccgacgacgattaccacgctctgtttgttctatgcctgctgtacgctatgtcacacaacaagggcatggaccctgagaagctggagcgaatccagctccctgttccgaacgccgcagagaagacaacgtacaatcacccactagcagagagacttattaggatcatgaacaacgctgcccagccagacggaaagatacgtctggctacacttgagctgagctgtctcctgctcaagcagcaggtgctgatgagcgccggctgcataatgaaagacgtgcacctcgcttgtctggagggggccagggaagagagcgttcacctcgtcaggcacttttacaaaggggaagacatctttctggatatgttcgaggatgaatataggagcatgaccatgaagccgatgaatgtggaatatttaatgatggacgcctccattctgctcccgcctacaggcacacccctgactggaatagactttgtcaagcgacttccatgcggggatgtcgagaaaactcggagggctatccgcgtattttttatgctacggagtctgagcctccagttaaggggagagcccgagactcagctgcctttgactagagaggaggatcttatcaagacagacgacgtgctcgacctgaataatagtgacctgatcgcctgtacagtgatcaccaaagacgggggaatggtgcagcgtttcctggccgttgatatttaccagatgtccctggtcgagcctgatgtgtcccgactcggctggggagtcgtgaagtttgcaggtttattacaggatatgcaggtgactggagtggaggacgattccagagccctgaacatcacaattcacaagcctgcctcatcaccacattctaagcccttcccaatccttcaggcaactttcatattctccgatcacatccgctgtatcattgccaaacagcgcctggccaaagggaggatacaggcacggcgaatgaaaatgcagcggattgccgccctcctcgacctgcccattcagccaaccactgaagttctcggttttgggctgggcagcagtacctcaactcagcatctcccttttcgcttctacgaccagggcagacgcggatcctctgatccgactgtgcagcggagtgtgtttgccagtgtggataaagttcctggtgagcctgctccaaggcccgcccctcagctggtccaccatgggggacgttcacggagtttctccctgtggtcattgtgtgagctgcccttcctatcccagaaaccacgcaggctagccgcacctgcttcttag

SEQ ID NO: 184063 - DNA, 3162 bp, synthetic construct
  misc_feature 1..3162: note = Description of Artificial Sequence: Synthetic coding sequence
  source 1..3162: mol_type = other DNA
atgttcggccggagccggagctgggtgggcggcggccacggcaagacctctagaaacatacactcactggatcacttaaaatacctgtatcacgttctcacgaagaacactactgtcaccgagcagaacaggaacctgctggtcgaaaccatccggtcaataactgaaatcctgatctggggtgatcagaacgactcatccgtgtttgacttcttcctggagaagaatatgtttgtttttttccttaatattttgaggcaaaaaagcgggcgatatgtgtgtgtgcagctgctgcaaactctgaacattctatttgagaacatttctcatgagacatctctgtattatctgctgtcaaacaactacgtgaattccatcattgtacataaattcgatttctctgacgaggaaatcatggcttactacataagcttcctcaaaactctgtccctgaagctgaataaccatacggtccattttttctataacgagcacaccaatgattttgctctttatactgaggccatcaaatttttcaaccaccccgagtccatggtgaggattgccgtgcgaaccattactctgaacgtttacaaggtctccctggataaccaggcaatgctgcattacattagagataagaccgctgttccttacttcagcaatcttgtgtggtttataggatcccatgtaatcgaactcgacgactgcgtccagacagacgaggagcatcgcaatcgcggaaagctgagtgacctggtagctgaacatctcgatcatcttcactaccttaacgatatcctgatcattaactgcgaattcctgaacgacgttctgactgaccacctgttaaatcgcctgtttctacctctttacgtgtactcacttgaaaatcaagacaaggggggggaacggcccaagatcagcctccccgtctcgctttatctacttagccaggtctttttaataatccaccatgcccccttggtgaattcacttgcagaggtcatcctgaacggcgatttgtctgagatgtacgcgaagaccgaacaggacatacagcgatcatccgccaaacccagcattcgttgcttcataaagcccactgaaaccttggagaggtcattggagatgaataagcacaagggtaagagacgggtgcagaagcggcctaattataagaacgtcggggaagaagaggacgaggaaaaaggccccaccgaggacgcccaggaggacgctgagaaagcaaagggcaccgagggcggttcaaagggcatcaaaactagtggcgagagcgaggagatagaaatggtaataatggaaagatccaagctttccgaattggctgctagcacatctgtgcaggaacaaaatactaccgacgaagaaaagtccgctgccgcaacttgttccgagtccactcagtggtcccggccctttctggatatggtgtatcacgcgctggactctccagacgacgattatcacgccctctttgtcttatgcctactctacgcaatgtcacacaacaagggcatggatccagaaaagttggaacggatacaactccctgtccctaatgctgctgagaaaactacctacaatcatcccctcgctgagaggttgattagaatcatgaataacgccgctcagccagacggcaaaatcagattggccactcttgagttatcatgtctgttgttaaagcagcaggttttaatgagcgccgggtgcattatgaaggacgtacacctggcttgtcttgaaggggcgcgggaagagagcgtgcatctggtcaggcatttctacaaaggcgaggacatttttttggatatgttcgaagacgaataccgtagcatgaccatgaaaccaatgaacgtggaatacctgatgatggatgcatccattcttttgccaccaacaggaacgcctcttactggcattgacttcgtcaagagattgccttgtggagatgtcgagaagacccgtagagccatcagagtgttcttcatgctcagatccctatctctacaactcagaggggaacctgagacgcaactacctctcactagggaggaagacctgatcaaaactgacgacgtgctggatttgaacaattccgatcttatcgcctgcacggtgattacaaaagacggcgggatggtacagcggtttttggctgtagacatctaccaaatgtcgctggttgaacctgacgtaagtcgcctcggttggggcgttgttaagtttgctggtctcttgcaagacatgcaggtcacgggcgtggaggacgatagtagagcgctgaacatcaccattcataagccagcatcttcgcctcacagcaagccgttccctatccttcaggcaacttttattttttcagaccacattcggtgcatcattgccaaacaaaggctagccaaaggcaggattcaggctaggagaatgaaaatgcagcggattgccgctctgctagatctgccaatacagcccacaacagaggtgctcggatttggactcggatcgtctacctccactcagcacctaccgtttagattttatgaccaaggcagacggggtagctctgatcccactgtccagagatccgtatttgcctctgttgacaaggtgcctggattcgccgttgcccaatgtatcaaccagcactccagcccctcactcagctctcagtccccaccttccgcctcaggtagtccgagcgggagtgggtccacatcccactgcgactccggaggaaccagtagctctagtaccccttccactgcccagtcccctgccgacgcacccatgtcaccagagctacccaagccccacctgccagatcagctggtgatcgtaaacgaaacagaagctgatagcaagccatccaagaatgtcgcgcgcagcgctgcagtggagacagcgtcactatctccttcgctggtgcccgcgaggcagcccaccattagtttattgtgcgaggacactgcagatactctctctgtagaatctctaactctggtgccgcccgtcgacccccacagtctccgtagtctgaccggcatgccgccattatccactcctgctgcagcatgcactgaacctgtgggtgaagaagctgcttgtgctgagccagtcggcacagccgaggactag

SEQ ID NO: 184064 - DNA, 3162 bp, synthetic construct
  misc_feature 1..3162: note = Description of Artificial Sequence: Synthetic coding sequence
  source 1..3162: mol_type = other DNA
atgttcggccggagccggagctgggtgggcggcggccacggcaagacctcaaggaatattcactccctggaccacctgaagtacctgtatcatgtactgactaagaacacaacagtgacagagcagaaccggaaccttctggtagagaccatcagatccattacagagatcctgatctggggtgaccagaatgactcttccgtgttcgattttttcctcgaaaagaacatgttcgtgttcttcctgaatatcctacgtcaaaagagcggcagatatgtgtgtgtccagctcctccaaaccttaaacatcctgttcgagaatatcagccatgagacaagtctctactatcttctttctaacaattatgtgaatagcattattgtccacaagttcgacttttctgacgaggaaatcatggcctactatataagtttccttaagactctgagtctgaaacttaataaccacactgtgcactttttctataatgagcatactaacgacttcgccctatacaccgaagccattaagttcttcaatcacccggagagtatggtgcggatcgcggttcgtacaataaccctcaatgtctacaaagtgtctgtggacaatcaggccatgcttcactatatccgggataaaacagccgttccatatttttcgaacctggtgtggttcattgggagccatgtcattgagcttgacgattgcgtgcaaaccgatgaggaacatagaaacagaggaaagctctccgaccttgtggcagagcacctcgaccacctacattatttgaacgacattttgattataaactgtgaatttctgaacgacgtgctcacggaccacttactgaacagacttttcctgcctctgtacgtttatagtcttgagaatcaggacaagggcggagagagacccaagattagcctacctgttagtctgtacctactttcccaggtgttcctaattatacaccatgcaccccttgtgaattctcttgctgaggtcatccttaacggcgacctatctgagatgtacgcaaagacagaacaggacatccagcggtcgagcgcaaagccttctatacgttgcttcataaagccaaccgagacgcttgaaagatctcttgaaatgaataagcataaaggcaagcggagggtacagaagaggcctaactacaagaacgtaggagaggaagaggatgaggagaaaggtccaacagaggatgcacaggaagatgcagagaaagccaagggtaccgaaggtgggtctaagggcattaagacttccggagagtccgaggagatcgagatggttatcatggaacggagcaaactttccgaactggccgcttccacatcggtgcaagagcagaatacaactgacgaggagaaaagtgccgctgccacttgctccgaaagcactcagtggtcccggcctttcctggatatggtgtaccatgctctggattcaccagacgacgactaccacgccctattcgtcctttgcttgttgtatgccatgtcccacaataaagggatggatcctgaaaagctggaacgaattcagctgcctgttcctaacgcagccgaaaaaaccacctataatcaccctcttgccgaacggcttattcgcatcatgaataatgccgcccaaccagacggtaaaatcaggcttgccacactggagttgagttgcctcctccttaaacagcaagtcctgatgtctgcaggatgcatcatgaaagacgtccacttggcgtgcctggagggagcccgagaggaatccgtgcatcttgtacgacatttctataagggcgaagacatttttctagacatgttcgaggatgagtacagatctatgaccatgaaaccaatgaacgtggagtatctgatgatggacgctagtattctcctgcctcctactggtacccctctgactgggattgacttcgtaaagcgcttaccttgcggtgatgtagaaaagacaaggcgggctataagagttttcttcatgttgcgttcactatctctgcagctgagaggtgagcctgagacccagctacctctgaccagggaagaggatctcataaagacagacgatgtgctcgatctcaacaattccgatctcattgcatgtacagttattacaaaagacggcggaatggtgcagcgattcctggctgtggacatctatcagatgtccctcgtagaacccgatgtgtccagactgggctggggcgttgtaaagtttgccggcctcttgcaggacatgcaggtcacaggagttgaggacgactcgagggccctgaatattacaatccacaagccggcctcgtctccccattcaaaaccattccctattctgcaggccacattcatcttttccgatcacatcagatgcatcattgccaaacaacggctggcaaaagggcgcattcaggctcggcggatgaaaatgcagaggatcgcggcattgttggaccttcccattcaacctacaacagaagtgttaggctttggacttggctctagtacctcgacacagcatctgccctttcgcttctatgatcaagggcgtcggggtagcagtgatcctacagtgcagcgctccgtgttcgcatccgtggataaggtacccgggtttgccgtcgcccagtgcatcaaccaacactcctctccatctctgtctagccagtccccaccaagcgccagcggctcgcctagcggttctggcagcacatcccattgtgatagcggtggcacctccagctcgagtacccccagcaccgctcaatcacccgccgacgctccaatgagtcccgaactgcccaaacctcaccttccagaccagctggtgatcgttaacgagacagaggcagactctaaaccctctaaaaacgtggcccgcagtgccgcggtggaaacagccagcttgtcaccatctctggtgcccgccaggcagcctaccatttctcttctgtgtgaagacaccgccgacacactgtcggtggagagccttacgctcgtccctccagtggatccgcactctcttcggtccctcactgggatgcccccactcagcacacctgccgcagcttgtaccgaacctgtgggtgaggaggctgcctgtgctgaaccagtcggcacggccgaggattag

SEQ ID NO: 184065 - DNA, 288 bp, synthetic construct
  misc_feature 1..288: note = Description of Artificial Sequence: Synthetic coding sequence
  source 1..288: mol_type = other DNA
atgcacgacagcaacaacgtggagaaggacatcacccccagcgagttaccagccaatcccgctattcgagcaaactgtcaccaggaacctagcgtatgcttgcaggccgcgtgccctgagagctggatcggcttccagcgaaagtgcttctacttctccgacgatacaaagaattggacttccagccaaaggttctgcgacagtcaggacgcagacctggcccaggttgagtcctttcaggagttagtatcataccctggtagcagacgggtgtgcctctttgaatag

SEQ ID NO: 184066 - DNA, 525 bp, synthetic construct
  misc_feature 1..525: note = Description of Artificial Sequence: Synthetic coding sequence
  source 1..525: mol_type = other DNA
atgatcaaccccgagctgcgggacggccgggccgacggcttcatccaccgcatcgtgccaaaactaattcagaactggaagataggccttatgtgcttcctcagcatcatcatcacaacagtctgcataatcatgatcgcaacatggagtaagcacgctaagcccgtggcctgctctggagactggctcggagtacgggataagtgtttttatttctctgacgatacccgcaattggacagcctctaaaattttttgctctcttcaaaaagccgagctggcccagattgatacacaagaggatatggaattcctgaagagatacgctgggacagatatgcattggattggactgtccaggaagcagggggattcctggaagtggactaacggaacaacttttaacggctggttcgagatcatcggtaacgggtccttcgcctttctgagtgcagacggcgttcatagctcacgcggctttatcgacataaagtggatttgctcaaaacctaaatacttcctttag

SEQ ID NO: 184067 - DNA, 2406 bp, synthetic construct
  misc_feature 1..2406: note = Description of Artificial Sequence: Synthetic coding sequence
  source 1..2406: mol_type = other DNA
atgcaccaccggatgaacgagatgaacctgagccccgtgggcatggaacagttaacttcatcatcagtgagcaatgccctccccgtttctggcagtcacttgggtctggctgccagccctacacactccgccatcccagcccccggactgccggttgcaatacctaacctaggccctagcctgtcctccctgccatcagccctttctctaatgcttcctatgggaattggcgacagaggggtgatgtgtggcctgccagaacgaaactatacgctacctccccccccttatccccatttggaatcctcatacttccgtacaattctccccgggattctgagttacctcgctgatagacccccgccacagtatatacacccaaactccatcaacgtggacggcaacacagcccttagcattactaataacccttccgcccttgacccttaccagagtaacgggaacgtggggctggagccgggaatcgtatccatcgattcccggagcgtcaatactcacggcgcacagtcactccatcctagcgatggtcacgaggttgccttggatacagcaatcacgatggaaaatgtatctcgtgttacgtcaccaattagcactgacggcatggctgaggaactcacaatggatggagtggcgggggagcactcacagataccaaacggatcgagaagccatgagcccctctcggtggatagcgtcagcaacaatttggccgccgatgccgtgggacatggcggggtgatacccatgcacggcaatggcctggaactaccagttgtcatggaaacggatcatatcgcctctcgcgtgaatgggatgtcagactcggcactgagtgatagcatccacacggtagcaatgtcgaccaatagtgtgtcagtcgctctgtcaacttctcataaccttgcaagtctcgaatccgtcagtctgcacgaggtgggactcagtcttgaaccagtcgctgtctcatccataacgcaagaggtggcaatgggaaccggacatgtcgacgtctcttcggactcactgtcctttgttagtccatccttacagatggaggacagtaactcaaataaggagaatatggccactctgttcaccatttggtgtaccctgtgcgaccgtgcttatcccagcgattgtccagagcacgggcctgttacattcgtgcctgatacccccatcgaatccagagccaggttgtccctcccgaagcaactcgttctgagacagtcaattgtgggcgccgaagtgggtgtttggaccggtgagactatccccgtacgtacctgctttggccccttgatcggtcaacagtctcattctatggaagttgccgaatggacagataaagctgtcaaccacatttggaagatctatcataatggagtcctggaattttgcattatcaccactgatgaaaacgagtgtaactggatgatgtttgttcgaaaggctcgtaaccgagaggagcagaacctcgtggcatatcctcatgatggaaagatcttcttttgcacaagccaggatatccctccagaaaacgaacttttattttattactctagggattatgcccagcagattggcgtacccgagcacccggacgtccacttgtgtaattgtgggaaggagtgtaatagttacacggagtttaaggcccacctgaccagtcacatccacaatcatttaccgactcagggccactccggaagtcacggaccaagtcatagcaaggaaaggaagtggaaatgcagcatgtgcccccaggcctttatctccccttctaaacttcacgtgcactttatgggccacatgggaatgaagcctcacaaatgcgatttttgctccaaggcttttagcgatccatccaacctccggactcatctcaaaattcacactgggcagaaaaattatcgctgcactttgtgtgacaagtcttttacgcagaaagcgcacctggagtcccacatggtcatccacaccggcgagaagaacttaaaatgtgattactgcgacaagctgttcatgcggcggcaagatcttaagcagcatgtgttgatacacacccaggagcgtcagattaaatgcccaaagtgtgataaactattcttgcgcactaaccatcttaaaaaacatctgaactctcatgagggaaaaagggattatgtttgcgagaaatgtacaaaggcatacctcacaaaatatcacctgactaggcacctcaagacttgtaagggcccaacttccagctcatcagctccagaggaagaggaggaggacgatagtgaggaggaggacctggcggactcggtgggtacagaggactgtaggatcaattccgcggtgtactccgcagacgaaagtctgtccgctcacaagtag

SEQ ID NO: 184068 - DNA, 465 bp, synthetic construct
  misc_feature 1..465: note = Description of Artificial Sequence: Synthetic coding sequence
  source 1..465: mol_type = other DNA
atgcacgacagcaacaacgtggagaaggacatcacccccagcgagcttcccgcaaatccagccattcgagctaattgccatcaggagcccagcgtttgtctgcaggctgcgtgtccggaaagctggatcggatttcaacgtaagtgtttctacttttccgatgatacaaaaaactggacctcctcccagaggttctgcgactcacaagatgctgacctggctcaagtggaatccttccaggagctgaactttcttctccgatataagggaccaagcgatcactggatcggcttgagtagggaacagggacagccttggaaatggataaatggaactgagtggactcgccagtttcccatcctgggtgctggagagtgtgcgtacctcaatgataaaggcgcttcaagcgcaaggcactatacggaacggaagtggatctgttccaaatctgatatacatgtgtag

SEQ ID NO: 184069 - DNA, 585 bp, synthetic construct
  misc_feature 1..585: note = Description of Artificial Sequence: Synthetic coding sequence
  source 1..585: mol_type = other DNA
atgcacgacagcaacaacgtggagaaggacatcacccccagcgagctaccggctaatccaggctgccttcatagcaaggagcattctatcaaggccacccttatctggaggttgttctttttaattatgtttctgaccataatcgtgtgcggtatggtggccgctctgtctgctattagggcgaactgccatcaggaacctagcgtctgcctgcaggctgcttgtccggagtcctggatcggctttcaaaggaagtgtttttacttcagtgacgacaccaaaaactggacgtcaagccagcggttttgtgacagccaagatgctgacttggcacaggtggaatccttccaggagctgaactttctcctccgctataaaggtccctctgaccactggattggcttgtcacgggagcagggacagccatggaagtggattaacggcacagaatggacacgccaactagtcatgaaagaggatggcgcaaacttatatgtcgctaaagtctcccaagttcccagaatgaatcctagaccagtcatggtgagttatccaggcagcagacgcgtgtgtttgttcgagtag

SEQ ID NO: 184070 - DNA, 576 bp, synthetic construct
  misc_feature 1..576: note = Description of Artificial Sequence: Synthetic coding sequence
  source 1..576: mol_type = other DNA
atgcacgacagcaacaacgtggagaaggacatcacccccagcgagctgccagccaaccccggatgcctgcattcgaaagagcattccatcaaggctaccttgatttggcgactgtttttcctgattatgtttctgacaataatagtgtgtggaatggtggctgccttgtcagccatcagggcgaattgtcatcaagaacccagtgtgtgtctgcaggccgcttgtccagaatcgtggatcggattccagcgcaaatgcttctacttctccgacgatacaaaaaactggacaagttcccagcggttttgcgattcgcaggatgctgacctggcgcaggtcgagagctttcaggaattgaattttctactgcgttataaagggccttcagaccattggatcggcctgagtagggagcaaggtcagccctggaaatggatcaacggaacagagtggacgcgtcagttccccattttaggcgcaggtgagtgtgcatatttaaacgataagggggctagttccgcccggcactacactgagcgcaagtggatctgtagcaaatccgatatccacgtttag

SEQ ID NO: 184071 - DNA, 399 bp, synthetic construct
  misc_feature 1..399: note = Description of Artificial Sequence: Synthetic coding sequence
  source 1..399: mol_type = other DNA
atgcacgacagcaacaacgtggagaaggacatcacccccagcgagcttcccgcaaatccaggctgcctccactctaaggagcactccatcaaagctactttgatctggaggctgttttttcttatcatgtttcttaccattatagtttgtggcatggtcgcggctctgtctgcaatccgggccaattgtcaccaggagccttcggtgtgtctccaggcggcctgccctgagagctggataggattccagcggaagtgcttctatttttcagacgataccaagaactggacttcgagtcagcggttctgcgacagccaggacgctgatcttgcccaggtggaatcatttcaagagttagtcagctatcccggctcaaggagagtttgcctgtttgaatag

SEQ ID NO: 184072 - DNA, 891 bp, synthetic construct
  misc_feature 1..891: note = Description of Artificial Sequence: Synthetic coding sequence
  source 1..891: mol_type = other DNA
atgagcgacagcaaggagccccgggtgcagcagctgggcctgctggggtgccttggacatggcgcgctggtgctgcagctgctgtccttcatgttgctggcaggtgtgttggtggccatcctggttcaagtgagcaaagtgccttcttctctaagccaagaacagagcgaacaggacgccatctatcagaatctgacccagctgaaggccgctgtaggggagctctccgagaaaagcaagctgcaggaaatctatcaggagctcactcagcttaaggcagctgtaggcgaactgcccgagaagtcgaagttgcaagagatataccaggagctgactcgactgaaagccgcagtgggtgaactccccgagaagagcaagcttcaggaaatttatcaggaactgaccagacttaaagccgctgtcggagagctaccagagaagtcgaagcttcaggaaatctaccaggaactgactaggctaaaagccgctgtgggagagttgccagagaaatctaagctccaggaaatctatcaggagctaaccgagttgaaagccgccgttggggaactgcctgagaaatcgaagctgcaggagatttatcaagaacttacccagctgaaagcagcagtgggcgagttaccagaccagagtaagcagcagcagatttaccaggagttgaccgatctgaagaccgccttcgagaggctctgtagacattgtccaaaggactggacctttttccaggggaactgttatttcatgtccaattcccagaggaattggcacgattcagtaaccgcttgccaggaggtcagggcccagctggttgtcattaaaacggcggaggagcagttgccagccgttctggagcagtggagaacgcagcaatag

SEQ ID NO: 184073 - DNA, 2379 bp, synthetic construct
  misc_feature 1..2379: note = Description of Artificial Sequence: Synthetic coding sequence
  source 1..2379: mol_type = other DNA
atggccgcccccagcctgctgaactggcggcgggtgagcagcttcaccggacctgtgcccagagccaggcacggtcaccgggcggtagccattcgggaactaatgataatttttggaggaggcaacgaagggatcgcagatgagctgcacgtgtataatacggctaccaaccagtggttcttacccgctgtgcgcggcgatatacccccggggtgcgcggcccatggttttgtctgcgacggcactcggatcctggtgtttggtggcatggtcgaatacgggagatattcaaatgaattgtacgaacttcaagcgagtagatggctttggaaaaaagtcaaaccacacccaccccccagtggcctgcctccctgcccccggctggggcattccttcagcctgtatgggaacaagtgttacctttttggaggtttggcaaacgagtcagaagatagtaataataatgtgcctcggtacttaaacgacttttacgagctcgagctgcagcacggctctggagtggttggatggagcatccctgtgaccaaaggggtagtaccaagtccccgtgagtcccacactgccgttatatattgtaaaaaggatagcggaagccccaagatgtacgtgtttggcggcatgtgtggcgctagactggacgatctgtggcaattagacctggagacaatgtcctggtctaagcctgagaccaaaggcaccgttcctcttcctagatcgctacatacagcctccgttattgggaacaaaatgtatatcttcggaggatgggttccacacaagggcgaaaatactgaaacttcaccacatgactgcgaatggagatgcacatcatcgttttcttaccttaatttggatactaccgaatggaccactctggtttccgatagtcaggaagataagaaaaattctcggccgcgccctagagccggtcactgcgcagtcgccatcggtacacgcctgtatttctggtccggcagggatggatacaaaaaagccctgaatagtcaggtgtgttgtaaagacctttggtacctcgataccgagaagcctcctgcaccctcacaggtccagctgataaaggcaaccactaattcctttcatgtcaagtgggatgaagtctccacggtggagggttatttgttacagctctctacagacctgccctaccaggccgcttcctcggacagctccgccgctcctaatatgcagggggtcaggatggaccctcaccggcaaggaagcaacaatatagtccccaatagtattaacgacactattaactcaacaaagactgagcagcctgcgaccaaggagacgtcgatgaaaaacaaacccgatttcaaggccttgactgacagtaacgctattctctacccctccctcgcatcaaatgcgtctaatcataactcacacgtggtagacatgctcagaaagaacgagggacctcatactagcgctaatgtgggcgttctttcctcctgtctcgacgtgagaacagtgatcccagaaacatcagtcagctcaaccgtctctagcacccagaccatggtcacacagcagaccattaaaactgagagctctagtaccaatggcgccgtggtgaaggacgaaacgagcttgaccaccttttctactaaatctgaagtggatgagacctacgcactgcccgccacaaagatttcacgtgtagaaactcatgccacagccacccccttcagtaaggaaactcctagcaatcctgtcgccaccgtaaaggccggcgaacgtcagtggtgcgacgtaggtatctttaagaataacacagcccttgtgtcacaattctatctgctgccaaaaggcaaacagagtatctctaaggttggcaacgcagacgtgcccgactacagtctcttgaaaaaacaagaccttgtgcccgggacagggtaccgcttcagagttgcggccattaatggttgtggtatcggccctttctcaaagatttccgagttcaagacctgcataccgggatttccaggggccccaagcgcagtcaggattagcaagaacgtcgaaggcatacacctgagctgggagccaccgacgagcccctctgggaacatactcgagtactcggcgtatctggcaattagaaccgctcagatccaggacaatccgtcccagcttgtcttcatgagaatatattgtggtctgaaaacaagctgcattgtcacggcaggacagctagcaaatgctcacattgattatacctcccgccctgccattgtcttcagaatctccgccaaaaatgaaaagggttacggaccagccactcaggtgaggtggctgcaaggcaataacaagaaagccccattgaactag

SEQ ID NO: 184074 - DNA, 498 bp, synthetic construct
  misc_feature 1..498: note = Description of Artificial Sequence: Synthetic coding sequence
  source 1..498: mol_type = other DNA
atgaccagcgagatcacctacgccgaggtgcggttcaagaacgagtttaaaagcagcggcattaacaccgcaagcagcgcggagactgcctggtcatgctgtcccaagaactggaagtcgttctcgtctaattgttattttatcagcaccgagtccgcctcttggcaggattctgaaaaggactgcgcgaggatggaggcccacctgctggttattaatacacaggaggagcaagattttatttttcagaacctgcaggaggaatcggcctatttcgtgggactgagcgaccctgaagggcagagacactggcagtgggtcgatcaaactccctataatgagagcagtacattctggcacccccgagagccgagcgatcctaacgagcgctgcgtggtgctgaattttcggaagtcaccaaagcgctggggatggaacgatgtaaactgtctgggcccgcagcgtagtgtttgtgaaatgatgaaaatccatctctag

SEQ ID NO: 184075 - DNA, 615 bp, synthetic construct
  misc_feature 1..615: note = Description of Artificial Sequence: Synthetic coding sequence
  source 1..615: mol_type = other DNA
atgaccagcgagatcacctacgccgaggtgcggttcaagaacgagtttaagagcagtggcatcaatactgcgagttccgccgcatctaaagaacgtaccgcccctcataaaagtaacacaggtttcccaaaactattgtgcgcctctctgcttattttttttctcttgcttgccatcagcttcttcatcgcctttgttaaaacagcgtggtcttgttgcccgaagaattggaagagtttctctagcaactgctactttatcagcaccgaatctgccagttggcaggacagtgagaaagactgcgctcgtatggaagcgcatctgctagtcattaacacacaggaagaacaggacttcatattccagaaccttcaagaggaatccgcctattttgtggggctgtctgacccagaaggacagcgtcattggcagtgggtggaccaaaccccatataatgagagttctacattctggcaccctcgagagccttcagaccccaatgagaggtgtgttgtactcaactttcgaaaatcccccaaacggtggggctggaacgatgtaaattgtttgggcccacagcggtctgtctgtgagatgatgaagattcacctatag

SEQ ID NO: 184076 - DNA, 597 bp, synthetic construct
  misc_feature 1..597: note = Description of Artificial Sequence: Synthetic coding sequence
  source 1..597: mol_type = other DNA
atgaccagcgagatcacctacgccgaggtgcggttcaagaacgagttcaagagctcagggatcaatacagctagctccgctgtatttttccagaaatactcccagctgctggagaagaagacaacgaaagaattggtacatactactctcgagtgtgtgaagaaaaatatgcccgtcgaagagacagcatggtcatgctgccccaagaattggaagagcttctcctccaattgttacttcatttccacagaatctgcatcatggcaagactccgagaaagattgtgccaggatggaggcccacctccttgtaatcaacacacaggaagagcaggactttatatttcagaaccttcaggaagaatcagcctatttcgttggcctgtctgaccccgagggccagaggcactggcagtgggtggatcaaaccccctacaatgagagctcaactttctggcaccctagagaacctagtgacccgaatgagcgctgtgtagtcctcaactttcgcaaatcgcctaagagatggggatggaatgacgttaactgtctgggtcctcagcggagtgtatgtgagatgatgaaaatccatctgtag

SEQ ID NO: 184077 - DNA, 549 bp, synthetic construct
  misc_feature 1..549: note = Description of Artificial Sequence: Synthetic coding sequence
  source 1..549: mol_type = other DNA
atggtgcccgaggaggagccccaggaccgggtgccccacaacttcatgtactcaaagacagtgaagcgccttagtaaattgagggagtaccagcagtatcatccatccctaacttgtgtgatggagggcaaagacattgaggactggtcatgctgtcctacgccttggacttcctttcagtcttcttgctactttatatccaccggaatgcagtcatggactaaatctcaaaaaaactgctcggttatgggtgcagatctggtagtgataaacacccgtgaagagcaagactttattatccaaaatctgaaaaggaattcctcctacttcctaggccttagtgatcccggaggtcgtcgccattggcagtgggtggaccaaaccccctataatgaaaacgtaacattctggcattcaggcgaacccaataatttagatgagcggtgcgccatcatcaattttcggagttctgaggaatgggggtggaatgatatccattgtcatgtgcctcagaaatccatatgtaagatgaaaaagatatacatatag

SEQ ID NO: 184078 - DNA, 642 bp, synthetic construct
  misc_feature 1..642: note = Description of Artificial Sequence: Synthetic coding sequence
  source 1..642: mol_type = other DNA
atggtgcccgaggaggagccccaggaccgggagaagggcctgtggtggtttcagctaaaggtgtggtctatggccgttgtgtcaattctcttgttgagcgtgtgtttcaccgtgagttccgttgtcccccacaactttatgtattcaaagaccgttaagagattgtctaagcttcgggaatatcagcagtaccatccctcgttaacttgtgtgatggaagggaaagatatcgaggactggtcatgttgccccactccctggacaagctttcaaagttcttgctatttcatctcaaccggcatgcagagttggaccaaaagtcagaagaattgttccgtgatgggcgccgacctagtggtgattaacaccagggaggagcaggactttattattcagaatctgaagaggaacagctcctatttccttgggctttctgatccaggcggtaggcgccactggcagtgggtcgatcagacgccatacaatgagaacgttactttctggcatagcggtgaaccaaacaatctagatgagcgctgcgccattatcaattttaggagtagcgaagagtggggatggaatgatatccattgccacgtgcctcagaaatccatctgcaagatgaagaaaatttatatctag

SEQ ID NO: 184079 - DNA, 549 bp, synthetic construct
  misc_feature 1..549: note = Description of Artificial Sequence: Synthetic coding sequence
  source 1..549: mol_type = other DNA
atggtgcccgaggaggagccccaggaccgggtgccccacaacttcatgtattctaagacagtgaagcgcctctccaagctccgagagtatcagcagtaccacccaagtctaacttgtgtcatggaagggaaggacatcgaggattggagctgttgccctactccttggacatcatttcagagttcctgttatttcatctcaacaggaatgcagtcttggactaagagtcagaaaaactgttccgtgatgggcgctgaccttgtcgtgattaacacacgtgaagagcaagatttcattatccagaatctaaagcgcaatagctcttactttctgggactgtccgaccccggggggcgcaggcactggcagtgggtcgatcagacaccgtacaacgaaaatgtcactttctggcactccggagagccaaataatttagatgaacgctgcgccataatcaacttccgctccagtgaagagtggggttggaacgacatccactgtcacgtgccacagaagagtatatgcaaaatgaaaaagatctacatttag

SEQ ID NO: 184080 - DNA, 642 bp, synthetic construct
  misc_feature 1..642: note = Description of Artificial Sequence: Synthetic coding sequence
  source 1..642: mol_type = other DNA
atggtgcccgaggaggagccccaggaccgggagaagggcctgtggtggttccagttgaaagtgtggtctatggccgtcgtgtccattctgctcttgtctgtgtgcttcacagttagctctgtagttccgcataatttcatgtactctaaaaccgtgaagcgcctctccaagctgcgggagtatcaacagtatcatccaagtctgacatgtgttatggaaggaaaagacatcgaagactggagttgttgtcctacaccctggacttcattccagagcagttgctactttatcagcactggcatgcagtcttggaccaaaagccagaagaactgcagcgtgatgggggccgacctagttgtgataaacactcgcgaggaacaagatttcataatccagaatctaaaacgaaattcctcatactttctgggtcttagcgatccagggggtcggcggcactggcaatgggtggaccagacgccatataatgagaatgtgaccttttggcatagtggggaacccaacaatcttgacgaaaggtgtgccatcatcaatttccggtcctccgaggagtggggttggaatgacattcactgtcacgtcccacaaaaaagcatatgcaagatgaagaagatctatatctag

SEQ ID NO: 184081 - DNA, 648 bp, synthetic construct
  misc_feature 1..648: note = Description of Artificial Sequence: Synthetic coding sequence
  source 1..648: mol_type = other DNA
atgggcctggagaagccccagagcaagctggagggcggcatgcacccacagctgatcccatctgttatagcggtggtctttatcctgctccttagtgtttgttttattgcttcctgtctcgtgactcaccacaacttttccagatgcaagcgtggcacaggcgtccacaaactggaacatcatgctaaactgaagtgcatcaaagaaaaaagcgagctgaagtctgctgaagggagcacttggaactgttgtccaattgattggcgggcattccaaagcaattgttactttcctctgaccgacaataagacctgggccgaatccgagaggaattgcagcggaatgggagcgcatctgatgacaatcagcaccgaggcagaacagaacttcataatccagttcctagatagacgtttaagttactttcttgggctgagagatgaaaacgctaagggacagtggagatgggtcgatcaaacgcctttcaatcctcgcagagtattttggcacaaaaatgagccggacaacagccaaggggagaactgcgtcgtgctcgtgtacaaccaggacaaatgggcgtggaacgatgtcccatgtaacttcgaagcctcccgaatctgtaaaatccctgggaccaccctcaattag

SEQ ID NO: 184082 - DNA, 435 bp, synthetic construct
  misc_feature 1..435: note = Description of Artificial Sequence: Synthetic coding sequence
  source 1..435: mol_type = other DNA
atgggcctggagaagccccagagcaagctggagggcggcatgcaccctcagctgattccttctgtcatcgccgtggtctttattttactgttgtctgtatgctttatagcgtcctgtctggtgacacaccataacttcagtcgctgcaagcggggcacaggagtgcacaagctggaacaccatgctaagctgaagtgcataaaagagaaaagcgagctgaaaagcgcagaaggaagtacatggaactgctgtcctatagactggagggcttttcagtctaactgctattttccgctcacagataataaaacctgggccgagagcgagcgcaattgttcaggaatgggcgcccacttgatgactatcagtacggaagccgagcagaacttcatcatccaatttcttgaccgacgtctgagctacttcctcgggtag

SEQ ID NO: 184083 - DNA, 660 bp, synthetic construct
  misc_feature 1..660: note = Description of Artificial Sequence: Synthetic coding sequence
  source 1..660: mol_type = other DNA
atgaacagcagcaagagcagcgagacccagtgcaccgagcggggctgcttctcctctcagatgtttctttggactgtggctggcatccctattctgtttctgagcgcctgctttatcactcgctgtgtggtgaccttccgcattttccagacttgcgatgaaaagaagttccagctgcccgagaacttcactgagctgtcatgctacaactacgggtccggaagcgtgaagaactgctgcccattaaactgggaatatttccagagctcttgctattttttttccaccgatacaattagctgggcgctgtcgttaaaaaattgttctgccatgggcgcacatctggtggttattaacagccaggaggagcaggagtttctgtcttacaaaaagcccaagatgcgggagtttttcatcggcctcagcgatcaggtggtcgaaggccaatggcagtgggttgacgggactccccttactaagagcctgagcttctgggacgtgggtgagcctaataatatcgccaccctggaggactgtgctaccatgcgtgattcgtcaaacccacgtcaaaattggaacgatgtcacttgctttcttaactactttaggatttgcgagatggtcggcattaatccccttaataaagggaaatcactttag

SEQ ID NO: 184084 - DNA, 1134 bp, synthetic construct
  misc_feature 1..1134: note = Description of Artificial Sequence: Synthetic coding sequence
  source 1..1134: mol_type = other DNA
atgagcgacagcaaggagccccgggtgcagcagctgggcctgctggaggaggatcctactacaagcgggataaggctgtttccgagagatttccaattccagcagatccatggccacaaaagcagcacagggtgcctcggccatggggctctagtcctgcaactgctttccttcatgctgctggccggggtgctggtagcgatcctggtgcaggtgagcaaggttccgtctagcctgtcgcaagaacagtctgaacaggacgctatttaccaaaatcttacacagctaaaggctgccgtgggcgagctgtccgagaaatctaaactgcaggagatctaccaagaattaacacaactgaaggccgccgtagtcggtgaactgccagagaagtccaagttgcaggagatttaccaggaactgacgagactgaaggctgctgtgggcgaactacctgagaagtccaaacttcaggagatctatcaggaactgactcgcttaaaggctgcagtcggggagctgcccgagaagtccaaattgcaggaaatctatcaggaactcaccgaactgaaggccgcggtgggagaactcccagagaagagcaagctccaagaaatctatcaggagttgacccaattgaaggcagcagttggtgagctgcctgaccagtccaagcagcagcagatttaccaggagctgacagatctgaagactgctttcgaacgtttatgccggcactgcccaaaggattggaccttctttcagggcaactgctactttatgtccaattctcagcgaaactggcacgactcagttacagcctgtcaggaggtccgagcacaactcgttgtgattaagactgcagaggagcagaacttcctacagctacagacaagtagatcaaatcgcttcagttggatgggcctcagcgacctgaatcaggaaggtacctggcaatgggtagatggatccccattgagcccgagctttcaaagatactggaactctggggagccaaacaattctgggaacgaagactgtgcggagttttccggatctggctggaatgataataggtgcgatgtcgataattattggatctgtaagaagcccgcagcatgctttcgagatgagtag

SEQ ID NO: 184085 - DNA, 1200 bp, synthetic construct
  misc_feature 1..1200: note = Description of Artificial Sequence: Synthetic coding sequence
  source 1..1200: mol_type = other DNA
atgagcgacagcaaggagccccgggtgcagcagctgggcctgctggaagaagatcctactacgtcagggattaggctatttccccgcgattttcagtttcaacagattcatggtcacaaaagcagtactggctgtctaggccatggagccctggtactgcaactactgtcgttcatgttgctagctggagtcctggtcgcaatactggtgcaggttagcaaggtgccatcctccctttctcaggagcaatctgaacaggacgctatctatcagaacttaactcaactgaaggcagctgtgggggaattgagtgaaaaaagtaaactgcaggagatttaccaggaactgacgcaacttaaggccgccgtcggagagctgcctgaaaagtcaaaactgcaggaaatctaccaggagttgacgaggcttaaagcagccgtgggcgaattgccagaaaagtcaaagctacaggagatctaccaggaactgacgaggctcaaggcagccgtcggggagctccctgaaaagtcaaaactacaggaaatataccaggagctgacccgcctcaaggctgcggtcggagaacttcccgagaaaagcaagctccaggaaatttatcaagagcttacagagctcaaggccgcggttggggagctgccggaaaagtctaagctccaagagatttatcaggaactgacgcagttgaaggctgccgtcggagaactgcctgatcagagcaaacagcagcagatctatcaagagcttaccgatctgaagacagcatttgaaagactgtgccggcattgtcccaaggattggacctttttccaggggaactgctatttcatgtcaaactcgcaacgcaattggcatgactccgtaaccgcttgtcaagaggtgagggcccagctagttgtgattaaaaccgctgaggagcaaaatttccttcaactgcaaacctctcgatccaaccggtttagttggatgggactgagtgacctcaaccaggagggtacatggcagtgggtggacggctctcccctgtccccatctttccagcggtactggaatagcggcgaacctaataattccggaaacgaagattgcgctgagttctcaggctcggggtggaatgacaacagatgcgatgtggataattattggatctgcaagaagccagccgcttgtttccgagatgagtag

SEQ ID NO: 184086 - DNA, 1047 bp, synthetic construct
  misc_feature 1..1047: note = Description of Artificial Sequence: Synthetic coding sequence
  source 1..1047: mol_type = other DNA
atgagcgacagcaaggagccccgggtgcagcagctgggcctgctgggatgcctgggccacggcgccctagtactgcaacttctaagtttcatgctcctcgccggcgtattggtcgccattctcgtgcaagtgtccaaagtgccatccagcctgtcccaggaacagagcgagcaggatgccatttaccagaatctcacacagttgaaggcagctgtgggtgaactgtcagagaagagcaaactgcaggaaatatatcaggaactgacccagctgaaagcggccgtcggagagctcccagagaaaagcaagctgcaggagatctaccaggagctgacccgcctgaaggctgccgtgggcgaactccctgagaagtccaaactacaggagatttaccaggaattgaccaggctgaaagctgctgtgggcgaactgcctgagaagtcaaagctgcaagagatctatcaggagcttaccgaactgaaagccgccgtgggtgagctgcccgagaagtcaaagctccaggaaatctaccaggaactgacccaactgaaagcagccgtgggcgagctacccgaccaatccaagcagcagcaaatataccaggagctgacagatctgaagaccgccttcgagcgcctttgcaggcattgcccaaaagactggaccttcttccaaggaaattgctactttatgtcaaatagtcagcgaaattggcacgattccgtcacagcttgccaggaggtacgtgctcagctggtggtcataaaaaccgccgaagaacaaaactttcttcaactgcaaacaagtaggtcaaacagatttagttggatgggactctctgacctcaaccaagaaggcacttggcagtgggtggatgggtctcctttaagcccctccttccaacggtactggaacagcggcgagcctaataacagtggaaacgaggactgcgcagagttctctggcagtgggtggaacgataaccgatgcgacgtagataactactggatctgtaagaaacctgcagcttgcttcagagatgaatag

SEQ ID NO: 184087 - DNA, 975 bp, synthetic construct
  misc_feature 1..975: note = Description of Artificial Sequence: Synthetic coding sequence
  source 1..975: mol_type = other DNA
atgagcgacagcaaggagccccgggtgcagcagctgggcctgctggaagaggatccaacgacaagcggtatccgactgtttccacgtgacttccagttccaacagatccacgggcataagagcagtaccggatgcctgggtcacggcgctctggtgcttcagttgttatccttcatgttactggcaggcgtgttggtggccatcctggtccaagtgtctaaggtccctagctccttgtcacaggaacagtccgagcaggatgccatctatcagaatctgacccagctcaaggccgcagtaggtgagctgagcgagaaaagtaagttacaggagatttaccaagagcttacacaactgaaggcagctgttggtgagcttccggagaaatccaaacttcaagagatctatcaggagcttactaggcttaaagctgctgtcggtgaactgcctgaaaagtcgaaactgcaggaaatttaccaggagttgacgcgactcaaggcagcagtcggagagttgcccgagaagtcaaagttacaggaaatctaccaggagctcactcgtctgaaggctgcagtcggtgaactcccagagaagtccaaactacaggaaatatatcaagagctcacggagcttaaggcggctgtgggcgagctgccagagaagagcaaactccaggagatctatcaggagttgacccagcttaaggccgcagtgggcgagctgcccgaccaatccaagcaacagcaaatataccaggaactcacggacctgaagacagctttcgaacggttatgccggcattgccctaaagactggaccttctttcaggggaactgctacttcatgtccaactcccaacggaactggcacgattccgtcacagcatgccaggaggtcagagcccaattggtggtgatcaagacagcagaagaacagctgccagctgtgcttgagcagtggcgaacccagcagtag

SEQ ID NO: 184088 - DNA, 771 bp, synthetic construct
  misc_feature 1..771: note = Description of Artificial Sequence: Synthetic coding sequence
  source 1..771: mol_type = other DNA
atgagcgacagcaaggagccccgggtgcagcagctgggcctgctggtcagcaaagttccctcttccctgagtcaggaacagtcggagcaggacgctatttatcagaatctcactcagctgaaagctgccgtgggggagctgagtgagaagtccaaactgcaggagatttaccaagaactgacacaactgaaagcagctgtaggtgagcttccagaaaagtcaaagctacaggaaatttaccaggaactgactcgcctgaaagcggccgtgggcgaactccccgagaaaagcaaactacaggaaatctaccaggaactgactaggctgaaggctgcggtaggagaacttcccgaaaaatccaagctgcaggaaatttaccaggagctcaccaggctcaaagccgccgttggggaacttcccgaaaaaagtaagctgcaagagatctatcaggaactgactgaactgaaggccgctgtcggcgagctgcccgaaaaaagtaaactgcaggagatctatcaggagcttacacagctgaaagcggccgttggtgaattgcctgatcaaagcaagcagcaacagatctatcaagaactaacggacctgaagaccgcttttgagcgcctgtgccggcattgcccaaaggattggacattttttcagggtaactgttactttatgagtaacagtcagaggaactggcacgatagcgtgactgcctgtcaggaagtgcgggctcaactcgtagtgatcaaaaccgctgaggaacaatag

SEQ ID NO: 184089 - DNA, 999 bp, synthetic construct
  misc_feature 1..999: note = Description of Artificial Sequence: Synthetic coding sequence
  source 1..999: mol_type = other DNA
atgagcgacagcaaggagccccgggtgcagcagctgggcctgctggaagaagaccccacgacaagtgggatccgcctctttccaagggatttccagtttcagcagatccacgggcataagagctccaccgtgccttttttgctgggacccgtcagtaaagtacctagctccctgtcgcaggagcagagtgagcaggacgccatctaccaaaacctcacgcagctcaaggccgccgtcggcgagctgtccgaaaagtctaagctgcaggagatttatcaggaactgacacagctgaaggcagcggtgggcgaattgcccgaaaagtcaaagcttcaggaaatctaccaggagttaacaaggctgaaggcagctgtaggcgagcttcccgaaaagtcaaagttgcaggagatttaccaggagctgacaagactcaaggccgcagttggagagttgccagaaaagtccaaattgcaggagatctaccaagaactcaccgagttgaaggcagccgtgggtgagttacctgagaaatctaaattgcaagagatctaccaggagctgacccaacttaaagctgcagtggaacgcctctgtcggcactgccctaaggattggaccttcttccaaggaaattgctactttatgtcaaacagtcagcggaactggcacgattccgtgacagcctgccaggaagttcgcgctcagctggtggtcatcaagacagctgaggagcagaatttcctgcagcttcaaacatcccggagtaataggttctcttggatggggctgtctgatcttaaccaagaagggacatggcagtgggtggatggcagcccactgagtccatcattccaaaggtactggaattctggagaacctaacaattctggtaatgaggattgtgcagagtttagcgggtccggatggaacgacaatcggtgtgatgttgacaattactggatctgcaaaaagcctgccgcgtgttttcgcgatgagtag

SEQ ID NO: 184090 - DNA, 1164 bp, synthetic construct
  misc_feature 1..1164: note = Description of Artificial Sequence: Synthetic coding sequence
  source 1..1164: mol_type = other DNA
atgagcgacagcaaggagccccgggtgcagcagctgggcctgctggaggaggaccctacaacaaattttcagttccagcaaatccacggtcacaagtctagcactgggtgccttggtcacggcgcacttgtgctccagctgctgagcttcatgctcctcgctggcgtacttcctcgcctgagtaaggtcccatcatccttaagccaggaacaatcagagcaggatgctatttatcagaatcttacacaactaaaagccgccgttggcgagctaagcgaaaaatcaaaactgcaggaaatctaccaggagctcactcagctcaaagcggccgtgggagagctccctgagaagtccaaactgcaagagatataccaagaactaaccagactcaaggccgccgtgggggagctgcccgagaagagcaagctgcaggagatctatcaggagctgacaagactaaaggcggcagtgggcgaacttcccgaaaagtcaaagctgcaagagatctaccaggaactaacaagactcaaagccgccgtgggagaactgcccgaaaaatcaaagctgcaggaaatttatcaagagctgactgagctgaaggctgctgttggggagctgcccgaaaaatccaaactgcaagaaatttatcaggagttgacccaactgaaagcagccgtgggggagttacccgaccagagcaagcaacagcagatctaccaggaactcaccgacttgaaaacagccttcgagcgtctttgccggcactgtcccaaggactggacattctttcagggcaactgttacttcatgagcaattcccagagaaactggcacgactcggtgaccgcctgccaagaggtgcgcgcgcaactcgtggtgattaagaccgccgaggagcagaacttcttgcagttgcagacttcccggtcaaacagattctcatggatggggttgtcagacttaaaccaggaaggcacatggcagtgggtagacggaagccccctgtccccctcgtttcagcggtattggaattccggggagcccaacaatagcggaaatgaggactgcgccgaattctccgggtctggatggaatgacaaccgctgtgatgtagacaattattggatctgtaagaaacccgccgcatgcttcagggatgaatag

SEQ ID NO: 184091 - DNA, 567 bp, synthetic construct
  misc_feature 1..567: note = Description of Artificial Sequence: Synthetic coding sequence
  source 1..567: mol_type = other DNA
atgaactggcacatgatcatcagcggcctgatcgtggtggtgctgaaggttgtgggcatgacgctgttcctgctgtatttcccccaaatttttaataagtcaaatgacgggttcactaccacgagatcttatggaaccgtgtcccagatcttcggatcatcctcgccatctcccaacggctttattactaccagatcatacggtactgtgtgtccaaaggattgggagttttatcaggcaaggtgctttttcctgagcacctcggaaagctcctggaacgagagtcgtgatttttgcaaggggaaaggaagcacactggccatcgtgaacactcccgagaaactgaaatttctgcaagatattaccgacgccgaaaagtactttataggactgatttaccatcgcgaagaaaaacggtggaggtggattaataactcagtcttcaatgggaacgtgaccaaccagaatcagaacttcaactgcgccacgataggactcacaaagacttttgatgccgctagttgcgatataagctaccgccgcatttgcgaaaaaaatgctaaatag

SEQ ID NO: 184092 - DNA, 630 bp, synthetic construct
  misc_feature 1..630: note = Description of Artificial Sequence: Synthetic coding sequence
  source 1..630: mol_type = other DNA
atgatgcaggagcagcagccccagagcaccgagaagcggggctggctgtcccttaggctctggagtgttgccggcattagcattgcactgcttagcgcctgctttattgttagctgtgtggtcacttatcatttcacctatggggaaacggggaaaaggctctctgagctccactcttatcactcctcactgacttgcttcagcgagggaactaaggtcccagcatgggggtgttgtcccgcctcctggaagtcttttgggtcctcctgctacttcatcagcagcgaggagaaggtgtggtcgaagtctgagcagaattgcgtggagatgggcgcccatctcgttgtgttcaacaccgaagcagagcagaatttcatcgtgcagcaattgaatgaatcattttcttactttcttggcctgtcagatcctcaggggaataataattggcagtggattgacaaaacaccgtacgaaaaaaacgtgcgcttctggcatcttggcgaaccaaatcactcagccgaacagtgtgcctccatagtcttttggaaacccactggctggggctggaatgacgtgatttgtgagactcgccggaacagtatctgtgagatgaacaaaatttacctgtag

SEQ ID NO: 184093 - DNA, 432 bp, synthetic construct
  misc_feature 1..432: note = Description of Artificial Sequence: Synthetic coding sequence
  source 1..432: mol_type = other DNA
atggagtaccaccccgacctggagaacctggacgaggacggctacacccaactacattttgatagtcagagcaatactagaattgccgtggtgtcagagaaagggtcctgcgctgctagcccgccttggaggttgatcgctgtgattctgggcatactctgcctggtaatcctggttatagctgtcgtgttagggaccatgggcgtgctttcgtctccgtgcccgcctaattggattatatacgagaagagctgctatctgttttccatgtccttgaattcctgggatgggtcaaagcggcagtgttggcagctgggttctaatctgttgaagattgatagctccaacgagctgatctcagatcagaatcactcttatcctcgcaagccaatttccaagctgtgcatggattctcgtgtctcacacctctag

SEQ ID NO: 184094 - DNA, 744 bp, synthetic construct
  misc_feature 1..744: note = Description of Artificial Sequence: Synthetic coding sequence
  source 1..744: mol_type = other DNA
atggagtaccaccccgacctggagaacctggacgaggacggctacactcagcttcatttcgactcacaatcaaatacgaggattgccgtcgtttcagaaaagggtagttgcgctgcgagccctccttggaggctcatcgctgtgattcttggcatcttatgtttggttattctggtgattgcggtcgtgctcggaacaatggccatctggagaagcaactctggctcgaatacactggaaaatgggtacttcctttcccggaacaaggaaaaccatagccagcccactcagagctcacttgaggactccgtgactccaacaaaggcagtcaaaaccaccggagtcctgtcgagcccttgtccacccaattggatcatctatgagaaaagctgttacctttttagtatgagtctcaacagttgggatgggagcaagagacagtgctggcagctggggagtaacctcctgaagatagatagcagcaacgagctgggctttattgtcaagcaggtgtcatcccaacccgataactctttctggatcgggctgtctcggccacagaccgaagttccttggttatgggaggacggaagtaccttttccagcaatctgtttcagatccgcaccacagcaacccaggagaatccctccccgaattgcgtctggatacacgtatctgtgatctatgatcaactgtgttcagtccccagctactcgatctgcgaaaagaaattttccatgtag

SEQ ID NO: 184095 - DNA, 234 bp, synthetic construct
  misc_feature 1..234: note = Description of Artificial Sequence: Synthetic coding sequence
  source 1..234: mol_type = other DNA
atggagtaccaccccgacctggagaacctggacgaggacggctacacccagctgcattttgattcccagtccaatacccgaatcgccgtggtaagcgagaaggggtcctgtgctgcgagccccccgtggaggctgatagccgtgattctcgggattttgtgcctggtaattctcgtgattgccgttgtcttaggcaccatggccggttttaaggctgttgaattcaaagggtag

SEQ ID NO: 184096 - DNA, 606 bp, synthetic construct
  misc_feature 1..606: note = Description of Artificial Sequence: Synthetic coding sequence
  source 1..606: mol_type = other DNA
atggagtaccaccccgacctggagaacctggacgaggacggctacactcagttgcatttcgacagccagtctaacaccaggatagcagtagtgtcggagaaaggcagctgtgcggcatcccccccatggagactgattgctgtgatcttgggcattctgtgcctcgtgattctggttattgccgtcgtcctcggtaccatgggcgtcttaagttcaccgtgccctccaaattggatcatctacgagaaaagttgttatctattctctatgagtctcaacagctgggatgggtccaaacgccagtgttggcagctcggctccaacctgctcaagatagactcatcaaacgagctgggcttcatcgtcaagcaggtgtcgagtcagccagacaattccttttggattggactatctcggccccagacagaggtcccgtggctatgggaggacggcagtacattttcttccaacctattccagattcgcaccacggccacgcaggaaaatccatcacccaactgtgtatggattcacgtatccgtcatctacgatcagctctgttcagtgccatcctatagcatctgtgagaaaaagttctccatgtag

SEQ ID NO: 184097 - DNA, 507 bp, synthetic construct
  misc_feature 1..507: note = Description of Artificial Sequence: Synthetic coding sequence
  source 1..507: mol_type = other DNA
atggagtaccaccccgacctggagaacctggacgaggacggctacacgcagctgcacttcgacagccagagcaacacccgcatcgcagtggtgagtgaaaagggggtgctctcaagtccctgtccgcctaactggattatttatgagaaatcatgttacctcttttctatgtccctcaattcgtgggatgggtcgaagcggcaatgctggcagctgggctcaaatttgctcaagattgactcttccaacgagctgggcttcatcgtcaaacaggtaagttcccaacccgataattcattctggatcggcctatctaggccccagacagaggttccatggctgtgggaagacggatcgactttttcttctaacctttttcagattcggacaaccgccacccaagaaaacccttctcccaactgcgtgtggatccacgtcagcgtgatctacgatcagctatgctccgtcccaagctacagtatttgcgaaaaaaaattctctatgtag

SEQ ID NO: 184098 - DNA, 351 bp, synthetic construct
  misc_feature 1..351: note = Description of Artificial Sequence: Synthetic coding sequence
  source 1..351: mol_type = other DNA
atggagtaccaccccgacctggagaacctggacgaggacggctacacgcaacttcattttgattctcaatcgaatacgagaatcgcagtcgtgtcagaaaaagggagctgcgccgcatcacctccatggcggttgattgctgttatcctggggatcctgtgcctggtgatcttagtgatcgctgtcgtcctgggtacgatgggcacgggccagttcctcaaggacttgtcattcctcaataaccgtcggaagctgttcggcgatcccatacaggaagctacacattggcgcatggcaacattttatcaggaaattaaaagaacaacagttaatccacataatcacctgtag

SEQ ID NO: 184099 - DNA, 744 bp, synthetic construct
  misc_feature 1..744: note = Description of Artificial Sequence: Synthetic coding sequence
  source 1..744: mol_type = other DNA
atggagtaccaccccgacctggagaacctggacgaggacggctacacacagctacattttgatagccaatcaaataccagaattgctgtggtttcagaaaaagggtcctgcgcagcatcccctccctggcgccttatcgccgtgattctcgggattctgtgccttgtgatcctcgtgatcgccgtagttctgggcacgatggcaatttggaggtctaactccggatctaataccctcgagaatggctactttttgtcaaggaataaggagaaccactctcagccaacacaaagctcattggaagacagcgtgacacctaccaaagcagtcaagaccacgggagtcctcagctccccatgcccccccaactggatcatctatgagaagtcctgttacctcttcagcatgtccctgaattcttgggatggaagtaagcggcagtgttggcaactgggcagtaatctcctcaaaattgatagtagcaatgaactgggttttatcgtgaagcaagtctcctctcagccggacaactccttttggattggcctgtctcgcccccagactgaggtcccttggttatgggaggacgggtctacattttcttcaaacctatttcagatcaggacaacagccacccaggagaatccctcacccaactgcgtctggattcatgtatccgtgatttatgaccagctttgtagtgtgccaagctattctatctgtgaaaagaaatttagcatgtag

SEQ ID NO: 184100 - DNA, 570 bp, synthetic construct
  misc_feature 1..570: note = Description of Artificial Sequence: Synthetic coding sequence
  source 1..570: mol_type = other DNA
atggagtaccaccccgacctggagaacctggacgaggacggctacactcaactacatttcgattcacaatctaacactcggattgccgttgtaagtgagaaggggagttgtgctgccagcccaccgtggagacttattgccgtgatactgggtattctgtgcttggtaatacttgttattgccgttgtgctaggcacaatggctatttggcggtcgaacagcggaagtaatacactcgagaacggctattttctttcccgaaacaaggaaaatcatagccaacccacccagagcagtctggaggatagtgtgactccaactaaggctgttaagactacaggcgtgttgtcttcaccttgcccgcccaactggattatctacgagaagtcctgctacctgttcagcatgtccctgaattcatgggacgggagcaagcgccagtgttggcagctaggaagtaacttgctcaagatagactctagtaacgagttaatttctgatcagaaccactcttatcctaggaagccaattagcaagctctgcatggacagtcgggtgagccacctttag

SEQ ID NO: 184101 - DNA, 10281 bp, synthetic construct
  misc_feature 1..10281: note = Description of Artificial Sequence: Synthetic coding sequence
  source 1..10281: mol_type = other DNA
gtgctgcccagccacacctgcggcaaccccggcgagatcctgaagggcgtactacacggaacccgctttaatataggcgacaagatcaggtattcttgccttcctggctacatcctggagggccacgccattttgacttgcattgtgtctcccggcaacggtgccagttgggattttccggcgcctttctgccgagcagagggggcctgcggcgggacactcagagggactagcagtagtatcagttctccccactttcccagcgaatacgagaataacgccgattgtacatggacgattctcgctgaacctggagacaccatcgctttagtattcacagactttcagcttgaggagggctacgattttttggaaattagtggtactgaagcaccttccatctggttgaccggaatgaaccttccctctcctgtcatcagttctaaaaattggctgcgcctgcatttcacctcggactccaatcacagacgtaagggctttaacgcccagttccaagttaagaaagcaatcgagctaaagtcccgtggtgtcaaaatgctgccatctaaggacggctctcataaaaactcagtgctgagtcagggaggggtcgccttggttagcgacatgtgtcctgaccccggtatcccagaaaacggaagaagagccgggagcgattttagcagggttggagcaaatgtgcagtttagctgtgaagacaactacgttctgcaagggtctaagagcatcacttgccagcgagtgacagaaacattggccgcctggtccgatcatcgccctatctgccgcgcccgtacatgcggctctaatctaagaggaccctccggcgtgattacctccccaaactaccccgtgcagtacgaagataacgctcattgcgtttgggtgatcacaactacagatccagacaaggtgattaaactcgccttcgaggaatttgaactggagaggggttatgatacactcactgtcggcgacgcagggaaagtgggcgatacaagatctgtcctctatgtgctgaccggcagctctgttccggaccttattgtcagcatgtcaaaccagatgtggctccacctgcagtcagatgactcaattggctcccctggtttcaaagcggtgtaccaggaaattgaaaagggaggctgtggagatccagggattccggcctatgggaagcgcaccggcagctcgttcctgcatggcgatacgctgacatttgaatgtccagcagcctttgaactagtgggtgagagagtgattacatgccagcaaaataaccagtggagcggtaataagccatcctgtgtgttcagctgcttctttaacttcaccgcttcatccggcattattctgagccctaattatccagaggaatacggaaataatatgaattgcgtctggcttatcatctcagaacccgggagcagaatccatctgatctttaacgactttgacgttgagccgcaattcgacttcctggccgttaaggatgatgggatcagtgacatcaccgtcctaggcacattctcaggcaacgaagtgccgtcacagctggccagctcgggacacatcgtcaggttagagttccaatctgaccattccaccacaggtcgcggatttaacatcacctatacaaccttcggccaaaatgagtgccatgaccccgggattcccataaatgggcggagatttggagacagatttcttctgggctccagtgtgtcttttcactgtgatgatggattcgtgaaaactcagggtagcgagagcattacatgcatcctccaagatgggaatgtagtttggagctccaccgtccctcggtgtgaagctccatgtggcggtcacctgaccgcttccagtggcgttatcttaccgccagggtggccgggctactacaaagattccctccactgcgaatggattattgaggccaagcctggtcactccattaagattacttttgaccgtttccagacagaggtgaattacgataccctggaggtccgagacggtccggcatcatcatcgccattgataggtgaatatcatgggactcaggccccccagttcctgattagcacaggaaactttatgtacctgctgtttacaacagacaattcccgatccagtattggctttctgatccactacgagagcgtgacactggagtctgactcgtgtctggaccccggtatccctgtgaatggccatagacacggaggcgatttcggcatacgctccacagtcaccttctcatgcgaccccggatatacactctcagatgacgagcctctggtgtgtgaacggaatcatcagtggaaccacgctctgcccagctgtgatgccttgtgcggcggctacatacagggcaagtctgggaccgtactctcaccaggctttccagacttctacccaaactcactgaactgtacatggacaattgaggtatcccacggcaaaggtgttcaaatgatctttcacacttttcatctggagtccagccacgattacctgcttattacggaggatgggtctttcagcgagcccgtggcacggctcacaggctcagtgttacctcacactattaaggccggactgtttggaaattttacagcccagctcaggttcatctcagactttagcatatcatacgaaggtttcaacatcacattctccgagtacgatttagagccatgtgacgaccccggagtccccgcattctcaagacggatcggcttccactttggcgtcggcgacagcctgaccttttcatgtttcttgggctaccgactggaaggggctacgaagctgacctgtttagggggaggcaggcgagtctggagcgcacctttgccgcgttgtgtggctgaatgtggagcctcagttaaggggaatgagggaaccctgctcagtccaaacttcccatccaattacgacaacaaccacgaatgcatctacaagatcgagaccgaggctggcaaagggattcacctgcggacgaggtccttccagctttttgagggggatacactgaaagtgtatgacggcaaagattcaagctctaggccactgggcacctttacgaaaaacgaactgttaggtctgatactcaactctacaagcaatcacctgtggctggaattcaacacaaatggttctgatacggatcagggatttcaactgacctatacaagcttcgatctggtcaagtgcgaggatccaggcatcccaaactatggctaccggataagggatgagggtcattttactgatacagtggttctgtacagctgcaacccaggctacgccatgcacggatcaaatactctcacatgtttaagcggggatcgtagagtatgggacaagccgcttccgtcatgcatcgcggagtgcggagggcagattcatgccgccacatcaggccgcattctgagcccaggctatcctgccccttatgacaataaccttcattgcacctggatcattgaagccgacccaggaaagaccatcagtctacactttattgtgttcgacacagaaatggcccatgacatactcaaagtgtgggatggtccagtcgacagcgacatacttctgaaggagtggtcgggcagcgccctgccagaagacatccactctactttcaatagtctgaccctccagtttgattccgacttcttcatctccaaatctggcttttccatccagttcagcacgtctatcgctgccacatgtaacgacccgggaatgccacagaatggtactcgctacggggatagtagggaggcgggagatacagtcactttccaatgcgaccctggctatcagttgcaaggtcaggcaaaaattacttgcgtgcagctgaacaaccgctttttttggcaaccggacccgccaacttgcatcgctgcttgcggcggcaatctcacaggacccgccggcgttattctttcccctaactatcctcagccgtaccctcctgggaaggaatgcgactggcgagtgaaagtaaacccagacttcgtcattgcactgatctttaaaagtttcaacatggaaccgagttacgacttcctgcatatatacgaaggagaagacagtaactcgcctctcattgggtcataccaaggatctcaggcccccgaacgtatcgaaagctctgggaactcactatttctggcatttaggagcgatgcttctgtgggattatctggtttcgccatcgagttcaaagaaaaaccaagggaagcctgtttcgatcctgggaatatcatgaacggcacaagggtggggacggattttaagcttggaagcactatcacgtaccagtgtgactccgggtacaagatccttgacccatccagcatcacctgcgtgatcggggccgatggtaaaccctcctgggaccaagttcttccctcgtgcaacgcaccctgcggagggcagtataccggatccgagggtgtggtgctctcaccaaactatccacataattacacagctggacagatttgcttatatagtatcactgtccccaaggaattcgtagtcttcgggcagttcgcgtattttcaaacagcacttaacgatttggcagaactttttgacgggacgcatgcccaagctagactcctgagctctctaagtggatcccactcaggggagacgttgcccctggccacatccaatcagattctgttacgattctccgcaaaatctggtgcatccgcccgcggcttccactttgtgtatcaggccgtgccacgtacaagtgatacgcaatgctctagcgtcccggaacctagatatgggcggcggatcggatccgagtttagtgccgggtcgattgtgcgttttgagtgcaacccaggctatctcctgcagggatctaccgccctacactgtcagtcagtgcctaacgctctcgctcagtggaacgacacaatcccatcttgtgtggttccttgctccgggaactttacccaaaggcgggggaccattctgtcaccagggtaccccgagccctatggcaacaatctcaactgcatttggaaaataattgtaaccgaaggaagcgggattcaggacccctccgatcagttctgtcacggggcagaactcggtctggagatccacgatggaggagatgtcacagctcccagactgggttccttttctggtaccaccgtgccggctcttcttaatagtactagtaatcagttgtatttgcattttcagtcagatatctcagttgctgcagccgggtttcacctggagtataagaccgtgggtctggcggcctgtcaagagccagcattaccatctaacagtatcaaaataggtgacagatacatggtcaatgatgtactgagcttccagtgtgaacccggctataccttgcagggtcggagtcacatctcatgtatgcccggcactgttaggcgctggaactatccatcacctttgtgcatcgctacttgcggcgggactctgagcactctgggtggcgtcatcctaagccctggtttccctggatcctatcccaacaaccttgactgtacgtggcgcatcagtcttcctatcgggtacggcgcccatatccagttcctcaatttctcgactgaagctaatcatgatttcttggaaatccaaaatggtccatatcatacctcgccgatgatcgggcagttctcaggcactgatctcccagcggctctgctgagcacaactcatgagacacttattcacttctattcagatcattcacagaacaggcaagggttcaagctcgcctaccaggcatatgaacttcagaattgccccgacccaccccctttccagaatgggtacatgatcaactctgattactctgtcggacagagcgtctccttcgagtgctaccccggctatatcctgattggtcaccccgtactgacatgtcagcacggtatcaatagaaattggaactatccctttcccaggtgcgatgcaccatgcgggtacaatgtgacttcacagaacggcacaatttatagtccagggtttccagatgaatacccaattctgaaggattgcatttggctgatcactgtgccccccggccatggggtgtatatcaattttacactgctgcagacagaagccgtgaatgattatatcgctgtgtgggacggcccagatcagaactcacctcagctgggcgtattttcagggaatacagccttggaaaccgcttattcaagtacgaatcaggtccttttaaagtttcattcagatttttccaacggaggcttttttgtgttgaattttcatgccttccagctaaaaaaatgtcagccgccacccgcggtgccccaggcagaaatgctgacagaggatgacgattttgagatcggcgatttcgtcaagtatcaatgccatccaggatacacccttgtcgggaccgacatcctcacttgcaagctaagcagccagctgcagtttgagggatcgctgcctacctgcgaggcacagtgtccagcaaacgaagtgcgaaccggatcttcaggagtgattctgagccctgggtatcccggaaattatttcaactcccagacctgctcatggagtattaaagtcgaacccaattataacattacaatttttgtggataccttccagtcagagaaacagttcgacgcattggaggttttcgatggctcctcagggcagagtccgctcttggtggtgctgtctggaaaccatactgagcagagtaacttcactagcaggtcaaatcagctgtacctgagatggagcactgatcacgcaaccagtaaaaagggtttcaagatcaggtacgccgctccttactgctcactgacccaccctctcaaaaatgggggcatattaaaccggacagctggtgccgtcggatcaaaagtgcactatttttgtaaacctggataccgcatggtgggccatagcaacgccacctgccgccgcaacccacttggaatgtatcaatgggactccctgacccccctgtgtcaggccgtctcatgcgggatccccgagtctcctggaaacgggtcctttaccggtaacgaatttactctggacagcaaagtggtgtacgaatgtcacgaggggttcaaactggagtcttcacagcaggcgacagcagtgtgtcaagaggatggtctgtggtcaaataaggggaagccacctacctgtaaaccagtggcgtgcccttctatagaagcccagctgtccgagcacgtgatttggaggctagtttctggtagcctaaacgaatatggcgcccaggtcctcctgagctgtagcccaggctactacctcgaaggttggcgcctcttgaggtgccaagccaatggcacctggaatatcggggacgaacggcctagttgtcgcgtcatctcttgtggctctctgagcttccctcccaacggcaataaaatcggcactctgactgtgtatggggccactgccatatttacctgtaataccggttacacactcgtgggcagccacgtaagagagtgtctggctaatggcctatggagcgggtctgaaacaaggtgtctggcaggccactgtggctcacccgacccaatagttaacggtcacatttccggcgacggattctcatatagagatactgtggtgtatcagtgcaacccgggcttccgcctcgttggcacctccgttaggatctgcctgcaagatcataaatggtcgggtcaaacccctgtgtgcgttcccatcacctgcgggcaccccggaaatccagcccacggattcacaaacggctccgagtttaatctgaacgacgtggttaacttcacatgcaatacgggttatctcctccagggagtgtctcgagcccagtgtcgttcgaacggccaatggtcctctccccttcctacctgtagagtggttaattgctccgatcccggtttcgtagagaacgcaattcggcacggtcagcagaacttccccgaaagctttgaatacggcatgagcatcctataccactgcaaaaaagggttctacctcctcgggtccagcgccttgacttgtatggctaatggcctatgggacagatctctgcccaagtgtctggctatttcttgtgggcatcccggtgtgcctgccaatgccgtcttgactggggagttgttcacttatggcgccgttgtgcattactcctgcagaggcagtgagtctctcataggtaacgatacaagagtctgccaggaggattcgcactggagcggagctttgccgcattgcacagggaacaacccaggattttgcggggaccccggaacaccagctcatggctcccgcctcggggacgactttaagactaaatcattattgcgcttttcctgcgagatgggccaccagcttcgcgggtctcccgagcggacctgcttactgaatggatcctggagtgggctgcagcccgtttgtgaagctgttagctgcggcaaccccgggactcccaccaacgggatgattgtctcgtcagacggcattctgttctctagcagcgtgatttatgcatgttgggagggctacaagacatcgggtctgatgacaaggcattgcacagccaatgggacatggaccggtaccgctcccgattgcaccataatcagctgcggggacccgggaactttagcaaacggaatccagttcgggaccgactttacctttaataaaaccgtgagctatcaatgcaatcctggttatgttatggaagcagtgaccagtgcaacgatccgttgtactaaagacggacggtggaacccaagcaagcctgtttgcaaagccgttttatgcccacagccacccccagtgcaaaacggcacagtagaaggatccgactttcggtggggatcttctatttcttatagctgcatggatggttatcagctgtcccattccgcaattctaagttgcgaaggaagaggggtgtggaagggcgagatacctcaatgcctaccagtgttttgtggtgaccctgggataccagccgaggggcggctgtctggcaagagttttacgtataaatcagaagttttcttccagtgtaaaagccccttcatcctcgtcggctccagtcgtagagtttgccaggctgacggtacatggtccggcatccagccaacatgcattgatcctgcccacaacacgtgtcccgatccagggactccccattttggcatccaaaactcctctcgggggtatgaagtcggatcaaccgtgtttttccggtgcaggaaggggtaccacattcaaggaagcaccactcgcacatgtttagctaacctgacttggtcaggtatccagaccgaatgtattccccatgcgtgccgccagccagagaccccagcccacgcagacgtgcgcgcaatcgacctgcctacattcggctatacacttgtgtacacctgtcatccaggtttctttctcgccggcggatctgaacatagaacatgcaaagcagacatgaagtggaccgggaaatctccagtgtgtaaatcgaaaggcgttcgtgaggtgaacgaaactgttacgaagacacccgtcccttcagacgtgttcttcgtaaactctctctggaaggggtattacgagtacctgggcaaaaggcagcctgccacgttaaccgtggactggtttaacgccaccagtagtaaagtgaacgccacatttagtgaggcctctcctgtggaactgaaattaacaggcatttacaaaaaggaggaggcccatctcctactcaaggctttccagattaagggacaagctgacatatttgtgtcaaagttcgaaaatgacaactggggattggatggctacgtgtctagtgggctcgagcgtgggggcttcacttttcagggagacatacacggcaaagacttcgggaagtttaagttagagcggcaggacccactaaatcctgaccaggactccagctcccactaccacgggacatcttccggaagcgtagccgcggctattctcgtgcctttcttcgccctgatcctctcaggtttcgcattttatctgtataagcaccgtacccggccgaaagtccagtataatggatacgcgggccacgaaaacagtaatggacaggcatctttcgagaaccccatgtacgacacaaacctgaaacccacagaagccaaagccgtccggtttgataccacattaaacacagtctgtactgttgtctag

SEQ ID NO: 184102 - DNA, 10167 bp, synthetic construct
  misc_feature 1..10167: note = Description of Artificial Sequence: Synthetic coding sequence
  source 1..10167: mol_type = other DNA
atgaccgcctggcggcggttccagagcctgctgctgctgctgggcctgctggtactgtgtgctcggctcttgactgccgctaaaggccagaattgcggtgggctggtacagggacccaacggcacaattgagtccccaggcttcccacacggttacccaaattacgccaactgtacctggatcatcatcaccggagagcggaacagaatccagctctcctttcacaccttcgccctcgaagaggacttcgatattctgagcgtttacgacgggcagcctcagcagggtaaccttaaagtcagactcagtggcttccagctgcccagtagcatagtatccacaggaagcatattgaccctgtggttcaccactgattttgctgtgagcgcccaggggttcaaagccctgtacgaggtactgccttctcatacctgtggaaacccgggtgagatactgaagggtgtgctccacgggacaagattcaacattggcgataagattaggtactcgtgtctgccgggttatattctcgaggggcacgccatacttacctgtattgtgagccccggcaacggtgcttcctgggattttccggcgcctttttgccgcgctgagggcgcctgcggaggcaccctgcgaggaacaagctcatcaatttcaagtccccactttccctcagaatacgagaacaacgcagactgcacatggaccatccttgctgagccaggggacaccattgcacttgtttttacggacttccaattagaagagggatacgatttccttgagattagtggaacagaggccccaagtatttggctaaccgggatgaatcttccttcgcccgtaatctctagcaagaattggttaagattgcattttacttctgactccaatcatcgccggaaaggtttcaacgctcagtttcaggtgaaaaaagccatcgagctcaaatctcgcggggtgaaaatgctgccttccaaggacgggagccataaaaatagcgtattgtcgcagggaggcgtcgctctggtatccgatatgtgtccagatcccggaattccagagaatggccgtcgtgccggaagtgatttcagtcgcgtcggagctaatgtgcagttctcatgcgaggataattatgtcctgcagggctccaagtcaattacatgtcagcgcgtcactgagactctggccgcttggtccgaccatagaccaatttgccgggcaagaacatgtggctcaaatctgagaggaccctcaggagtaattaccagccccaattaccctgtgcaatacgaagataacgcccattgtgtctgggtaattaccaccacagaccctgacaaggttatcaagctggctttcgaagaatttgagctggagcggggctacgatacactgaccgttggagatgccggtaaagtcggcgacacaagatcagtcctgtacgtgctgacaggatcttcagtccctgatcttatcgtgtctatgtccaaccaaatgtggctccacctgcagagcgacgactccatcggaagtccagggtttaaggccgtctaccaggagatcgagaaggggggttgcggcgacccagggatccctgcctatgggaagaggaccggcagctccttcctgcacggggatacactcacctttgaatgcccagctgcgttcgaactagtcggtgaaagagttattacgtgccaacagaacaaccagtggtccggaaacaagccatcttgcgtgttctcatgcttttttaacttcactgccagtagcggaatcattctgtccccgaattacccagaggaatatggaaacaacatgaattgtgtatggttgattatttctgaacccggaagccggattcatttgatctttaacgactttgacgtggaaccacaattcgattttctcgcggtcaaggatgacggcatatcagacatcaccgtgctgggtaccttttctggtaatgaagtgccgtcccaactcgcctcctcaggacatattgttcgactggagtttcagtcagaccattccactaccggtcggggcttcaacattacctatacaactttcggacaaaatgaatgccatgatcccggtattccaattaacggccgccggtttggggataggttcctcctgggctccagtgtgagctttcactgcgatgacggcttcgttaagacccaggggtccgaatccattacttgcattctacaagacggaaacgtggtttggtctagtacagttcccaggtgtgaggctccatgcgggggccacctgacagctagcagtggggtcatcttgcctcccggctggcccgggtactacaaagattctctacactgtgagtggattattgaagccaaacccggccacagcataaaaattactttcgacagattccagactgaggtgaattacgacactctggaggtaagggacggccccgcgtccagctctcctcttatcggcgagtaccacgggacacaggccccccagttcttaatttccacaggcaacttcatgtatctgctgtttactactgacaactctaggtcatctatcggatttctgatccactatgagtctgtgacgctggaaagcgactcttgtttggatcccggcataccagtgaatggccaccgacacggaggtgacttcggaatccgaagcacagtgaccttttcttgtgaccccgggtatacgctgagcgatgacgaacctctcgtctgtgaacgaaatcatcagtggaatcacgctctacccagctgcgatgccttgtgtggcggatatatacaagggaagtctggcaccgtgctatccccgggcttcccagacttctatccaaattcgctcaactgcacttggaccatcgaagtatctcatggaaaaggagtgcaaatgatttttcataccttccacctggaatctagccacgattacctgctgatcaccgaggacggatccttcagcgagcccgtggcccgtctgactgggtcggtgctaccacacactattaaagctgggttatttggcaactttacggcccagcttcggttcattagcgattttagcatatcctatgagggatttaatatcaccttcagcgagtacgacctggaaccctgtgacgatccaggcgtaccagccttcagccgccggatcggatttcacttcggggtcggtgattccctcaccttttcatgtttcttgggctaccgtcttgagggagcaactaaactcacatgtttagggggcggacgccgcgtctggtcggctcctttgccaaggtgtgtggcggaatgcggtgccagcgttaaggggaacgaaggaaccctgctttccccaaatttcccctcaaattacgacaacaaccacgagtgcatctataagatcgaaaccgaggccggcaaaggcattcatctccgaacccgctccttccaattatttgagggtgatacactgaaagtttatgacgggaaggatagtagcagcagacccttgggcacttttacaaaaaatgagctgctggggctgatactcaatagtaccagcaatcacctttggcttgagtttaacactaatgggagcgacacagaccaagggttccaactcacatacacgtccttcgatttggtgaagtgcgaggaccctggaatccccaattatggataccgcatacgcgatgaaggacactttactgatacagtggttttatattcatgcaatcccggatatgcaatgcacgggtctaatactttgacttgcctctctggggatagaagagtttgggacaaacccttacctagttgtattgccgaatgcggcggacagattcatgcagcaaccagcgggagaatcctgagtccaggatatccagccccttacgacaacaatctccactgcacctggatcatcgaagccgatccaggcaagacgatttctttgcatttcatagtgttcgatacagaaatggcacatgatattctcaaagtgtgggacggccctgtggattcagatatcctactcaaagagtggagcggatctgctctgcctgaggacatccattcaacctttaatagcctcacccttcaattcgacagtgatttttttatcagcaaaagcggtttctcgattcaattcagcacctctattgccgcaacttgtaacgacccagggatgcctcagaacggcacaagatatggagattctagagaagcaggcgacacagtgacgtttcagtgcgaccccgggtatcagctgcagggacaagctaaaatcacctgtgtgcagctgaataacagattcttctggcagcctgacccacctacttgcattgctgcttgtggcggtaatctgacgggccctgctggtgtgattttgtctccgaactatccacaaccgtatcctcccggaaaagaatgtgactggcgggttaaggtgaatcccgacttcgtcattgccctgattttcaaaagctttaacatggaaccaagttacgattttctacatatatacgagggggaagacagtaattccccgcttatcggcagctatcagggttcccaagcaccagagcgcatcgagtctagtggcaacagtttgtttctggccttcaggtcggatgcctctgtgggcctgagtggctttgccatagaattcaaagaaaaacccagggaagcatgcttcgatcccgggaacatcatgaacgggacacgggtaggcactgacttcaagttagggtccacaattacataccagtgcgactctggctataaaatcctagacccttcctctattacatgtgtgatcggggccgacggaaagccctcttgggaccaggttctgccttcatgcaacgcaccatgtggtggtcagtatactggctctgaaggcgtggtgttatctccaaactacccccacaactataccgcgggacagatctgcctgtattcaattaccgttcctaaagaatttgtcgtgtttggacaattcgcatatttccagaccgcactgaatgatctagccgagctgttcgatggcacccacgcccaggcaaggctgctcagttccctgagtggctcacatagcggggaaacactaccactggcgactagtaaccagattcttctacgtttctctgcaaaatccggtgcgtccgctaggggcttccatttcgtataccaggccgtacctcggactagtgacacacagtgcagttccgtccctgagcctagatacggaagacgtatcggatccgagttttctgctggatctatagtgcgctttgagtgtaaccctggctacctcctgcaaggatctacagccttgcattgtcagtccgtgcccaacgcactggcccaatggaacgacaccatcccctcttgtgtcgtcccttgtagcggcaattttacacagcggcggggtacaatcctgagccccggctaccccgaaccttacgggaacaacctgaactgcatctggaaaataatcgtcactgaaggatccgggatccaaattcaagtcattagcttcgccacagagcaaaattgggattctctggagattcatgacgggggtgatgttacagccccacggctcggcagtttttcgggcaccaccgtgcccgccctactcaactcgacctccaaccagctgtacctgcacttccagagcgatatctcggtggctgccgccggtttccacttggaatataagacggtgggcctcgccgcatgccaggaaccggccctgccttccaactcaatcaagattggagatcgctacatggtgaatgatgttctttcatttcagtgtgaacctgggtataccctgcagggccgctcccacatctcgtgtatgcctggcactgtaaggaggtggaactacccttctccactatgcatcgccacctgcggcggaacgctgtcaactctggggggcgtcatactatcaccaggatttcccgggtcctaccccaataacctggactgcacctggcggatatctttgccaattggatatggggcccatatccagtttctgaacttctccacagaagcgaaccacgactttctggaaatccagaatggaccctatcacacttctcccatgattggtcagtttagcgggaccgacctgcctgccgctctgttgagcaccacgcatgagacactgattcatttttatagtgaccattctcagaatcggcaaggatttaagttggcataccaggcctacgaactccaaaattgtccagacccgccccccttccagaacgggtatatgattaattccgattactccgtgggccagtctgtctccttcgagtgttacccaggatacatcctcataggccacccagttctgacctgtcagcatggaattaaccggaattggaactaccccttccctcggtgtgacgctccgtgtggctataacgttactagtcaaaatggcacaatttactcaccaggtttcccagatgagtatcctatactgaaagactgcatttggttaattaccgttccgcctggccacggcgtctatatcaactttactcttctgcagacagaagcggtgaatgattacattgctgtgtgggatggcccagatcagaatagcccacagcttggcgtgtttagcggaaacacagccctggaaaccgcatactctagcacaaaccaggtcctgctgaagttccattcggatttctcaaacggtggcttcttcgtgctgaattttcatgcattccagttgaagaaatgtcagccccctcccgctgttccacaggctgagatgttgacggaggacgatgactttgaaatcggcgacttcgtcaagtatcagtgtcatcccggctacacgttagttggaaccgatatcctgacttgcaagctgtccagccaactgcagtttgaggggtccctccctacctgcgaagcccagtgtcccgccaacgaggttagaactgggagctctggggtcattctaagccccggctatcctggaaactattttaacagccagacatgtagctggtcaattaaagttgagcccaactataacattactattttcgtggacacattccaaagcgagaaacagttcgatgccttagaggttttcgacggttcaagcggccagtctcccctgttggtcgtcctgtccggcaaccacacagaacaatccaattttacttctcggtccaatcagctttacctcagatggagtaccgaccacgcaacctcgaagaaggggtttaaaatacggtacgccgccccctattgttctttgactcacccgctgaaaaacggggggattctaaaccgaaccgccggggctgtgggatcgaaggtacattatttctgtaaacccggataccgcatggttggacactctaatgccacgtgcaggcgtaaccctctgggtatgtaccagtgggatagcctgaccccactgtgccaggcagtctcatgtgggatcccagagtcaccagggaacggctcttttaccggcaacgagtttaccttggacagcaaagtggtgtatgagtgtcatgaggggttcaaattggagagctctcagcaggcgacagctgtgtgccaagaggacggtctgtggagcaacaaaggtaagccccctacctgcaagcccgttgcttgcccgtcaatcgaggcccaacttagtgagcacgtcatatggcggctagtgtccgggagcttaaatgaatatggagcacaggtactgctgtcctgcagccctgggtactaccttgaagggtggagattgctgcgctgccaggcgaacggaacgtggaatattggcgacgaaaggccctcctgccgtgcaggacattgcggttctcccgaccctatcgtgaatggccatatttccggagatgggttctcatatcgtgacactgtggtgtatcagtgtaatcctggcttccgacttgtaggcactagcgtgcggatctgtctacaggaccataaatggtctggtcagactccagtatgcgtgcctatcacctgcggccatcccgggaatcctgcacacggcttcacaaacgggagtgaattcaatcttaatgatgtggtcaattttacctgcaatactggatacctgctccaaggggtctctagggcccagtgccgctctaacggacaatggagttcacctctgcccacatgtagagtcgtgaactgctccgaccctgggttcgtggaaaatgcaattcgccatggacagcaaaactttcctgaaagctttgagtatggtatgtctattctgtaccactgcaagaaaggcttttatctcttgggtagtagtgctttaacttgcatggccaatggactgtgggatcgatcactgccaaagtgcttggcgatatcctgcggacaccctggagtacctgcaaatgccgttctgactggtgaacttttcacgtatggcgccgtggttcactattcttgcaggggatcagagtccctgatcggcaatgacactcgggtttgccaggaggactctcattggtcaggcgccctgcctcattgcactggcaataacccaggtttttgcggcgacccaggtaccccagcccacggaagcaggctcggtgacgacttcaaaaccaagagcttattgcggttttcttgcgaaatgggtcaccagctaagaggttcacctgagagaacatgcctgctaaatgggtcctggtccggtcttcagcccgtgtgcgaggcagtcctgtgcccccagccaccccccgttcaaaacgggaccgtggaaggcagcgatttcagatggggaagcagcatatcttactcatgtatggatgggtatcaactctcccacagtgctattctctcatgcgaaggacgtggtgtgtggaagggagagattcctcagtgccttcccgtcttttgtggggatccaggtatcccggcagagggcaggctttctgggaaaagctttacctataaaagcgaggtcttctttcaatgtaagagcccatttatcctggttggaagtagccgaagagtttgccaggctgacggcacatggtccgggatccagcccacttgtattgaccctgctcacaacacctgcccggacccaggaacaccccattttgggatccagaatagtagtcgggggtacgaagtgggctcgacagtgttctttaggtgtcgaaaagggtaccacatccaggggtccacgaccagaacatgccttgcaaatctcacctggtccggtatccagaccgagtgcatcccccacgcttgccggcagcccgagactccagcgcacgcagacgtgagggctattgacctgccaacctttgggtatactttggtctacacgtgccatccagggtttttccttgccggcggctcagagcaccgcacatgcaaagctgatatgaagtggactggcaaatctcctgtctgcaaaagcaaaggtgtgcgggaggtcaatgaaacagtaacaaagacgcccgtgcctagcgacgtgtttttcgtgaatagtctgtggaaaggatattatgaatatctaggtaagaggcagccagccacactcacagtcgactggttcaacgccactagttcaaaagtcaacgccacattttccgaggcaagtcctgtcgagctgaagctcacgggcatctacaagaaggaggaggctcacctcttgctcaaagctttccagattaaaggacaagccgacattttcgtgtcaaagttcgagaatgataactggggcctggatggatacgtaagttccggactggagagggggggctttacatttcagggcgacatacacggcaaagatttcgggaagtttaagttagaacgccaggacccgttaaaccctgaccaggactctagtagccattaccatggcacaagtagcgggtctgtggccgccgccatcctcgtacccttcttcgcgctgatccttagcggattcgcgttttacctgtataaacataggactcgtccaaaagtgcagtacaatggctatgccggccacgaaaattccaatggacaggcttccttcgagaaccccatgtacgacaccaacctgaaaccaactgaggccaaggctgtgcgtttcgacactacccttaacacagtgtgtactgtcgtgtag

SEQ ID NO: 184103 - DNA, 10698 bp, synthetic construct
  misc_feature 1..10698: note = Description of Artificial Sequence: Synthetic coding sequence
  source 1..10698: mol_type = other DNA
atgaccgcctggcggcggttccagagcctgctgctgctgctgggccttttggttttgtgtgcaagactactgaccgccgctaaaggtcaaaattgtggcggcctggtgcaaggccccaacggtaccatcgaatctcctggatttccccatggatatcctaattatgccaattgcacatggatcatcatcactggggagcgcaaccggatacagctgagctttcatactttcgctcttgaagaggactttgatattctttccgtctacgatggccagcctcagcaggggaatttgaaagtacgattgtctgggttccagcttccctcttctatcgtcagcaccggcagcatcctcacactctggtttacaacagattttgccgtatctgcccaggggttcaaggctttgtatgaagtcttgcccagccacacctgcggtaatcctggcgaaattctcaagggggtgctgcatggcacccggttcaatatcggcgataagataagatactcatgcctccccgggtacatattggagggtcacgctatccttacatgtatcgtctcaccaggaaacggcgctagttgggatttccctgcaccgttctgccgggcagaaggagcctgcggtggaaccctgaggggaacctcctcatccatctcatcacctcacttcccctctgaatatgagaacaatgcagactgtacatggactatactggccgagcccggggataccattgcactggtcttcaccgacttccaactggaggagggctacgatttcctggagatatcaggaacagaggcccctagtatctggctgacaggaatgaacctgccatcgcctgtgatttcgtccaagaactggctgcgacttcacttcacttctgatagtaaccatcggagaaagggatttaatgcccagtttcaggtgaagaaggccatcgagctcaagtccaggggcgtcaaaatgctgcctagtaaagacgggagtcacaaaaactctgtgctgagccaagggggcgtggccctggtcagcgatatgtgtcctgaccccggtattccagaaaatggccggagagccggcagtgatttcagcagggtcggagccaatgtgcaatttagttgcgaggacaattacgtcctgcaaggatctaagagtataacatgtcagagggtgactgagacacttgctgcctggagcgatcaccgcccaatctgccgcgcgcgaacctgtggctctaaccttcgcgggccttcaggcgtgattacttcgcctaactaccctgtgcaatacgaagataacgcacactgtgtttgggtgatcaccactaccgaccccgataaggtgattaaactggcattcgaggagtttgagctcgagcgcggatacgatactctgaccgtgggtgacgccggaaaggtcggtgacacaaggtccgtcctgtacgtgcttaccggatctagcgtgcccgacctgatagtctccatgtccaatcagatgtggctgcatctgcagagcgacgattccataggttcaccagggtttaaagccgtctaccaggagatagagaaaggaggctgtggtgacccaggtatccccgcttatggtaagagaactggctcatctttcctgcatggagacaccctgaccttcgaatgtcccgcggccttcgagctggttggtgaacgcgtgataacttgccagcagaacaaccagtggagtggaaataagcccagttgcgtattctcctgcttcttcaactttactgctagctcaggaattattctctctccaaactaccccgaggaatatgggaataatatgaattgtgtgtggcttatcatttctgaacccggatccagaatccatctcatctttaatgacttcgatgttgaaccgcagttcgattttctcgccgtgaaggatgatggcatcagtgatattaccgttttgggaacttttagcggaaacgaggtgccctcccagctggcctcctctggacacattgtacggctggagtttcagtccgatcactcaaccaccgggcgcggatttaatattacttacacaacctttggtcagaacgagtgccacgaccccgggatccccattaacggacgtcggttcggtgaccggtttctcctaggctcatcagtttccttccattgcgacgatggctttgtgaagacccaaggctccgaatccatcacgtgcattctccaagatggtaatgtcgtgtggtcatcgaccgtcccccggtgtgaagccccatgcggcggacatcttacagccagttcaggggtaatcctgcccccggggtggcctggatattataaagactcactgcactgcgagtggattatcgaagctaagccgggacattcaatcaaaatcacattcgatcgcttccagaccgaggtgaattatgatacactggaagtgcgggacggtccagcttctagttctccactgattggcgaatatcacggaacccaggccccccagtttttgatctccacggggaattttatgtatctcctctttacgacggacaacagtaggagctctataggcttcctcatccattacgaatccgtgacattagagagcgattcttgcctggaccccggcataccagtcaatggtcatcgccacgggggcgatttcggaattcgctcgacagtgactttttcatgtgatccaggatacaccctctctgacgacgaaccattagtgtgtgagcggaatcatcaatggaaccatgcactgccaagctgtgatgcgctttgtgggggctatatccagggcaaatccgggaccgttctttcacccggttttcccgatttctatccaaattctctgaactgcacttggacaattgaagtatcacatggcaagggtgtgcagatgatctttcacacctttcatctcgagtcctcccacgactatcttttgatcacagaagatggaagcttttctgagccagtcgccagacttacagggagtgtgctcccccatacaattaaggctggacttttcgggaacttcactgcccaattacgttttatttccgacttcagcatcagctacgagggatttaacatcacctttagcgaatacgacttggagccctgcgatgatcctggcgtacctgcattcagccgacggatagggtttcatttcggggtgggagattcactgactttctcctgcttcctcggatatcgactggagggggccactaagctgacttgcctgggcgggggcaggcgcgtatggtccgcacccctgcccaggtgcgtggccgaatgtggtgccagcgtgaaaggcaatgagggtactttgctgagtcctaacttcccatcaaactatgacaataatcacgaatgtatctataagatcgagaccgaggccggcaaaggtatacacctgcgcacaagatcattccagttattcgagggcgacacactcaaggtttacgatggcaaggattcttcaagtagacccctgggaacctttaccaagaatgagttgctcggcctaatcctaaactctacctccaaccatctgtggctggaattcaataccaatggcagtgatacagatcagggtttccaactgacctacacttcctttgatctcgtgaagtgcgaggatcccggaatccccaactacgggtaccggataagggatgagggccattttacagatacagtggtgttgtattcctgcaaccccgggtatgctatgcacgggtcaaacacattgacctgcttaagcggagacagacgggtgtgggacaagcctctgccttcatgcatagctgagtgtggaggccagatccatgccgccacatcaggacgtattctgtctcctggttatcccgccccctatgacaacaacctgcactgtacttggatcatcgaggctgaccccgggaagaccatatcattgcacttcattgtgtttgacacagagatggcccatgatatactgaaggtttgggacggaccagtcgattcagacattttgctcaaggagtggagcgggtccgcattgcccgaagatattcactctacttttaacagcttaactttgcagtttgattccgatttttttatatccaagtccggcttctctatccagttttctacctccattgctgcaacctgcaatgatcccgggatgccacagaatggaacgagatacggcgattctcgagaagcaggcgataccgtgacttttcagtgcgatcccggctatcagctgcaggggcaagccaaaattacatgtgtgcagctgaacaaccgctttttctggcagcccgatccccctacttgcattgctgcctgcggtgggaatctcaccgggcctgctggggtgatcctaagccctaactatcctcagccctatcctcccggaaaggagtgtgattggagggtcaaagttaaccccgattttgtcatcgcgctgatttttaagagcttcaacatggagcccagctacgactttctgcacatctacgagggagaggactccaactctcccctgatcggatcttatcagggctctcaggcaccagaaaggatcgagtccagcggcaattctctgttcctggcctttcggtcagatgcaagcgttggtttgtcaggcttcgccatcgaatttaaagaaaagcccagggaagcatgctttgacccaggaaatatcatgaatggtactcgcgtcggcacagactttaagctcgggtcaactatcacataccagtgcgacagcggatacaagattctggacccatcatctattacctgtgtgatcggagcagatgggaagccctcctgggaccaggttctcccctcttgtaacgcaccttgtgggggtcagtacacagggagcgaaggagtcgtcttaagcccaaactaccctcacaattacactgccggacagatttgcctgtacagcatcaccgtgcccaaggagtttgtcgtgttcggtcagttcgcatacttccaaaccgcgctgaacgacttagctgagctttttgatggtacgcatgcccaggctaggctgctgagcagcctgtccggttcgcactccggtgagaccctcccactcgcaacctccaaccaaatactactcaggttttctgccaaatctggggcatctgccaggggctttcatttcgtgtaccaggcggtcccgagaactagcgacacgcagtgttcttcggtgcccgagcctcggtatggacgccgcatagggagcgagtttagcgccggctccatcgtgcggtttgaatgcaaccctggctacttacttcaggggtcaaccgccttgcattgccagagtgttccaaacgccctcgcgcagtggaacgacacaattcctagctgcgtggtgccgtgctccggaaacttcacgcaacggcgcgggactattttgagtcctggctatcctgagccatatggcaacaacctgaattgcatttggaaaattatcgtgaccgagggctccggcatccagattcaggtgatctcatttgcaactgaacagaattgggactcactggaaattcatgatggcggcgatgttaccgcgcctcggctggggagtttttctggtactactgtacctgctctgctcaattccactagtaatcagctgtacctgcactttcagagtgatatctctgtcgccgctgccgggtttcatctcgaatacaaaacagtgggtctcgcagcctgtcaggagcctgccctgccttctaacagtatcaagattggagatagatacatggtcaacgatgttctctcattccagtgtgagccgggctacaccctgcaggggcgatcacacatctcttgcatgccggggacagtgcgccggtggaactacccttcaccactgtgcatcgcgacctgcggcggcacgttaagcacactgggcggcgtgatactgtcacctgggttccctggctcctatccaaataatcttgactgcacatggcgtataagcctccctatcggctacggcgcacacattcagttccttaacttttccacagaggcgaaccacgatttcctggaaatccagaacgggccttatcatactagcccaatgatagggcagttcagcggcacagacttgcctgccgccctcctgtcaaccacacatgagacactgatacacttctactcagaccacagccagaaccgtcaggggtttaaactcgcctatcaggcctacgagctccagaactgccccgatccacccccgtttcagaatggatacatgataaatagcgattactctgttggccagtcagtgtcttttgaatgttatccagggtatatcctgattggccatccggtgctcacctgtcagcacggaatcaaccggaactggaattatcccttcccacgctgcgacgctccctgtggctacaacgtgacttcccaaaatgggaccatctactcacctggatttccggatgaataccctatcctgaaagactgcatctggttgattacggtgccacctgggcatggagtatatattaacttcactttgctacaaaccgaagctgtgaacgactacattgcagtgtgggatggacccgatcagaactcacctcagctgggcgtctttagtggaaatacagccctcgaaactgcatattcctctacgaaccaagtactgctcaaatttcactctgacttcagcaacggcggattttttgtactaaatttccacgcgttccagctaaaaaagtgtcagccaccccccgcagtcccacaggctgagatgctgactgaggatgatgactttgagattggggatttcgtcaaataccaatgtcaccccggttatacgctggtgggcacagacattttgacctgtaagctgtcatcacaacttcaattcgagggaagtctgcctacatgcgaagcccaatgccctgccaacgaggtgcgcacagggtcctcaggagtaattctgagtccagggtatccaggaaattacttcaactcccagacctgctcttggagcatcaaggtggaaccaaattataatataactatcttcgtggacacttttcagagcgaaaagcagttcgacgccctggaggtcttcgacggaagctccggacagagcccccttctggtggtcttatccgggaatcacactgagcaatccaacttcacctctcggagcaatcaactatacctgagatggagcacggaccatgctacgtcaaagaagggttttaaaataaggtacgctgccccttactgctccctcacgcatcctctcaaaaatggcggaatcctgaaccgaaccgcaggagctgtgggatctaaggtgcactatttttgtaaacctggctacaggatggtcggccactccaacgcaacttgtaggcgcaatcctctgggtatgtaccagtgggactctctgactcccctgtgtcaggcagtctcttgcgggatccctgagtcgccaggcaatggcagctttacaggcaatgagttcactttggacagtaaggtagtgtacgaatgccacgaaggctttaagctcgaatcctctcagcaagccacagctgtatgccaggaggacgggttgtggagtaataaagggaagccccctacctgtaagccggtggcgtgtccgtcaatcgaggctcaattatccgagcacgtcatatggcgcctggtgtcaggttccctgaacgaatatggggcacaagtcctcctgtcgtgttcaccgggctactacctggaggggtggagattgcttcggtgtcaagcgaatgggacttggaatattggggacgagagaccatcctgccgggtcatctcttgtggctctctgtcattccccccaaacggcaataaaataggcaccctcactgtgtatggcgccacggccatcttcacctgcaatacaggttacacccttgttggcagccacgttagggaatgcctcgccaacggactatggtccggcagcgaaacccgttgtctcgccggacattgcggctctcccgatccaatcgttaatggacatatctcaggggacgggttctcatatcgcgatactgttgtctatcagtgtaatcccggcttcagactcgtgggcacctctgtgcgaatctgcctacaggatcataaatggtcaggacaaacgcccgtgtgcgtgcccattacatgcggccatcctgggaaccccgcccatggttttactaacgggtccgagttcaatctcaacgacgtggtcaacttcacttgcaacactggatatctcctccagggggtgagtcgagcccaatgcaggagcaacggacaatggtcatctcctctgccaacctgtagggttgtcaattgctctgacccagggttcgtcgaaaacgcaatacggcatggacagcaaaatttccccgagtcttttgagtatggtatgagtatattgtaccactgcaagaagggcttctacctactcgggtcttctgcactcacttgtatggctaatggtctgtgggatcgtagcctccccaagtgtctcgccatctcctgtggacaccctggggttccggccaatgcagtgttgacaggggagctctttacatacggagccgttgtgcattattcctgcagaggaagcgaatccctcatcggcaacgacactcgggtgtgtcaggaagatagccactggtcgggcgccctaccacactgcacgggtaacaatcccggcttctgtggggatccgggcaccccggcgcacggatctaggctcggagatgacttcaaaaccaaaagtctccttcggttctcatgtgaaatgggacatcagctgcgggggagtccagaaaggacatgcctgcttaatggttcatggtctggattgcaacccgtgtgcgaagccgtttcttgtggaaacccgggaacacccacaaatggtatgatcgtctcatcagatggcatcctgttctcctcttccgtgatctacgcgtgctgggaaggttacaaaacttccgggcttatgactaggcactgcacagccaatggtacgtggactggaacagccccggactgtaccattatctcatgtggcgatccaggcacgcttgcaaacgggattcaatttggcacggatttcacatttaacaagaccgtctcttaccagtgtaacccgggttatgtcatggaagcagtgacatccgccacaattagatgtaccaaggatggcagatggaatcccagcaaaccagtttgcaaagctgtcctctgtccccagccccctcccgtgcaaaatggaacagtggagggatcagacttccgctggggatcatctatctcctacagttgcatggacggctaccagctatcacacagtgccattctttcatgtgaagggcgaggcgtgtggaaaggcgaaatcccacagtgtctgcctgtgttttgcggagatcccggtatacccgccgagggcagactgagtggcaaaagctttacctacaaaagcgaagtattcttccagtgtaagtccccttttatattggtcgggtcatcacgccgagtgtgtcaagctgatggcacttggagcggaatccagcctacctgtattgaccccgcacataatacctgccctgatccggggactcctcactttgggatccaaaattcgtccagaggatatgaagttggtagcactgtgttttttcgctgccggaaggggtatcatatccagggtagcactactaggacctgcttagctaacttgacgtggagcggaatccagacggagtgtattccccacgcctgtcggcaacctgagactcccgcgcacgccgatgttagggccattgatctgcccacttttggctatacgctggtgtacacatgtcaccccggattcttcctagccggcggatctgaacatagaacgtgtaaagcagatatgaagtggactggaaagtcaccggtgtgcaaaagtaagggggtcagggaggttaatgagactgttactaaaacccctgtgccttcagacgtgttcttcgtaaactcactctggaagggctattatgagtacctcggcaaacgccagccagccacgctgacggtggattggtttaacgccaccagtagtaaagttaatgctactttctcagaggcatctcccgtcgaactcaagctgactggaatctacaaaaaggaggaagcccaccttctcttgaaggccttccaaatcaaagggcaggctgacattttcgtgtcaaagtttgaaaacgacaactggggactcgacggttatgttagctctggtcttgagagaggaggcttcactttccagggggacatacacggtaaggactttggtaaattcaagctggagcgccaagaccccctgaacccagaccaagactcaagttcgcactatcacggtacttcgtctgggtccgtggccgcggctatcctggtccccttcttcgcactaatcctgtctggttttgcattttacctgtacaaacaccgcacccgcccaaaagtgcagtacaacggctacgcaggacacgagaactcaaatggacaggctagttttgaaaaccccatgtacgacaccaatctgaaacctaccgaggccaaggcggtcagattcgataccacgctcaacaccgtctgtacagttgtatag

SEQ ID NO: 184104 - DNA, 10695 bp, synthetic construct
  misc_feature 1..10695: note = Description of Artificial Sequence: Synthetic coding sequence
  source 1..10695: mol_type = other DNA
atgaccgcctggcggcggttccagagcctgctgctgctgctgggcttgcttgtgctctgcgcacggctgctgacagccgccaaaggtcagaattgcggcggactggtccagggtcccaacggcacaattgagtctcccggtttcccgcatgggtatcctaattatgccaactgcacttggattatcataacaggagaacgaaataggatccagctgtccttccatacttttgctctagaagaggacttcgacatcctttctgtgtatgatggacagccccagcaggggaatctcaaagtgaggttgtctggctttcaactgcccagctccatcgtatctaccggttcgattctcaccctctggttcacaaccgacttcgccgtgagcgcccagggttttaaggcactgtacgaggtccttccctctcacacctgtggcaatcccggagaaatattaaaaggtgtccttcatggcacccgttttaacataggcgacaagatccggtacagttgccttccaggctacattctggagggtcacgccattctcacatgtatcgtgtcacctggtaacggcgcctcctgggacttccccgccccgttctgccgggccgagggcgcttgtggtggcactctcaggggtacctcctcttccattagcagcccccattttccatctgaatacgagaataacgccgattgtacatggacaatccttgccgaaccaggggacaccatcgctcttgtgttcaccgacttccagttggaagaagggtacgactttctagagatttctgggacagaggccccttctatctggctcaccggcatgaatctgccctccccagtgatctcatcgaagaactggctgcggttgcacttcaccagcgattctaatcatcggcggaagggattcaatgctcagttccaagtaaagaaggccatcgagctgaagtcgcgaggagtgaaaatgctgcccagtaaggacggctctcataaaaacagcgtcctgtcgcagggaggtgtcgcactggtgtctgatatgtgtcccgatcccggcataccagagaacggacgccgtgctgggagcgatttcagagttggtgccaacgtccagttctcgtgtgaggataattatgttctgcagggatccaaatcaattacttgtcagagagtcaccgagacacttgccgcgtggtccgaccaccggcctatctgccgcgcccgcacctgtgggagcaacctgaggggtccatccggtgttataacatctcctaattaccccgtacagtacgaggataacgctcactgcgtgtgggtgattacaacgacagatcctgacaaagttatcaaactcgcattcgaagagtttgagctagaacgggggtacgacacactgactgtcggagacgccggaaaggtcggggatacccggagcgtgctgtacgtcctgacaggctcctcggtgccggacctcatagtctctatgagtaatcagatgtggttacatctgcagtccgatgactccatcggatctccagggttcaaggccgtgtatcaggagattgagaaaggagggtgcggcgatccaggaataccagcttacggtaagagaacaggaagctcgttcctccacggcgatacactgactttcgagtgccccgcagccttcgaactggtaggcgaaagggtcattacctgccagcagaacaaccagtggtcgggaaacaaaccttcttgtgtgttcagttgcttttttaatttcactgcctcatctgggatcatcctgtctccaaattatcccgaagagtacggaaacaatatgaattgcgtctggctgatcatcagcgagcccgggagccgcatccacctgatttttaatgatttcgatgtcgagcctcagttcgactttctagcggtgaaggacgacgggatatccgatattacggtacttggaacattttccggtaatgaggtgccctcacagctggcctcctcaggacatatcgtaagactggaattccagtccgatcattctactacgggcaggggattcaatattacctatactacattcggacagaatgaatgccacgatccagggattcccattaacggaagaagattcggagataggtttttattgggcagcagtgtgagcttccactgtgacgacggatttgtgaagactcaggggagcgagtctatcacctgcatcctacaggacggtaacgttgtgtggagttctactgtgcctcgctgcgaggccccgtgtggtggtcatctgaccgcttcatccggtgtgatcctgcctcccggctggcctggatactataaagacagcctacactgtgaatggattatagaagcaaagcctggacatagtatcaagatcacttttgatagattccagacagaagtgaactatgatacgctggaggttagagatggcccagcttcaagcagtcccttaattggcgaataccatgggacacaggccccacaattcttgatttcaactgggaacttcatgtacttgctgttcaccaccgacaattctcgttccagtatcggtttcttaatccattacgaatctgtgactctggagtccgatagctgcctcgaccctggcatacctgttaatggacatagacacggaggtgactttggcatcaggtctacagtgaccttcagctgcgacccgggttacacgctctccgatgacgaacctctggtttgcgaacgtaaccatcaatggaatcacgccctcccttcttgtgatgccctatgtggcggctacatccagggcaagtctgggactgtgttgagccctggcttccccgacttctaccctaatagtttgaactgtacatggaccatagaggtgtctcatggtaagggggtgcagatgatcttccacactttccacctggagagctcacatgattaccttttgattactgaggacggtagctttagtgaacccgtggccagattgaccggctccgtcttgccgcataccatcaaggcgggtctcttcggcaatttcactgcacagctgagatttatctccgacttctccattagctatgaaggatttaacattacatttagtgagtatgacctggagccctgcgatgaccccggtgtcccagccttttccagacgaattggctttcactttggggtgggggattcccttacattctcctgtttcctaggttatcgactcgaaggcgcaacaaaactgacgtgtttaggcggtggacgacgggtgtggagtgctcctctccctcgatgtgttgcggagtgtggcgcatccgtgaagggaaacgagggaaccctgctctcccccaactttcctagcaactacgataacaatcacgaatgtatctataagatcgaaactgaggcgggaaaaggcattcacttacgtacccgctccttccagctcttcgagggcgacactctcaaagtgtacgatggtaaagactcttccagccgccccctgggaacctttaccaagaatgagttgcttggcctgattctgaacagcacttccaaccacctctggctggaatttaacaccaatgggtctgataccgatcagggtttccagctgacttacacgtcatttgatcttgtgaagtgtgaagatcctgggatccccaattatggatacagaattcgagatgagggccattttaccgatacagttgtgctgtacagctgcaatcccggttacgcaatgcacgggtcaaacacactgacctgcttatcgggagatcgccgggtatgggacaagcccctgccttcttgcatcgccgagtgcggcggacaaattcacgccgccaccagcgggagaattctctccccaggctacccagcaccatatgacaataacttgcactgcacttggatcatcgaagcggacccaggtaaaacgatcagcttgcacttcatcgttttcgataccgagatggcgcacgatatcttaaaggtgtgggacggccctgttgattcggatattctcctgaaggagtggagtgggagcgctcttccagaggacattcattccacttttaactctcttacattgcagtttgatagtgatttctttatatctaagagtggattcagcatccagttctcgactagtattgcagccacatgcaatgaccccggcatgcctcagaacggtacaaggtacggcgattccagagaagcaggggataccgtgacattccagtgtgatccagggtaccagttgcaaggccaggcaaagatcacctgtgtccagctcaacaatcgttttttctggcagcccgatccaccaacgtgtatcgcagcctgcggcggcaatttgacgggccctgcaggagtgatcctgtctcccaattacccccaaccatacccacccggcaaagaatgcgattggcgggtcaaggtgaatccagattttgtgattgctctcatcttcaaatcttttaatatggagcctagctatgattttctgcacatctatgagggagaggattcaaactctcccctgatcggatcttaccagggtagccaagcgcccgagcgaattgaatcttctggcaattcgctatttctggcatttagatcagacgcttcagtcggactttctggattcgcaatcgagtttaaggaaaagccccgcgaggcatgtttcgacccagggaacatcatgaacgggaccagggtgggaactgattttaaactgggatcaaccatcacataccagtgcgatagtggatataaaatactcgatccatcatcgatcacctgcgtcatcggcgctgacggtaaaccatcttgggaccaggtacttccatcctgtaacgccccatgtgggggacagtacactggctctgagggggtcgtgctgtctccgaactatccccataactatacagccggccagatctgcctttactctatcaccgtgccaaaggagtttgtcgtgtttggtcagtttgcgtacttccaaacagcgctcaacgatctggcagagctgttcgatggtacccatgctcaagcaaggctgctcagttcccttagtggtagccacagcggcgagactctgccactcgcaactagtaatcagattcttcttcgcttctccgcaaaatcaggcgcttccgcccgaggctttcactttgtgtaccaggctgtgcccagaaccagcgatactcagtgttcatctgtcccagagccgcgatatggcaggaggattggatcagaattctccgccggatctatcgttcgattcgaatgcaatcctgggtatctgctacagggttcaaccgcactgcactgccagagcgtgccaaatgccttggctcaatggaatgacaccattccttcttgcgtcgttccgtgttcagggaactttactcaacgacgcggtactatcctcagtccgggatatccggagccatacggtaacaacctgaattgcatctggaaaattattgtgacagaggggtctgggatccagatccaggtgatcagttttgctacagagcaaaattgggacagtctggaaatccacgacggcggagatgttactgctcccaggctggggtccttcagcgggaccactgtccccgcactgctaaactccacatccaatcagctataccttcactttcagtctgacatctctgtggcagccgcaggctttcacctcgagtacaaaacagttggcctggcggcatgccaagagcccgctctgccttctaactcgatcaaaataggagaccgctacatggtcaacgatgtactgtctttccagtgcgaaccaggatataccctccaaggaaggtcccatattagctgtatgccaggcaccgtgagacgttggaactatccttctcctctgtgcatagccacatgcgggggcacattgtcaacccttggtggggtgattctcagtccgggatttccagggtcttaccctaacaacctagactgcacatggcggatcagtcttcccattggatatggagctcatattcagtttctcaatttcagcaccgaggccaatcatgattttctggaaatacagaatggcccttaccacacttcccctatgattgggcagtttagcggcaccgacctgcctgcagccctgttaagtaccacacacgaaaccctgattcacttctactccgatcattcccagaaccgccagggttttaaactggcgtaccaagcatatgagcttcaaaattgcccagacccacccccatttcagaatggctacatgattaactccgactattcagtcgggcaatctgttagctttgaatgctaccctggttacatcctgattgggcatcctgtccttacttgccagcacggtatcaacagaaattggaactatcccttcccccgctgcgatgcaccttgcggctacaatgttacctcccagaatgggaccatctactcgccaggttttccggacgaatatccgatactgaaagactgcatttggctcatcacagtgccccccgggcatggtgtttacatcaatttcactttgctacagaccgaagctgtaaatgattatatcgcagtttgggacggccccgatcagaatagtccccagttaggagtgttttctggaaataccgccttggaaacggcctacagttctactaaccaggtactactgaagttccacagtgacttcagcaatggaggcttctttgtgctcaactttcacgccttccagctgaagaagtgtcagcctcctcctgcagtgccccaggccgagatgttgactgaagatgacgatttcgagatcggcgatttcgttaagtaccaatgccaccccgggtacacccttgtcggaaccgatatcctgacctgcaaattgtccagccaactgcaattcgaaggtagcctaccaacttgtgaagcacaatgtccagcaaacgaagtgagaaccggatcaagtggtgtgatcctgagcccagggtatccgggcaactactttaattcgcagacttgctcctggtcgattaaggtagagcctaactacaatatcacgatttttgtcgataccttccaatcggaaaaacaattcgacgcactggaggttttcgatggatctagcggccagtctcccctgctggtggtcctgagcgggaaccacactgaacaatcaaattttacttccagaagtaatcagctgtacctgcggtggagcaccgaccatgcaacatccaagaagggatttaagataaggtacgccgccccatattgtagtttgactcatccgctgaagaacgggggtattcttaaccgtacagcaggcgccgtgggcagcaaggtccattatttttgcaagcctggctaccgcatggtcgggcactctaacgccacctgccggagaaatcccttaggcatgtatcagtgggatagcctcacccctctgtgccaggccgtttcctgtgggatacctgagagccctggaaatggttcatttacagggaatgaattcaccctagacagtaaggtggtgtatgaatgtcacgagggttttaaattagagtccagccaacaggccactgccgtttgtcaggaggacgggctctggagcaacaaaggaaagccgccgacatgtaagccggtcgcttgccctagcatcgaagcccagctttcagaacatgtgatctggagactcgtttccggaagcctgaacgaatacggcgcccaggtgttgttgagctgctcccccggctactatttggagggctggaggcttcttcgttgtcaggccaatggcacatggaacataggagacgaaagaccaagctgtcgagttatctcctgtggttctctgtcttttccccctaatggaaataagattggtaccctgacggtgtacggggcaaccgcaattttcacctgcaatactggttacactctcgtgggatcacatgtaagggagtgcctcgccaacggcctctggagtgggagtgagactaggtgtcttgccggacactgcggctcaccagatcccattgttaacggccatatcagtggtgacggatttagctatcgggacacggttgtataccagtgcaatcctggcttccgcttggtgggcacctccgtgaggatctgcttacaagatcacaaatggagcgggcagacccccgtgtgcgtccctatcacctgtggccacccagggaatcccgcacacggattcacaaacggcagtgagttcaaccttaatgacgtagtcaatttcacgtgtaacacaggatacctcctccagggcgtctcacgggcacagtgccggtccaatggccaatggagtagtcccttgcctacctgtagagtggtaaattgttccgaccccgggtttgtagagaacgcaatacggcatggacagcagaatttccccgagagtttcgaatatggcatgtccatactgtaccactgcaagaagggcttctatcttcttggctcatccgctctgacctgcatggctaatggactgtgggaccgctcattacctaaatgcctggctataagttgtggccatccgggcgtgcccgccaatgcagtcctgaccggtgaactgttcacctacggcgccgtggtccattattcctgtagagggtccgagagtctcatcggcaatgacactcgcgtgtgtcaggaggatagtcactggtcaggcgccctgccccactgcacaggcaataaccccggcttctgcggggaccccgggactccagcgcatggaagccgcctaggcgacgactttaaaacaaagtcacttctgagattcagctgtgagatgggacaccagctcagggggtcccctgaacgtacttgcctcctgaatggctcctggtctggcttgcagccagtgtgcgaggccgtaagttgcggcaaccccgggacccccaccaatggcatgattgtatccagcgacgggatcctgttctcatcctccgtaatttatgcctgttgggagggctataagactagcggcctgatgaccaggcactgcaccgcaaacgggacgtggactggcactgctcccgattgtactataatttcatgcggggatccagggacacttgctaatggcattcaattcggtacagactttacttttaacaaaactgtgtcatatcagtgcaatccgggctacgtgatggaggccgtcacttccgctacaattcgatgtactaaagacgggcgctggaatccctccaaacccgtttgcaaagccgtgttatgcccacagcctccacctgttcagaacggaaccgtggagggatccgacttcaggtgggggtctagtattagctatagttgtatggacggataccagcttagccactctgccatcctctcgtgtgagggtcggggtgtttggaaaggcgaaattccccagtgtctgcctgtattctgcggggaccccggtatccctgccgagggacgcctgtcgggaaagagtttcacctacaaatctgaggtattcttccaatgcaagagtccctttatactggtcggaagctctcggcgtgtgtgccaagcagatggcacgtggagcgggatacaacctacctgcattgacccagcccataacacctgtcctgatcccggtaccccacatttcggaattcaaaactctagtagagggtacgaggtgggatctaccgtgttcttcaggtgtcggaaagggtaccacattcaggggtcgaccacccggacctgtctggcgaatctgacatggagcggaatccaaacagagtgtattccgcacgcctgccgtcagccagagacaccagcccatgcagacgtgagggcaattgacctgcccacattcggctacaccctggtgtatacatgccatccaggcttctttctagcgggcggctctgaacatcgtacctgtaaagctgatatgaaatggaccgggaaatccccagtctgcaagtcaaagggcgtaagagaagtgaatgagacggtgacaaaaacccctgttccttctgacgtgttcttcgttaactctttgtggaaaggatattatgagtatctggggaagaggcagcctgccacactgacagttgattggtttaatgctacaagctctaaggtgaatgctaccttctccgaggcgtcccccgtagagctgaagttaacagggatctacaagaaagaagaggctcatctactgcttaaggcatttcaaatcaagggccaggcagatatttttgtaagcaaattcgagaatgacaactggggactggatggatacgtttctagcggcctcgaaagaggcgggtttacctttcagggagacatccatgggaaggatttcggcaagttcaaactcgagcggcaggatcctctcaaccccgaccaggactccagctcacactatcacggcacttcttcagggtccgtagcggccgcaattttggtacccttcttcgctttgatcctgagcggctttgcattctacctgtataaacaccgcaccaggcctaaggtccagtacaacggttatgcagggcatgagaatagcaacggacaggctagtttcgagaatccaatgtacgataccaatctgaagccaaccgaagccaaggctgtacggttcgacacaacattgaatacagtctgcaccgtggtatag

SEQ ID NO: 184105 - DNA, 6330 bp, synthetic construct
  misc_feature 1..6330: note = Description of Artificial Sequence: Synthetic coding sequence
  source 1..6330: mol_type = other DNA
atgaccgcctggcggcggttccagagcctgctgctgctgctgggccttctagtcctgtgtgctagactcctgactgctgcaaaggggcagaactgtggaggactggttcaggggcctaacggcaccatagagagccctggctttcctcatggctacccaaactacgctaattgcacttggattattattactggggagcgcaatcgcattcagctatcattccacacctttgcccttgaggaggatttcgatatcctgagcgtatacgatggacaaccgcagcaaggaaacctgaaggtgcgcctcagtggctttcaattgccttccagcatcgttagcacgggttccatccttaccctgtggttcacaaccgattttgccgtgtcagctcaagggtttaaggctctgtatgaggttctccctagccacacctgcggaaatcctggcgagattttgaagggagtgctgcacgggacccgcttcaacattggcgataagatccgctactcttgtctccctggctacatcttggagggccatgccattctgacctgcatcgtttcccctgggaacggggcctcatgggatttcccagcgccattctgccgtgcagagggggcgtgcggcggcaccctgagagggactagttcaagcattagcagtcctcatttcccttctgagtatgagaacaatgccgactgcacctggacaatcctcgcagagcccggcgacacaatcgctttggtgttcactgacttccaactagaggagggttatgactttctcgaaatatcagggaccgaggccccgtccatttggcttactggcatgaatttgccttctcccgtaatttcttccaagaactggctgcgactgcactttacctctgactccaatcaccgtagaaagggcttcaatgcccagttccaggtgaagaaagctattgagctgaagagtcgcggagtcaagatgctcccaagcaaagatggcagccataagaattcggtactgagccagggcggtgtggctctggtttccgacatgtgcccggaccccggaattccagaaaacggtcgtcgagcgggatctgactttagggtgggtgccaatgtgcagttttcctgtgaagacaactatgtactgcagggtagcaaatcaataacatgccaacgagtcaccgagactctggcagcatggagcgatcatcggcccatctgcagagcgagaacttgtggatccaacctgaggggaccctcgggtgtgatcaccagtcctaactacccagtacagtatgaggacaacgcccactgtgtgtgggtaatcactaccactgatccagataaggtgattaagctggctttcgaagagtttgagctcgaacggggctatgacactttaacagtgggcgatgcgggtaaggtaggcgatactaggagcgtcctttatgtccttacagggtcctccgtgcctgacctgatcgtctccatgagcaaccagatgtggctgcatctgcagtccgacgattccatagggtctcccgggtttaaggcagtgtatcaagaaattgaaaagggaggatgtggagaccccggcattcccgcgtatggtaagcgcaccggctcctctttcctgcacggcgatactctgacatttgaatgtccggccgcttttgagctggtgggagaaagggtcattacttgtcagcagaacaaccagtggagtggaaataagcctagctgtgtctttagctgtttcttcaacttcaccgcttcaagtggcattatcctcagtcccaattaccccgaggagtatgggaataacatgaactgtgtctggctaataataagtgagcccgggtcgcgcatccacttaatcttcaatgacttcgacgttgaacctcagtttgactttttggctgtcaaggatgacggaatttcagacattacagttctcggaaccttttccgggaatgaggtccccagtcagcttgcaagcagcgggcatatcgtgagacttgaatttcaaagcgaccactcaactaccggccgcggttttaacatcacatacaccacattcggtcagaatgaatgtcacgaccctggaatccctattaatggcaggagattcggggatcggtttcttctggggtcctcagtgtccttccactgcgatgacgggtttgtgaagacccaaggctccgaatccatcacttgcatcctccaggatgggaacgtggtctggagcagtacagtgccaagatgtgaagcaccctgcggcggtcatctgaccgcatcttcaggggtgatcttgccgcccgggtggcctgggtattacaaagactctcttcactgcgaatggataatagaagccaaacccggccactcaattaagattacttttgatcgctttcagactgaggttaactacgatactcttgaggttcgagatggcccagcctcatccagtccactgattggggaataccatgggacccaggcaccccagtttttgatcagtactggaaatttcatgtatttgctgtttactacagataattcccgctccagcattggctttctgatacactacgagtcggtcaccctggagagcgactcttgcctagatccgggtattcctgtgaacgggcaccgtcacggaggagattttgggatcaggtctaccgtcaccttctcatgcgaccccggctacaccctcagcgatgatgaacctcttgtctgcgagaggaatcatcagtggaaccacgcactgccgtcgtgtgatgcgctttgtggtgggtacatccagggcaagtccggtaccgtcctctctccaggattccctgacttttaccctaattcactcaattgcacctggacaattgaggtttcccacggaaaaggggtgcagatgatcttccatacttttcacctggagtcatctcatgattatttgttgatcacggaggacggtagcttttctgagccagtggcaaggttgaccgggtcagttctgccccacacaatcaaggccggactctttgggaactttactgcacagctgagatttatcagcgatttctccatttcttacgaaggatttaacattaccttctctgaatacgatttagaaccctgtgatgacccaggggtccctgccttcagtcgccggataggattccatttcggggtgggcgactctcttacttttagttgttttctaggatacagattggagggcgccactaagctgacgtgcctgggaggcggaaggcgcgtgtggtccgctcctttgccccgttgtgtggctgagtgcggcgcttctgttaagggcaatgaggggacgttactgagtccaaactttccatcgaattatgacaataatcatgaatgcatctacaagatagagaccgaggcaggaaaaggcatccacctcaggacacgatccttccaattgtttgagggcgacaccctgaaagtgtatgacggtaaggactcaagcagcaggcccctgggtacatttacaaagaatgaattgctgggcctgatcttgaatagcacctccaaccacctttggctggagttcaacacaaatggttctgatacagaccagggcttccagttgacctacacgtcttttgatttggtgaaatgtgaagaccccgggatcccaaattatggttatcggatccgcgacgaaggacacttcacagatactgttgtcctttactcttgtaaccccggctacgcaatgcatgggtccaataccttgacgtgtctgtctggggatcgcagagtgtgggataagcccctgccttcctgcatcgctgagtgcggcgggcaaatccacgcagctacttctggaagaatcctgtctccaggctacccagccccatatgacaacaatctacattgcacgtggatcatcgaagcagatcctggtaaaaccatttctctgcattttattgtgttcgataccgagatggcccatgacattcttaaggtttgggacggccccgtggactctgatattctgctgaaagaatggtctggctccgccctgccagaagacattcactcaacatttaactccctcaccctgcaattcgatagtgatttctttatttcgaagagtgggttcagcattcagttttcaacctctatagccgccacctgtaatgatcccggtatgccgcagaacgggactaggtacggcgactccagagaagctggggataccgtgactttccagtgcgaccctgggtaccagctgcaagggcaggccaagattacgtgtgtgcagttgaacaaccgctttttttggcagcccgatccaccgacctgtattgccgcctgcggcgggaacctgacgggcccagcaggagttattctgagccctaactacccccagccctaccccccagggaaggaatgtgattggcgagtcaaagtgaatcctgatttcgtcattgctctgatcttcaaatcttttaacatggaaccttcctatgacttcctgcacatttacgagggcgaagactcaaattctccactcattggttcctatcaaggatctcaggccccagaaaggatagagagttcaggaaactctttgtttctcgcctttcggagtgacgccagcgtgggtctgagcgggtttgctatagaatttaaagagaaacctcgggaggcatgctttgatccaggtaatatcatgaacgggacaagggtgggcactgacttcaagctcggaagtaccattacctatcagtgtgattctggttacaaaatactggacccatcctccatcacttgtgtgatcggcgccgacggaaaaccatcatgggatcaggtgctgccttcctgtaacgccccctgcggcggacagtataccggctctgagggagttgtgctttcaccaaattacccgcacaattacacagcaggtcagatctgcctgtatagcatcactgtgccaaaggaattcgtagtgtttggtcagttcgcttactttcagaccgcactcaacgaccttgccgaactgtttgatggcacccacgcacaggcgcggctgctgtccagcctgagtggttctcacagtggggaaacattgccactggccacctccaaccagattttgctgcgattctccgctaaaagtggtgcgtcagcccggggcttccactttgtttaccaggccgtcccaagaacaagcgacacccaatgcagctctgtcccagaaccccgctatgggaggagaattgggtccgaattttctgctggtagcattgttcgctttgagtgcaatcccggttacctgctgcagggcagtaccgcactgcattgccagtcagtgccaaatgccctggctcaatggaacgatacaataccttcatgtgtcgtgccctgctcggggaacttcacgcagcggcgcgggacaatactcagcccagggtaccctgagccctacgggaataatctgaactgtatttggaagattattgtgaccgaaggttcaggcatccaaatccaggtcattagtttcgccactgagcagaactgggacagcttggaaatccacgatggaggtgatgttacagcaccccgactgggcagttttagcggcactaccgtgcctgcactcttaaattccacttccaaccagttgtacctccacttccagagtgatatctcagtggccgcggctggcttccacctggaatacaagaccgtcggtctggccgcatgtcaggagccagccctgccaagtaattccataaagattggcgaccgctatatggtgaatgatgtcctctcctttcagtgcgagcctggatacaccctacaaggtcggtcccatatatcttgtatgcctggcaccgtgagacgctggaactatccctcacctctctgcattgcaacttgcggagggactttgagcacacttgggggggtaatccttagtcccggcttccctggttcctacccaaataacctggattgtacatggagaatctctcttcctattggctacggggctcatattcagtttctgaatttctccacagaggccaaccacgattttctggagattcaaaacggcccttatcatacatctccgatgatcgggcagttttccggcaccgatctgcccgcagcacttttatctactacacatgaaacacttattcatttctattctgaccattcacaaaacaggcagggttttaaacttgcttaccagggcgggtccggcaacatcgggcccgccttcccctgcctcgatacgccctttcaggctcgatgccagggcgaggagcgcaccttcaattag

SEQ ID NO: 184106 - DNA, 10164 bp, synthetic construct
  misc_feature 1..10164: note = Description of Artificial Sequence: Synthetic coding sequence
  source 1..10164: mol_type = other DNA
atgaccgcctggcggcggttccagagcctgctgctgctgctgggcttgttagtgctctgcgctagactcctgacagccgccaagggccagaactgtggcggtttagtgcagggacccaatggcacaatcgaatcccccgggttcccccacgggtaccccaactacgcaaactgcacgtggataatcattacgggcgagcgaaaccggatacagctgtcattccacacctttgcactggaggaagattttgacatcttaagcgtctacgacgggcagcctcagcagggaaacctgaaagtcagactcagcggattccagttgccatcctccatcgtgtccacaggctccatactgacactttggttcaccacggacttcgctgtttccgcgcaaggcttcaaggccctatatgaggttctgccctctcatacctgcggcaaccccggcgagatccttaaaggggtcctgcacggtacccgcttcaatatcggggataaaattcggtactcatgcctgcctgggtatattctcgaaggacacgccatcctgacctgtatcgtgtctcctggaaacggcgcctcttgggatttccccgcccctttttgccgcgcagagggggcctgcggtggaaccctccgaggcacatcctctagtatatcttcaccacatttccccagcgagtacgagaataacgctgactgcacttggacaatcctcgccgagcccggcgacaccatcgcactggtctttacggactttcaactggaagagggatacgatttcctggagatctctggaacagaagcgccttctatatggctgaccggcatgaacctgccttcccccgtcatttcctctaaaaactggctccgtcttcacttcacatccgacagtaaccaccgcaggaaaggatttaacgcgcagtttcaggtcaagaaggccatagaattgaaatctaggggggtgaaaatgcttcccagtaaggatggctcccacaaaaacagtgtgctgagccagggcggagttgcactggtatcggacatgtgcccagatcccggcatccctgagaacggaagaagagccgggtcagattttagggtgggcgcgaatgtgcagtttagttgtgaggacaactatgtgcttcaggggtccaaaagcattacctgtcagagggtcactgagactctggctgcgtggtccgaccaccggcccatttgtcgcgctcggacatgcggctccaatctccggggaccttctggcgttatcaccagccccaactacccagtacagtacgaagataacgcacactgtgtctgggtgatcaccaccactgaccccgataaagtgattaaattggcttttgaagagtttgagctggagagggggtatgataccctgacggtgggagatgccggaaaggtgggggacactcggagcgtgctgtacgtgttgacagggtcttccgtaccagatctcatcgtgtcaatgtccaaccagatgtggctacacctccagtctgatgactcgattgggtcacctggatttaaggctgtatatcaggaaatagaaaagggcggctgtggcgaccctggcattccagcctacgggaagagaactgggtcaagtttcctacacggagacaccctaacttttgaatgcccagcagccttcgaactggttggagagagggtgatcacttgtcagcagaataaccagtggtcaggcaacaagcccagctgtgtgttctcatgcttttttaatttcactgctagttctggcattatcctgagccccaattaccccgaagaatacggcaacaacatgaattgcgtgtggttaattatatcggagccagggtctcgaattcacctgatatttaacgacttcgatgtggaaccacagtttgatttcctggctgtcaaggatgacggtataagcgacatcacagtgctcggcaccttcagtggaaatgaagtgccaagccaactggcttcaagtgggcacatcgttaggctcgagtttcagtcagaccattccacaaccggcagaggcttcaacatcacctacacgactttcggccagaacgaatgtcatgacccaggaatccctatcaacggccggaggttcggcgataggtttctgctaggaagttccgtgtcattccactgcgacgacggattcgtcaagacccaggggtctgagtcgattacatgtatcctccaagacggcaatgttgtctggtcctctacagtacctaggtgcgaagcgccgtgtggcgggcacctaaccgctagttcaggcgtgattctgcccccaggctggcccggatactacaaagatagcctgcactgcgagtggattatcgaggccaaacctgggcattccataaagattactttcgataggtttcaaaccgaagtaaattatgacacactggaggtgagagacgggccagcatcctcaagcccactcataggagagtaccacgggacacaggctcctcagttcctgatctcgacaggaaatttcatgtatcttctgttcacgactgataatagcagatcctcgattggcttcttgatccattacgaatccgttaccctcgagagcgattcttgcctggatccaggaatccctgtcaacggccataggcacggtggcgattttggaatccggagtacagtgactttcagctgtgaccctggctacacactgtccgatgacgaacctctggtatgtgagaggaaccaccagtggaatcacgcactcccgtcgtgtgatgctctttgcggagggtatattcaaggaaagtctggcaccgtcttgtccccaggtttcccagacttctaccccaattcactcaattgcacttggactatcgaggtcagccatggaaagggagtacagatgatttttcacaccttccacttagaatcctcccacgactacctactgattactgaggacggctctttctctgagccagttgctcgcctcactggatcagtgctgccccatacgattaaagccggcctatttggtaatttcactgcccaacttaggttcatttccgactttagcatctcttatgagggttttaacatcacattttctgagtacgacctggagccctgcgacgaccctggagtgccagcattcagccggcgaatcggatttcacttcggtgtgggtgactcactgactttctcttgctttttgggttaccgtctcgagggcgcaacaaagcttacgtgccttggcggcggccggcgcgtgtggtcagcccccctgcctcgatgcgttgccgaatgcggcgcctcggtgaagggaaatgaaggcactctgctgtctccgaatttcccttcaaattacgacaacaatcacgaatgcatttataagatcgaaaccgaggctggaaagggtatacacctgaggacccgctcctttcaactcttcgaaggcgacacacttaaggtttatgacgggaaagactcttcatccagaccactcggtacatttacaaagaatgagctcctcggtttgatattgaactcaacgagtaatcacctctggctggaattcaatacaaacggaagcgacactgatcagggattccagctcacctacacgagctttgacctcgtgaagtgcgaggatccagggataccgaactatggctatcggatacgcgatgaaggacactttacggataccgttgtactgtattcatgtaacccaggctacgcgatgcacggatccaacactctgacatgtcttagtggcgataggcgcgtgtgggacaaacccctgccctcgtgtatcgcagaatgcggcggccaaatacatgcggcaacttcaggacggatcttgagtcctggttacccggccccttacgataataatctccactgtacctggatcatcgaagccgacccgggcaaaacaatttccttacacttcattgtgttcgacacagagatggcccacgacatactgaaggtctgggatggtcctgttgactctgatatattactgaaggagtggtccggcagcgcgcttccagaggatatccattcaacctttaacagtttgacgctgcagttcgactcggacttctttatctcaaaatctggcttctctatacagttcagcacctccatcgccgcaacgtgcaatgaccccggcatgccccaaaatgggactagatatggtgacagtcgggaagcaggcgacactgtgactttccagtgtgaccccggctatcaactccagggccaagccaaaattacctgcgtgcaactcaataaccggtttttttggcagccagacccaccaacatgtattgccgcctgcggaggaaacctaacagggccggccggtgtcatcctgtctcctaactacccacagccctatccaccaggaaaggagtgcgattggagggtgaaagtgaacccagattttgtgatcgctcttatcttcaaaagcttcaatatggagcccagctacgacttcctgcacatatacgagggggaggattccaacagtcctctaataggctcttatcagggaagccaggctccagagcgaatcgaatccagcggcaattcactgttcctggcctttcgctcagacgcatccgttgggctttcagggtttgccattgaattcaaagagaaaccccgcgaggcctgctttgacccggggaatatcatgaacggtacgagggtggggacagacttcaagctgggatccaccatcacttatcaatgtgatagcggctacaagatcctggacccaagctcaattacatgcgttatcggtgcagacggtaaacctagttgggatcaggtgctcccgtcttgcaatgccccctgcggcggtcagtacaccggctcggagggcgtggttttgtctccaaactatcctcataattacaccgcaggacaaatctgcctctactcaattaccgtccctaaggaatttgtcgtgtttggccagtttgcttattttcagacggctcttaatgatctcgccgaattattcgacgggacacacgctcaggcccggctgctatcttccctgtctggctcccactcaggggaaaccttgccactcgcaacctcaaaccagatcttactccggttctccgccaaaagcggggcaagcgcacgtggctttcacttcgtttatcaggccgttccacgaacatctgatactcagtgtagcagcgtgcccgagccacgctatggcaggaggatcggttccgaattttcagccgggagtattgtccgatttgagtgtaaccctgggtacctgctgcagggttccaccgccctccactgtcagagcgtgccgaacgcactcgcccagtggaacgatacaatcccaagttgtgtggtgccgtgtagcggcaattttacccagcgcagagggaccattttgagccctggataccctgagccttacggaaacaacctgaactgtatctggaagatcatcgtgacagagggctctgggatacaaatccaggtcattagcttcgcgacagagcaaaactgggactcacttgaaattcacgacggaggagatgtgaccgcacctcgactcggaagcttctctggaaccaccgtgcctgccttattgaattccacttccaatcagctgtacctgcatttccagtcagatatctctgttgccgccgctggctttcacttagaatacaagacagtagggcttgcagcctgccaagaaccagcactgccaagcaacagcataaaaatcggcgaccggtatatggtgaacgacgtgctcagctttcagtgcgagccaggctatacactacaaggccgctcacatatctcttgcatgcccggaaccgtaagaagatggaactatcccagtccactgtgtattgccacttgcgggggaacactcagtaccctgggcggcgtgatcctgtctcccgggttccccggttcctacccaaataatcttgattgtacctggcggatcagcctccccatagggtacggtgctcatatacagttcctcaattttagcacagaggccaaccatgactttctggagattcagaacggcccataccacacgagtccaatgattggccagtttagtggaactgatctcccagccgccctgctttctaccacccacgagacgctgatacacttttacagtgatcattcccagaaccgacaggggttcaagttggcctatcaggcatatgaattgcaaaactgccccgatcctcctccgtttcagaacggctatatgatcaattccgattattccgtgggccaaagcgtgtcctttgagtgttaccccggatacatcttaatcggccaccctgtcctaacgtgccagcacggtattaacagaaactggaactacccgtttccgagatgtgatgccccctgcgggtacaatgtgactagccaaaatggcactatctacagtcccggctttcctgacgaatacccaattctcaaggactgtatctggctcataaccgtccccccaggacacggagtgtatatcaatttcacacttctgcagactgaggccgtgaatgattacatagccgtttgggacggacccgatcagaattcaccacaactgggcgtcttctccgggaatacggccctagaaacggcatattccagtaccaatcaggtactgttgaaattccacagtgacttcagcaacgggggattttttgtgttgaatttccacgcgtttcagctcaaaaaatgccagcccccgcccgcggtgccccaggcggagatgcttaccgaggatgacgatttcgaaatcggggacttcgtgaagtaccagtgtcacccaggttacaccctcgtcgggactgatattctcacgtgtaagttatcatcacaattacagtttgagggaagtcttccaacctgcgaggcacagtgtccagcaaacgaagtgaggaccggatcctcgggcgtgattctcagcccaggttatcccggcaactattttaattcgcagacttgcagctggtcaatcaaggttgagcccaattataacatcaccatctttgttgatacatttcagagtgaaaaacagtttgatgcactcgaggtgttcgatggctcaagcggccagtctcctctcctcgtggtcctgtctggaaaccacaccgagcagtcgaatttcacaagccggtccaatcagctttatcttaggtggagtaccgatcacgctactagcaagaagggcttcaagattcgctacgctgccccatattgctcactaactcacccactgaaaaatggtgggattctgaatcggactgccggggctgtcgggtcaaaggtccattatttctgtaaacctggctacaggatggttggccacagcaacgctacttgcagacgcaacccactcgggatgtaccagtgggattcgctaacccctctatgtcaagccgtcagttgcgggatcccagaatcgcccggcaacgggtcatttactggaaacgaatttaccctcgacagcaaggtggtgtatgagtgtcatgaggggttcaagctcgaaagtagtcaacaagctacagcggtgtgccaagaggacgggctttggagtaataaaggcaaacctcctacttgcaagcccgtggcctgtccaagcatcgaggcccagttatctgagcatgtgatctggcggctggtgagcggatctcttaacgagtacggggcacaggtgctcctatcttgtagtccgggatactatcttgaaggttggcgcttgctgaggtgccaggctaatggaacctggaacatcggagatgagcgacctagctgcagggccggacattgcggctccccagatcctatcgtaaatggacacatctccggggacggatttagttacagagatactgtggtctaccagtgcaatcccgggtttcgtctggtaggcaccagcgttcggatttgtctgcaggatcataaatggagcggacagacccccgtatgtgtcccaatcacatgtggtcatcccggcaatcccgcccatggtttcacaaatgggtccgagtttaatctgaatgacgtcgtcaacttcacctgtaacactggatatctgctccagggcgtgtcacgagctcagtgcagatccaatgggcaatggtcatcacccctgccgacatgtcgagtcgtgaactgttctgacccagggttcgttgaaaacgccattcgtcacgggcaacagaattttcccgaatctttcgagtatggtatgtcaattctttatcattgtaaaaaagggttttacttactgggatcctccgccctcacttgcatggcgaacggcctctgggacaggagcctgccaaagtgtctggcaatctcctgtgggcatcctggcgtaccagcaaacgctgtgctgacaggcgaactgtttacatatggggccgttgtgcattactcctgtaggggtagtgagtctctgatcggcaacgacacacgcgtatgtcaggaagacagccattggtctggagccctgcctcattgcaccgggaataaccccggcttttgcggcgatcctggcactcctgcccacggaagtcggctgggagatgacttcaaaacgaagtctttgctcagattttcatgtgagatgggccaccaactcaggggatcgcctgagcgaacctgtctgcttaatgggagttggagtggactgcaacccgtgtgcgaggcagtcttgtgtcctcaaccacctccggtccagaatgggactgtggaggggagcgacttccgttggggatcttctatctcctactcttgtatggatggataccagctgagtcattctgctattctgagctgtgaaggtaggggggtctggaagggagaaattccacaatgtcttccagtcttttgtggagacccgggaattcctgccgaaggccggcttagcgggaaatcctttacgtacaaatctgaggtattttttcagtgcaaaagcccttttattctggtgggcagttccaggcgcgtgtgtcaggccgatggtacatggtccggaattcagcctacttgcatcgatccagctcataacacctgccccgaccctggcactccccactttggcattcaaaatagctcccgaggatatgaggttggctccacagtattctttagatgcagaaagggctatcacattcaaggatccactactaggacttgtctcgcaaatctgacctggtccggtattcagactgaatgcataccccacgcctgcaggcaacccgaaactccggcccacgctgacgtcagggcaatcgaccttcctacctttggttataccctggtctacacttgccatcctggcttctttctggccggaggctccgaacatagaacatgtaaagcggacatgaaatggacaggcaagtcccccgtctgcaagtccaaaggagttagagaggtgaatgaaactgttacaaagacccccgtcccatctgacgttttcttcgtcaactccctctggaaaggctattatgagtacctggggaagcggcagccggcgacgctgacagtggactggtttaacgcaacttcgtccaaggtgaatgccaccttttccgaagcttccccagtggaattgaagctcacaggcatctataagaaagaagaggctcatctactgttgaaggcatttcaaataaaaggccaagcggatatctttgtttctaagttcgaaaatgacaactgggggcttgacggctatgtatccagcgggcttgagagggggggattcacctttcagggcgatatccacggaaaagatttcggaaagtttaagctcgagaggcaggaccctttaaatcccgaccaggattcctcttcacactaccacggcacatcttccggtagcgtggccgccgcgattctcgtgccgttttttgctctgattctgtccggattcgccttttatctatataagcatagaaccagacccaaagttcaatataacggctatgccggccatgaaaacagcaacgggcaggcctccttcgagaaccccatgtatgacaccaacctgaaacccacagaggccaaagctgtgcggtttgacacaacccttaacaccgtctgtactgtggtttag

SEQ ID NO: 184107 - DNA, 10464 bp, synthetic construct
  misc_feature 1..10464: note = Description of Artificial Sequence: Synthetic coding sequence
  source 1..10464: mol_type = other DNA
atgcggctgatcagcatcgcccccggcccccggtggcaggtgcagtcacatcacccccgctccgccggacagaattgtacatttcagctgcacggaccaaacggtacagtcgaatccccgggctttccttatgggtatccaaattacgccaattgtacttggacaattacggccgaggagcagcatagaatccagctggtgttccaaagtttcgctctggaagaagacttcgatgtgctgtctgtctttgacggcccaccacagcctgaaaacctgagaaccaggttgacaggatttcaactacctgcaacgatcgtctctgccgccacaactttgagcctgaggttgataagcgactacgcagtatcagctcagggctttcatgccacgtatgaagtgctgccatcacacacctgtggtaatcccgggcgtcttccgaatggaatccagcaagggtcaacatttaatttaggggataaggtgcgatacagctgtaatctgggtttcttcctggaaggacatgctgtgttaacctgccatgccggctccgagaactctgctacttgggactttccactcccttcatgccgcgccgatgacgcctgtggaggcaccctccgtggccagagcgggatcatctcaagcccccacttcccatcagagtatcacaataacgctgactgcacatggacaatcctagccgagctgggcgatacaatcgccctggtgttcatagactttcagcttgaggacgggtacgatttcctggaggtgaccggaactgaggggagcagcctgtggtttaccggcgcgtccctacctgcccccgttatcagttcaaagaactggctgagattgcactttacaagcgatggtaatcacagacagcgaggtttctccgctcagtaccaggtgaagaagcagatcgagttaaaaagccgcggggtgaagttgatgccctcaaaggataatagccagaaaacctcggtccttacccaggtgggcgtgtcacagggccacaacatgtgtcctgaccctggcatcccagagcggggaaagcgacttgggagcgacttccggctggggtcatcagtccagttcacctgcaatgagggctacgacctgcaaggcagtaaaagaatcacatgtatgaaagtgtccgatatgttcgctgcttggtccgatcacaggcctgtgtgccgtgcccgcatgtgcgatgcgcatctgcggggcccttcaggcatcatcacgtcgcccaattttcctatacagtatgacaataacgcacattgtgtctggatcataacagctttaaatccatccaaggtaatcaagttggcctttgaggagttcgatctggagagaggctacgatacacttacagttggggacggaggtcaagacggagatcagaagacagtcttatatatactgacaggcacctctgttcctgatctgatagtgtctaccaaccatcagatgtggttactgtttcaaacagatgggtctggcagctccctcggctttaaagcctcttacgaagaaattgaacagggatcatgtggagaccccggaatacccgcctatggcaggagggagggttctcggttccaccacggagacactttgaaatttgagtgccagcccgcttttgagctcgtggggcaaaaggccataacctgtcagaaaaataatcagtggtcggcaaaaaaacccggttgtgtcttctcctgcttcttcaatttcacatctccaagcggagttgtcctgtcgccaaattatccagaggactatggcaaccacctccattgcgtttggctcattctcgcacgccctgagtccagaattcacctggcgttcaacgacatcgatgttgagccgcagtttgatttcctggtcatcaaggatggtgccacagcagaggcccctgtgttgggcacattttcagggaatcaactaccaagctctattacaagttctggacacgtcgccaggctggagttccaaactgatcattctacggggaaaagaggctttaacatcaccttcacaacttttcgtcataatgagtgccctgatcccggtgtccctgtgaatggcaagagattcggcgatagcctgcagcttggctcatcaataagcttcctctgcgacgaaggatttcttggaacacaggggtccgagactattacctgcgtgctcaaggaggggtcagtcgtatggaactccgccgttctccgctgtgaggccccgtgcggaggccatttaacatccccttccgggacaattctgtctcccggatggccaggtttttataaggacgcattgagctgtgcctgggtgattgaagcccaacccggctaccccataaaaataacctttgaccgtttcaagacggaagtcaactacgatacgctagaggtgcgggacggccgaacttacagcgctccgctgatcggagtgtaccacggcactcaggttccccaattcctgatcagcacctccaattacctgtacctgctcttcagcaccgacaagtctcactccgatattggcttccagcttcgctacgaaaccattaccttgcagtctgaccactgcctcgatcctggaattcctgtgaacgggcagcggcatgggaatgatttctatgttggcgctttggtcactttttcctgcgattccggatacacactatccgatggagaacctctggaatgcgagcctaacttccagtggagccgggccctccctagctgcgaggctctgtgcggagggttcatacagggttccagcggtaccattttgtccccaggcttcccagatttttatccaaacaacttgaattgtacttggatcattgagacatcacatggaaagggagtcttctttacattccacacttttcaccttgaaagcggccatgactacttactgataaccgagaatgggtctttcacccagcctctgaggcagctgaccgggtccagactccccgctcccattagcgctggcttgtacggtaatttcactgcccaggtgagattcatctccgatttcagcatgtcatacgagggctttaatatcaccttctcggaatacgatttggaaccttgtgaagaacctgaggtgccagcgtatagtatccgaaaaggccttcagtttggcgttggggacactctgacattctcctgcttcccaggataccgtctggaaggcacggccaggataacgtgtctgggtggccgtagacgcctgtggagtagtccacttcccaggtgtgtggcggagtgtggcaattccgtgacagggacccagggaactctgctttcgcccaattttcccgttaattacaataataaccacgagtgtatttactctatccagactcagccaggcaaaggcattcaacttaaggcccgggctttcgagctgtcagaaggcgacgtgttgaaggtgtacgatggtaataataacagcgcacggctgctgggagtgttttcccactccgagatgatgggggtgacactgaattccacatccagttctttatggctggatttcattacagacgccgagaacacttccaagggattcgagctgcacttcagtagcttcgagctcatcaagtgcgaagaccctggaacgcccaaattcggatacaaggtgcacgatgagggccattttgctggaagttccgtgtccttcagctgtgacccaggctatagcttacggggttccgaagagttgttgtgcttgtcaggggagcggcggacatgggaccgccccctgcccacctgcgtggcggaatgcggaggaacagtccggggtgaagtgtcaggacaggttctgtcgcccgggtatcctgcgccctatgagcataacctgaactgcatttggacaattgaagccgaggctggatgcacaatcgggttacattttctggtgtttgataccgaggaagtacacgacgtgctccggatctgggatgggccggtggaatctggtgtcctgctgaaagaactgagcggacctgcactgcccaaagatctgcactcgactttcaattccgttgttcttcagttctctaccgacttcttcaccagcaaacagggattcgccattcagttttcagtatcaacggccacatcttgcaacgacccaggaatccctcaaaatgggtcccgctccggagattcttgggaagccggcgatagcactgtttttcagtgtgaccccgggtacgctctccagggaagcgccgaaatctcatgtgtcaaaatcgaaaaccgcttcttttggcagcccagccccccaacatgtatagctccctgcgggggtgacctgaccggccctagtggtgtgatcctctctccgaactaccccgagccatacccaccaggtaaagagtgcgactggaaggtcaccgtgtctccagactatgtaatagctctcgtgtttaatatattcaaccttgaacctggctatgattttctgcatatttacgatggaagggacagcctgagcccgctcataggatctttctatggatctcaattgccgggcagaatagagagtagcagcaatagcctgtttctggcttttaggagtgacgcttccgtgtcaaatgccggattcgtgatagactacactgagaacccccgggaatcctgcttcgatccaggaagtattaagaacggaactcgagtaggatcagatcttaaactcggcagttctgtgacttactattgtcatgggggatacgaggtggaaggcacgtcgacattgtcttgtattctcggcccagatggtaaaccggtctggaataatcctagacctgtatgtaccgcaccctgtggtgggcagtatgtgggcagcgatggtgtggttttgtctccaaactacccgcagaattacacaagtggacagatttgcctatacttcgtcacagtgccaaaggattacgtggtgtttggacagtttgccttcttccatacagctctcaatgacgtggtagaagtgcacgacgggcatagtcagcatagccgcttgctgagttccctgtcgggtagtcatacgggagaatctcttcccctggcaacatccaatcaggtattgatcaaattctctgctaaaggtctggctccggccaggggctttcacttcgtataccaggctgtccctcgcacgagtgcgactcagtgctcatcagttcctgagccccgctatggtaagagacttgggagcgattttagtgtgggggccatagtcaggtttgaatgtaacagcggttatgccctccagggcagtcccgagatagagtgtctgcccgtgcccggagctctcgcccagtggaatgtgtcagcacctacgtgtgtggtcccctgcgggggaaatctgacagagcgtcgtggtactatactgagccccggattcccagagccatacctaaactccctgaattgcgtgtggaaaattgtggtgcctgagggcgctggcatccagattcaggtcgtgtccttcgtgaccgagcaaaattgggactctctggaggtcttcgatggcgcggacaacacggtgactatgctgggtagcttttctggcactacagttccagcattactgaatagcactagcaaccagctgtacctgcacttttactccgacatctccgtatccgctgctggttttcatttggagtataaaacggtcggcctaagtagctgtccagagcccgccgtgcccagcaatggggtaaagactggtgaacgctacttggttaacgatgttgtgagtttccagtgcgaaccaggatacgcactacaggggcacgcgcatatcagctgcatgccaggaacagtaagacgatggaactatcctccccctctgtgtatcgcgcagtgcgggggaacagtcgaagaaatggagggagttatcctaagtccaggctttcctgggaactacccaagcaacatggattgctcttggaagattgctctcccagttgggttcggagcgcacattcagttcctcaacttctccacagagccgaaccacgattacattgaaattcgtaatgggccttacgaaacatcacggatgatgggacgatttagtgggtccgagctgccttcatcacttctatcgacctctcacgaaacgaccgtttattttcattcggatcacagccagaatcgccccggattcaaactcgagtatcaggatctgacatacagccaccagatcagctcctttcttcggggatttgatctgtcagaattagagcggactaatagtacccccccagtcgctgccagttacgtgtgggatctcgaccccggctgcgaagcttatgaacttcaggaatgccccgacccagagccttttgccaacggtatagtccggggagctggatataacgttggccaatctgttacgttcgaatgcctgcccggttatcaacttaccggacacccggtcttaacctgccaacatggcaccaatcgcaattgggatcaccccctgcccaaatgcgaggtgccctgcggcggaaacattacaagctcaaacggaaccgtgtattccccaggctttccttccccctactccagcagtcaggactgtgtgtggttgatcactgttcccatcggtcatggtgtgaggctcaacttgagcctgcttcagaccgaaccatcaggagactttatcacaatatgggatgggccccagcaaacggcacccagattaggtgtgtttactaggtccatggctaaaaaaactgtgcagagtagcagcaatcaggtgttgttaaagttccatcgagacgcggccactggcggcattttcgcaatcgctttcagtgcgtaccctctgactaaatgtcctccaccgaccatactgcctaacgctgaagttgtgaccgagaacgaagagtttaatatcggtgacatcgtgagatacagatgtctcccgggcttcactctggtgggaaatgaaatcctcacatgtaaactcggcacatatcttcagtttgaggggccaccccctatttgcgaggttcactgcccaaccaatgaactgttgactgactccacgggggtcattctgtctcagagctatccaggaagctatccacagttccagacgtgtagttggctggtccgggttgagccagactacaacatcagccttactgtggaatacttcttgtccgagaagcagtatgatgagttcgagattttcgatggaccctctggccagagccctctacttaaagccctgagcggcaattatagcgccccactgattgtcactagctcttcaaacagcgtgtacttgcgctggtcatccgatcacgcttacaatagaaaggggtttaagatccgttatagtgcaccgtactgcagtctgcccagggcccccttgcacggcttcattttaggtcagactagtacccagccaggcggcagcattcactttggctgtaacgctgggtatcgtctggtggggcatagtatggcaatctgcaccagacatcctcaaggctatcacttgtggtccgaggccattcccctgtgtcaggccctgtcctgcggactacctgaagcgccaaaaaacggcatggtctttggaaaagaatacacagtggggactaaagccatgtattcatgtagtgaggggtaccacctccaggccggtgcggaggcaaccgcagagtgtttagatacaggcctctggtcaaaccggaacgtgccaccccagtgtgtgcccgttacctgcccagatgttagtagcataagcgtagagcacgggaggtggcggttgatctttgaaactcagtatcaattccaggctcagcttatgcttatctgtgacccaggttactactataccggccaacgagtgatccggtgtcaggcaaacggcaaatggtctctcggcgacagtacgccaacttgcaggatcatctcctgtggggagctgcccattcctcctaacggccataggatcggcactctctcagtatacggcgccacagctattttttcttgtaattccggctacactctggtgggctccagggtgcgggagtgcatggctaacggcctctggtcagggagtgaagtccgatgtttggctggacattgcggaacccccgagccgatagtgaacggacacatcaatggagagaactatagctatcgtggaagcgtggtctaccagtgcaatgccggattcaggttgatcggaatgtcagtcagaatatgccaacaggaccatcattggtctggcaaaacaccattttgtgttttggtaagctgcgggcacccagggtctccacctcattcccagatgagcggggatagctacacagtcggtgcagtggtcaggtatagctgcatcggaaaacggacacttgttggcaattccactagaatgtgcggactggacggacactggacaggtagcctcccccattgttcgggtactagtgtgggggtgtgcggggacccggggatccccgcccacggaatccgcctcggcgactccttcgaccccggaactgtaatgagattctcctgcgaagcgggccacgtcctccgcggtagctctgaacgaacctgccaagcgaacggcagttggagcggctcgcagcccgaatgtggagtcatctcttgcggaaatcccggcaccccttccaacgcgcgggttgttttcagtgatggcttggtgttctctagcagcatcgtgtatgaatgcagggagggctattacgccacaggacttctgtctcggcattgttccgtgaacggtacctggactggttccgaccctgaatgtcttgtcattaactgcggcgatccgggcatccctgccaacggccttaggctgggtaacgactttcgctacaacaaaaccgtgacataccaatgcgtccctggatacatgatggagagccatagggtgtcagtactgagctgtaccaaagaccgaacatggaatggcactaagccagtgtgcaaggccctcatgtgtaaacccccaccgctgattcctaacggaaaagtagtgggctctgatttcatgtggggcagttcagtgacatatgcatgcctggagggctaccagctctcgctgcctgccgtatttacttgcgaagggaatggaagctggactggagagctgcctcaatgttttcctgttttctgtggtgatcccggggttccgtcacgaggacggcgggaagaccgaggcttttcataccggtcttctgtaagcttttcatgccacccccctctggtcctggtggggagcccaagacgcttctgccagtccgacgggacttggagtggcacgcaaccgtcttgcattgaccccactttaacaacctgcgccgaccctggagttcctcaattcggcatccagaataatagccaaggataccaagtgggctccacagttctattcaggtgtcagaagggttatctgcttcaggggagcacgactcggacctgtctccccaacctgacctggtcaggaactcccccggactgtgttcctcaccattgtcggcagcccgagactccgacgcacgcaaacgtgggggccttggacttacccagcatgggttatactttaatctattcttgtcaggaaggtttcagtcttaaaggcggatcagagcatcggacatgcaaagccgatggatcctggaccggtaaacctccaatctgtcttgaagtgaggccctctggaaggcccatcaatactgccagagagcctccgctaactcaagcgctgattcctggcgacgtgttcgcgaagaactcactgtggaagggggcttatgaatatcaaggtaaaaagcagcctgccatgctgcgggtgacgggtttccaggtggccaattctaaggtcaacgcaactatgatcgatcatagtggcgtggaactgcacctagctggaacgtataagaaagaggattttcacctgctgcttcaggtatatcagatcacaggcccagtggagatatttatgaataagtttaaagacgaccattgggccctcgatggccatgtgtcaagtgagagctcaggggccactttcatctatcagggcagcgttaaagggcagggctttggtcagtttggctttcaaaggttggacctgcggctgcttgagagcgatccagagagtatcggacgacatttcgcttccaatagctcctctgtggctgcagccattttagtccccttcatcgccctgattatagctggctttgtactgtacctttataaacacaggcgccgtcccaaagtgcccttcaatggatatgcaggccatgaaaacactaatgtcagagctacctttgaaaatccaatgtacgatcggaacatccagcctacggatataatggcctctgaggccgagtttacagtttccaccgtgtgcacagctgtatag

SEQ ID NO: 184108 - DNA, 678 bp, synthetic construct
  misc_feature 1..678: note = Description of Artificial Sequence: Synthetic coding sequence
  source 1..678: mol_type = other DNA
atgtgcgacgcccacctgcggggccccagcggcatcatcaccagcccaaacttccctatccagtacgacaacaatgcccactgcgtgtggattatcactgctctgaacccctccaaagcgggcggagatcccggcaatattcaatgcaacaaggaaggcctcagcgttgaaacgcagtcactcaggctcagaaataggtcttgccttctcggtaactctaaggataatgggtgttgcgtgccaaatccagtccatggaaccggcctacaggtaattaagttagccttcgaggaattcgaccttgagcgcgggtatgatactctgactgtgggcgatggcggccaggacggggatcagaaaacagtgttgtatatcctcacaggcaccagtgtgccagatctgatcgtatccacgaatcaccagatgtggctcctgttccaaaccgacggcagtggatccagcctcggcttcaaagcctcttacgaagagatcgagcagggcagttgcggggatccaggaatccccgcctacggccgacgggagggttcaaggttccaccatggggatacacttaaattcgagtgtcagcccgcctttgagttggttgggcagaaggcgattacctgccagaagaataatcagtggagcgcaaaaaagccgggctgcgtctgcaagtag

SEQ ID NO: 184109 - DNA, 1281 bp, synthetic construct
  misc_feature 1..1281: note = Description of Artificial Sequence: Synthetic coding sequence
  source 1..1281: mol_type = other DNA
atgctgggcagcttcagcggcaccaccgtgcccgccctgctgaactctacctcaaaccaattatatctccatttctactccgatattagtgtatcagccgctggattccaccttgagtataagaccgtgggattgagttcctgtcctgaacccgcagtaccttccaatggcgttaaaacaggggaacgttatctggtgaatgacgtggtctctttccaatgcgaaccagggtatgcccttcaaggacacgcccacataagctgcatgccgggtacggtccggcggtggaactatcctccacccctctgcatcgctcagtgtggcggcacagtcgaggagatggaaggagtgattctgagtcccggttttccggggaactacccatctaatatggactgttcatggaagattgcactgccggtcggcttcggagcccatatccagttcctgaatttctccactgaaccaaaccatgattacattgaaattaggaatgggccatacgagacttcacggatgatggggaggttttctggcagtgagctgcccagtagcctactgagtacatcccacgagaccactgtttattttcactccgatcactcacagaatcgccccggtttcaagctggaatatcaggcatatgaactacaagagtgccccgatcctgaaccgtttgctaacggcatagtgaggggggctggttacaacgtgggccagtctgtaacgtttgaatgccttcccgggtatcagctcaccggccaccctgttctgacgtgccagcacggcacaaacaggaactgggatcatccgctgccgaaatgcgaagtgccttgcggcgggaatattaccagctctaatggcaccgtgtatagcccggggttcccttctccttacagttcctcgcaggattgcgtctggctgatcaccgtgccaattggtcacggagtgagactaaacctgtccttactgcagaccgagccaagtggcgatttcatcacaatttgggacggcccccagcagacagcacctcggctgggggtgttcaccagaagcatggccaaaaagaccgtgcagagttcaagcaaccaagtcctgttgaaattccaccgcgatgccgccacgggtggtatctttgctatcgccttttctgatcactgccgctactttaaccagaagtcaggtaagctggacttcacacctagctctaccctcggacagctttgcaaaaccctgcacagatctttgccacatttaaggcttcagtttctgcatttatag

SEQ ID NO: 184110 - DNA, 3504 bp, synthetic construct
  misc_feature 1..3504: note = Description of Artificial Sequence: Synthetic coding sequence
  source 1..3504: mol_type = other DNA
atggtgatcgtgatcctgttccccgccgagtgcggcaacagcgtgacagggacacaggggaccctgctttcacctaatttccccgtgaactataacaataaccacgagtgtatttactccatccaaacccaaccaggcaaaggcattcagttgaaggccagagcgtttgagctgtctgagggcgatgtgctcaaagtatatgatggaaataataactcagctcggctgctgggtgtattctctcacagcgagatgatgggggtcactctgaactcaacctcatcttctctgtggctggattttatcaccgacgcggagaacacgtcgaagggattcgagcttcatttttcttcattcgagctcatcaaatgcgaggaccccggtacacccaaatttggctataaagtccacgatgagggtcacttcgcgggctcttctgtctctttctcttgcgaccccggatactccctccgcgggtctgaagagctgctttgtctgtctggggaaaggaggacatgggacagaccactccctacatgcgtggcagagtgtgggggtactgtgcggggggaagtgagcggacaggtcttgtcaccgggctatcccgccccctacgagcataacctcaactgcatttggacaatcgaagccgaagctggctgcaccatcgggttacattttctggtctttgatactgaggaagttcacgatgtcctgcgcatctgggacggacccgtggaaagtggggtgttgttaaaggaactcagcggcccagctctccctaaggacctccattccacatttaattccgttgtgctgcaattttcaaccgatttcttcacaagcaagcaggggttcgctatccagtttagcgtatccacagccacatcatgcaacgaccccggcatccctcaaaacgggagcagatcgggggactcatgggaagccggcgacagtaccgtttttcagtgtgatccaggttatgccctacaaggctctgctgagatctcttgtgtgaaaattgagaataggtttttctggcagcctagtccacccacttgcattgccccctgtggaggtgacctgacaggcccttctggggtcatcttatcacctaactatccagagccctacccccccggcaaagaatgcgactggaaggtcactgtgtccccagattatgtcatcgcgctcgtgtttaatatcttcaacctggaaccaggatatgattttctccatatttatgacggccgcgactctctgagtccgctgattggctcattttatggttcccagttgccaggaaggattgagtcatcttcaaattccctgtttctggcctttcgtagtgatgcgagtgtatctaacgcaggctttgtcattgactatactgaaaacccaagagagtcttgttttgatccagggtcaattaagaacggtacaagagttggctccgatttgaagttgggcagctcagtcacatactattgccacggaggctacgaggtggagggaacctcaaccctaagctgtattctcggccctgatggaaaacccgtttggaacaatcctcgtccagtatgtacagctccatgcggtggccaatatgtagggtctgacggcgttgtgttgtctccgaactatccccaaaactatacatctggacagatctgcctatatttcgtgacagtaccaaaggattatgttgtgtttgggcagtttgcgttctttcacactgcactgaatgatgtagtggaagtccacgatggacacagtcagcactctcgcctcctttcgtcgctttcaggcagccataccggggaatctctgcccctcgcaaccagtaaccaggtgttgattaaattttctgccaagggtctggctcctgctagagggtttcacttcgtgtaccaagcagtcccacgcacctcagccacacagtgctcaagcgtgcccgaaccaagatacggcaaacgccttggctccgatttctccgttggagccattgttaggttcgaatgcaactccggctacgcactccagggatcacctgagatcgagtgtcttcccgttccaggtgccttagcacagtggaacgtgtcggcacctacatgcgtggtgccatgtggagggaatctgaccgagagaaggggtaccattctgtctcccggattccctgaaccttacctaaatagccttaactgcgtatggaagatagtcgtgcctgagggagccggcatccaaatccaggtggttagcttcgtcaccgagcaaaactgggactcattggaggtgtttgatggagccgacaacacggtgaccatgcttggctctttcagtggaacaacggtccctgccctgctgaactccacaagtaaccaactttacctgcacttctacagcgatatttcagtgtctgcagctgggttccacttggagtataagactgtcggactcagttcttgccccgagcctgcagttccatccaacggcgtgaagactggtgagagatacctggtgaatgatgtggtctccttccaatgtgagccaggctatgcccttcaaggacacgcacacattagttgcatgccggggaccgttaggagatggaactacccaccacctctttgtattgcacaatgcggcggcaccgtggaagaaatggaaggggtgatccttagccctggcttcccgggtaactatcccagtaacatggactgcagttggaagattgcgctccccgtcggattcggagcacatatccagttcctgaacttctcaaccgagccaaaccatgactacatcgaaatccgcaatggaccatacgagacaagcagaatgatgggcagattctccggatcagaactgcctagttcactcttgagcacctcccacgagactaccgtgtacttccattccgaccattcgcagaaccgccccggatttaagttggaatatcaggcctacgaactacaggagtgcccagatcccgagcctttcgctaacggcatcgtacgcggagccggttacaacgtaggccaatccgttacatttgaatgcttaccagggtatcaattaacaggacaccccgtcctcacctgtcaacatgggacaaacagaaactgggaccaccccctgcccaagtgtgaggtgccctgtggtggcaacattacatcgagcaatggcaccgtttattctcctgggttcccttccccctattcttccagtcaggactgcgtttggctgatcaccgtacctataggccatggcgttcgtctgaacctatccctattacagacggagccaagtggagacttcatcaccatttgggatgggccccagcagaccgctccacggctgggtgtgttcacaaggagtatggctaagaagacggtgcagtctagttcaaatcaagtactcctcaaattccaccgcgatgccgccactggcggaatctttgcaatcgcttttagcggccatcttgcagccgtctgcacactttag

SEQ ID NO: 184111 - DNA, 10896 bp, synthetic construct
  misc_feature 1..10896: note = Description of Artificial Sequence: Synthetic coding sequence
  source 1..10896: mol_type = other DNA
atgccccggagccggggccgggagctgggccggtgcggctgccccgcaggacgagccaggggcgagaccgggatttcagcccttgtacccggggccggctctagatgggggaggccccccccacctactccccctcccctgctgctgctccttggttgcggccttctgagcgtcagcgccgcagcgggacaaaactgcacatttcagttgcatggccctaacggcacagtcgaaagcccaggctttccatatggctacccaaactacgccaattgcacctggaccatcactgcagaagagcagcataggattcagctggtatttcagagtttcgctctagaggaggacttcgacgtgttatccgtgttcgacgggcccccgcagcccgagaatttacgcaccaggttgactgggtttcagctgccagccaccatcgtatcggccgccacaaccctctctctgagattaatttcagactacgcagtgtctgctcaggggttccacgccacctatgaagttctcccctcccatacttgtgggaatcccgggcgcctgcctaacggaatacagcaggggagcactttcaatctgggcgataaggtgcgatactcgtgcaacctgggattcttcctggagggacatgccgtattgacctgccatgctggaagtgagaactctgccacgtgggattttccgctcccttcatgccgggccgatgatgcctgcggcggcaccctgaggggtcagagtggtattataagctctccccatttcccgtcagagtatcataacaacgcagattgtacctggactatattggccgaactcggagatacaatcgcgctggtgttcatcgatttccagctggaagacgggtatgacttcctggaagtgacgggaaccgaggggagtagtctctggttcaccggagcttcactaccagctcccgtgatctcctctaagaactggctgcggttacatttcactagcgacgggaaccacaggcaaaggggattcagcgcccagtaccaggtgaagaaacaaattgagttgaaaagcaggggcgtgaagttgatgccttccaaggataattcccagaaaaccagcgtgctgacccaggtcggtgtctctcaggggcacaacatgtgccctgacccagggatacccgaacgagggaaaagactgggttccgacttccggttgggaagtagtgtgcagtttacttgcaacgagggatatgatctgcaggggtcaaaaaggatcacctgcatgaaggttagcgacatgttcgccgcctggagcgaccacagacccgtgtgccgggcgcgcatgtgtgacgcgcatctccgagggcctagcgggattattacaagccctaatttcccaattcaatacgataataacgctcactgcgtctggatcattactgcactaaatcccagcaaagtgatcaaactggctttcgaggaattcgacctggagaggggatacgataccctgaccgtgggcgacggcggtcaggatggcgatcagaagacggtcctttacatcctgaccggcacatctgtgcccgacctgattgtctctaccaaccaccagatgtggctgctcttccagaccgacggctccggatcctctttaggctttaaagcaagctacgaggaaattgagcaagggtcgtgcggggatccaggcattccagcatatggccgacgggaggggagccgtttccatcatggggatacactaaaattcgaatgccaacccgcattcgagctcgtcggccagaaggccataacttgccagaagaacaaccagtggtcggccaagaagcctggatgcgtattcagctgtttttttaacttcacctcgccctcgggcgtcgtacttagcccgaactatcctgaagactatggcaaccatttacattgcgtctggttgatccttgcaagacccgagtccaggatccacctggcctttaatgatatcgacgtggagcctcagtttgatttcctggtcattaaggatggagccacagccgaggctcctgttctcggcacattctccgggaaccagctgccttctagtattacttcctctggacatgtcgctcgcctggaattccagaccgatcactctaccggcaaaagagggtttaacattactttcactacatttagacacaatgagtgccccgaccctggcgtgcccgtgaatggaaaacgcttcggggattcccttcaactcgggagttcaatatcctttctgtgtgatgaggggtttctgggcacccagggatcagagaccatcacatgcgttctgaaggaaggcagcgtcgtgtggaattctgccgtgctccggtgtgaggctccttgcgggggacatttgacatccccttcaggcaccatactgtccccggggtggcccggattttacaaagacgccctttcctgcgcctgggtcatagaggcacagcctgggtatccgatcaagatcacattcgatcgctttaagaccgaggtgaactacgacaccctggaagtgcgtgacggtcgcacttattctgccccactgataggtgtgtaccacggcactcaggtccctcagttcctaataagcacctcgaactacttgtatcttttattctcaaccgacaagagtcattctgacatcggcttccagctcagatacgaaacaattactctccagtccgatcactgtttggatcctggcattccagtgaacggtcaaaggcatggaaatgatttctacgtgggcgcccttgttactttttcgtgcgattctggatacaccctgtcagacggagaacccctcgagtgtgagcccaatttccagtggagcagagctctgccttcttgtgaggccttgtgcggaggcttcatccaaggatcctctggcactatcctcagtcctgggtttccggatttctacccaaataacctcaactgcacgtggattatcgagacttctcacggaaagggggttttcttcacattccacacattccacttggaatctggccacgactacctgctcataacagagaacgggagcttcacgcaacctctaagacagctcacgggcagtcggttgccggctccgatctccgcgggattgtacggaaatttcactgcccaggtgcggtttattagcgacttctcgatgtcctacgagggattcaacattaccttttcagaatatgacctagagccctgcgaagagcccgaggttcccgcctatagtattcgaaagggcctgcagttcggcgttggtgacaccctcaccttctcctgcttccccgggtatcggctggagggcaccgcaaggatcacctgccttggcggccgccgccgcctgtggtcatctcccctcccccggtgcgtggcggagtgcggaaatagcgtgactggcacacagggtaccttactgtcaccgaacttcccagtaaactacaacaacaaccacgagtgtatttactctattcagacccagccaggtaaagggattcaattgaaagccagagcttttgagttgtcagagggggatgtgttaaaggtttatgacgggaacaacaacagcgcaagattacttggtgtgtttagccactccgaaatgatgggcgtgacgcttaattcaactagttctagcctgtggttggatttcattacagacgccgagaatacatctaaaggctttgagctgcatttttcctccttcgagctgatcaaatgcgaagaccccggtacacctaagttcggctataaagtgcatgacgagggacacttcgccggaagttcggtgagctttagttgcgatcccggttattcactgcgcggatcagaggagctcctgtgtctgtcaggcgagcgaaggacttgggataggccactgcccacatgtgtggctgagtgcggcgggactgtgaggggcgaagtgagtgggcaggttctgtcgcctggttatccggctccctacgaacataacctgaactgtatctggaccattgaggccgaggccggctgcaccataggcctgcattttctggtgttcgataccgaagaagttcacgacgttctgcgcatctgggatggcccagtagagtcaggagtccttctgaaagagcttagcggtcccgcactgcccaaagatctgcactctactttcaatagtgtcgttttacagtttagtacagactttttcacaagcaagcagggctttgccatccaattctccgtgtctacggctactagttgtaacgatccaggtattcctcagaatggaagtcggtctggcgactcgtgggaggccggagattctaccgttttccagtgtgatcctggttacgctctgcagggttccgccgagatatcttgcgttaaaatcgagaacagattcttttggcagccgtctccccctacctgtatagctccatgtggaggagatctcacaggccctagcggcgtgattctgtcccctaactacccagagccatatccgcctggcaaagagtgtgattggaaagtaacagtgtctccagattacgtgatcgcccttgtgttcaatatcttcaacttggagcccggttatgatttcctgcatatctatgacggtcgggattccctttcacccctgataggttccttctatgggtcccagcttccgggtaggattgaatcctccagtaattcactcttcctggcttttaggagtgatgcttccgtgagcaacgctggttttgttatcgactacacagagaaccctagggagagttgctttgacccgggatcaatcaaaaatggaacccgcgtgggtagtgacttgaaattaggctcttctgttacatactactgccacggagggtacgaggtggaagggaccagtacactttcatgtattctggggccggatggaaagccagtttggaacaatccacgtcctgtctgtaccgctccctgtggaggtcagtatgttgggtctgacggcgtggttttgagtcccaattacccacagaactacacaagtggacaaatctgcttgtattttgtgacagtacccaaggattatgtcgtattcgggcagttcgcttttttccatacagccctaaacgacgtcgtggaggtgcatgatggtcactcacagcacagcagactcctttctagtttgagtggctcccatacaggagaatctctgccccttgccactagtaatcaggtgttgatcaagttctccgccaagggactggccccagctcgcgggtttcactttgtgtaccaagccgttcctcgcaccagcgctacccagtgctccagtgtgcccgagcctcgatacgggaagcgtctcgggagcgatttcagtgttggggcaatcgtgcggtttgagtgtaattccggctatgcactccagggcagcccagagattgagtgtctgcctgtgcccggagccttagcccaatggaatgtttctgctcctacatgtgtagtgccctgcggaggcaacctgacagagaggcgaggtacaatcctgtctcccggttttcccgagccttacctcaatagccttaactgtgtttggaaaattgttgtcccagaaggcgccggaattcagattcaggtggtgtcgttcgtgaccgaacaaaattgggactctctggaggtttttgatggcgctgacaatactgtgacgatgctgggctcattctctggcaccacagtgcccgctcttctgaatagtacatcgaaccagctgtatctccacttctatagcgatatttccgtgagcgcagctgggttccatcttgaatataagactgttgggctgagctcttgccccgagccagcggtaccatctaatggcgtgaagaccggtgaaagatacctggtgaacgatgtggtctcatttcagtgtgagcccggttatgccctgcaggggcacgcccacatcagttgcatgcctggaaccgtccgacgttggaactatccacctccattgtgtattgcccaatgtggcggtacagtggaagagatggagggggtgatactctctccgggatttccgggcaactacccttcaaatatggactgtagctggaagattgcccttccagttggttttggtgcccatattcagttcctcaacttttccacggaacctaatcacgactacatcgagattagaaatggaccctacgagacaagccggatgatgggacgttttagcggaagtgagcttccgagcagtctcttatccactagccacgagacaacagtgtactttcatagtgatcacagccagaatcggcctggtttcaagttagaatatcaggcatacgaactccaggagtgccctgatccagagcctttcgccaacggcatcgtgagaggtgccggatacaacgtcggacaaagtgttacctttgagtgcctgcccggctatcagcttaccgggcatccggtgctaacatgtcagcacggcacaaaccgaaactgggatcacccccttcccaaatgtgaggtgccttgcggtggaaatatcactagttccaatggcaccgtgtactcaccagggttcccaagcccctatagtagtagccaagattgtgtctggcttattactgtacccatcggccatggggtgcgtctgaacctgagcctgttgcaaacagagccatccggtgatttcattaccatatgggacggccctcagcagacagctcccagactgggagtgtttacacgctctatggccaagaagacagtccaatcttcaagtaatcaagtgctgctcaaatttcaccgcgacgccgcgacaggtggtatttttgccattgccttttctgcctatcccttgacgaagtgtccaccccccactattctaccgaacgctgaggtggtgacagagaatgaggagttcaacattggggatatcgtgcgctatcgctgcttacccggcttcactctggtgggcaacgagatcttaacttgtaagctgggaacttaccttcaatttgagggccctccccctatatgcgaagtgcactgtccaaccaacgaactgctaacagatagtaccggagtgatcctctcccagtcttatcctggatcttacccccagtttcagacatgctcttggctcgtaagagtagagcccgactacaacattagtctgaccgttgagtactttctgtcagagaaacagtacgatgaatttgagattttcgatggacctagtgggcagagcccccttttgaaagctttgtcagggaattactccgcccctctgatagttaccagtagctcgaacagcgtgtatttgagatggtccagcgatcacgcttacaatcgaaaaggattcaagatccggtattctgctccctactgttcactcccccgagcccctttgcacggcttcatcctcgggcagaccagcacccagcccggagggtctatccactttggatgtaatgccggttacaggcttgtgggtcattcaatggctatttgtacaaggcacccccagggataccatctgtggtctgaggccattcctctgtgtcaggctctttcctgtggcttgcccgaggcccccaagaatgggatggtgtttgggaaagaatatactgttggcaccaaagctatgtattcctgctcggagggatatcacttacaggccggagctgaggccactgccgagtgtttggatacagggctatggagcaaccgtaatgtcccaccccagtgcgtgcccgtcacatgtccagacgtgagttctatcagcgtggaacatgggaggtggcgcctcatcttcgagacccagtaccagtttcaggcccagctcatgctgatttgcgacccaggttactactataccggccagcgggtgattaggtgccaggctaacggtaaatggtccctgggcgattctacgcccacctgccgcataatcagttgcggcgagcttcccatcccccccaacggccatagaatcggaaccctgagtgtgtacggagccaccgccatattcagctgcaattccgggtatacactcgtcgggtcacgcgtgagggaatgcatggccaacggcctgtggagtggttccgaggtaaggtgccttgccactcagactaagctccactctatcttctacaaactgctatttgacgtcctgtcttccccttcactcactaaggccggccactgcgggacgcctgagcccattgtgaatgggcacatcaacggggagaattattcctataggggctctgtcgtgtaccagtgcaacgccggattccggctgatcgggatgagcgtgcgaatctgccagcaggatcatcactggtccgggaagacaccattctgcgtgcctattacctgtggacaccctggaaatccagtcaatggcctgacccaagggaatcagttcaacctgaacgatgtggttaaatttgtgtgtaatccagggtatatggcagagggagccgctaggagtcagtgcctcgcctctggacagtggagtgacatgctgcctacttgtagaatcatcaattgcaccgaccccggacaccaggagaattccgtgagacaggttcacgccagcggcccgcacagattctctttcggaactacagtcagttatcggtgcaatcacgggttctatttgcttgggacacctgtcctcagttgccagggggatggcacttgggaccgacctcggccacaatgcctccttgtgtcttgtggtcaccctgggtctcctccccactcacagatgtcaggcgacagttataccgtcggggcagtagtgcggtacagctgtattggaaagagaacactggttggcaattccacgcgcatgtgcggcttggacggtcattggacaggatctctgccacattgcagcggaacctctgtgggagtgtgcggcgatccagggattccagcccacggaattcggctgggtgattcattcgatccaggcaccgttatgcgcttctcctgcgaagccggacatgtcctaagagggagctctgagaggacctgccaggccaatgggtcctggtctggttcgcaaccggagtgtggcgttatcagctgcgggaatcccggcacacctagcaatgcccgcgtcgtgttctccgatgggttggttttcagctcaagcatcgtgtacgagtgtcgcgaagggtattacgctactggtttgctgagtcgacattgtagtgtaaatggcacttggacaggatccgaccctgagtgtctagtgatcaattgtggagatccaggcatcccagccaacggcctgagactcggaaatgacttccgatataataagactgttacctatcagtgcgtgccaggatacatgatggaaagccaccgggtatctgtcctgagctgtactaaagacagaacatggaatggcactaaaccggtgtgtaaggcactgatgtgcaagccacccccgttgatcccaaacggcaaggtggtcggttctgacttcatgtggggaagctcagtcacctacgcgtgcttggagggttaccagctctcgctgccggccgtgtttacatgcgagggcaacggaagctggaccggagaattacctcagtgcttccctgtattttgcggggaccccggggtcccatcccgggggagacgtgaggatcgcggtttttcctacaggagctctgtgtcgttttcttgccatcccccactggttcttgtaggttcaccccggaggttttgtcagtccgacggcacctggtccggaacacaaccctcgtgtattgaccctacccttactacgtgcgctgatcccggcgtgccgcagtttggcatccagaataactcgcaggggtatcaggtgggatcaactgttctgttccgctgccagaaggggtacctgctacagggcagcacaacacgaacctgtctccctaatttgacctggagcggcacccctccagactgtgtcccccatcattgccgacagcccgaaaccccgacccacgcaaatgtaggggcgctggacttgccgagcatgggttatacactgatctattcatgccaagaagggttttctctgaaaggtgggagcgagcaccggacatgtaaagccgatgggtcctggacaggcaaaccccccatttgcctcgaagtccgtcctagcgggcgacctattaataccgccagagagcctccactgacccaagcactgattcccggggacgtctttgccaagaacagtctgtggaaaggcgcttatgaataccagggaaaaaaacaaccagctatgctgagggtgactggattccaggttgctaattctaaagtgaatgctacgatgattgaccacagtggagtggaactccatctggcaggcacttacaaaaaagaagacttccatctactcctccaggtgtaccagatcacaggtccagtggaaatctttatgaacaaattcaaggatgaccattgggccctggacgggcatgtaagtagcgaatcttctggcgccacattcatctaccagggctcagtgaagggtcagggctttggacagttcggtttccagaggttagacctgagactgctggagagtgacccagagtcaattggacgacacttcgcttctaatagctcaagtgtggcagctgcaatcctggtcccattcattgcactcatcatagctggatttgtgttatacctctataaacacagaaggagaccaaaggtgccttttaatggctacgctggacacgagaacactaacgtaagagctacttttgagaaccccatgtacgaccggaatatccagccaactgatattatggcgagcgaggctgaatttactgtgtcgactgtgtgtactgccgtatag

SEQ ID NO: 184112 - DNA, 1281 bp, synthetic construct
  misc_feature 1..1281: note = Description of Artificial Sequence: Synthetic coding sequence
  source 1..1281: mol_type = other DNA
atgctgggcagcttcagcggcaccaccgtgcccgccctgctgaactctaccagtaaccaattatatctgcatttctactcagacataagcgtgtccgccgcaggtttccatttggaatacaagaccgtgggtctgagcagctgcccagaacccgcggtgccgtcaaacggtgttaaaaccggtgagagatatctggtaaatgatgtggtttccttccagtgtgagccaggatatgcccttcagggacatgcacacattagttgcatgcctgggactgtccgcaggtggaactacccaccgccactgtgtattgcccagtgcggaggaacagtcgaagaaatggagggcgtaatattgagtcccggatttccaggcaactacccaagtaacatggactgctcctggaagatcgccctgcctgttgggtttggggctcatattcagtttctgaattttagcaccgagcctaatcatgactacatcgagatcaggaatgggccctatgagacttcccgcatgatgggacggttttctgggtctgagctaccttcttcactcctgagcacaagccacgagaccaccgtatactttcacagcgaccactcccagaatcgacctggcttcaagttggaatatcaggcctacgagctgcaggaatgccctgatcccgagccttttgccaacgggattgttaggggcgccggctataatgtaggacagagcgtcacgttcgagtgtttgcccggttaccaactgaccggacacccagtgctaacatgccaacatggaactaatcgaaattgggatcatcctctgcctaagtgcgaggttccttgcggcggaaacatcacctcctcaaacggcactgtttactctcccggatttcctagcccatattcctctagtcaggattgtgtatggctgatcactgtgcctatcggtcacggggtgcggctgaatctgtctctcctccaaacagagcccagtggcgacttcattactatctgggatgggccacaacaaaccgcccctaggctcggcgtgtttacccgctccatggctaagaagacagtgcagagttcttctaatcaggtgctcctgaaatttcatagggatgccgccacaggcgggatctttgcaattgccttttccgaccattgtagatatttcaatcaaaaaagcggcaagcttgattttacaccatcttctacactaggccagctttgtaagaccctgcacagaagcctgcctcacctgagactccaatttttgcatctgtag

SEQ ID NO: 184113 - DNA, 11124 bp, synthetic construct
  misc_feature 1..11124: note = Description of Artificial Sequence: Synthetic coding sequence
  source 1..11124: mol_type = other DNA
atgaagggcatccggaagggcgagagccgggccaaggagagcaagccctgggagcccggaaagaggaggtgtgcgaagtgtgggcgtctagacttcattctgatgaagaagatggggatcaaatctggcttcactttctggaatctggtttttcttttgactgtttcttgcgttaagggcttcatttatacttgtggcggaacacttaagggcctaaacggtactattgagagccccggcttcccttacggctatcctaacggcgccaattgcacatgggttattattgctgaagagcgaaatcgaatccaaatcgtgttccagagctttgcactggaagaggagtacgattatctgtcactgtatgatggacacccacatcccacaaatttccggacacgtttaaccggattccaccttcctcccccagtaacatccacgaagagtgtgttctccctgcggttgacctccgatttcgccgtcagcgcccacggcttcaaagtgtattatgaggaactgcagtcctcatcatgcggtaatcctggcgtaccaccaaaaggggtgctgtatgggacccggttcgacgtcggcgacaagatcaggtattcctgcgtcaccggttatattttggatggtcaccctcaacttacctgtatcgctaattcagtgaataccgcctcctgggactttccagtcccgatctgtcgggccgaagatgcatgcggcggaaccatgcgggggtccagtgggattatatcttccccttccttccctaacgaataccacaacaatgcagattgcacatggacaatcgtggcggaacccggggatacaatctcattgatcttcacagactttcaaatggaagaaaaatatgactatctcgagattgaaggtagcgagcctcccaccatctggttatcaggtatgaacatacccccaccaatcatcagtaataaaaattggctgaggctacacttcgtgaccgatagtaatcaccggtaccgcggattcagtgcgccataccagggtagctccaccctaactcatacaacaagtaccggggaactggaggaacataatcgtaccaccaccggtgccatcgccgtcgcctccactcccgcagacgtgaccgtttcgtcagtgaccgctgtcaccattcacagactttcagaagaacagcgtgtccaggtgacatcgctgcggaattcaggactggatccaaatacatccaaggacgggttgagcccccatcctgcggacacgcaatccacgcgccggcgtccgagacacgctgaacagattgagcgcacaaaagaactggcagtcgtaactcacagagtgaagaaagctatagatttcaaatcccggggcttcaagctgttccctggcaaagacaattctaacaagttttctattctcaatgagggaggaataaagactgcatctaacttatgccccgaccctggagaacctgagaacggtaaacgcatcggaagtgatttctctctcggaagcaccgtccagttttcatgtgatgaagattatgtactgcaaggcgcaaagagtattacttgccaaagaattgccgaggtgttcgcagcctggtcagaccacagacctgtttgcaaggtgaaaacatgtgggtccaatcttcaggggccttccgggacatttactagccccaacttcccgtttcagtatgacagtaacgctcagtgtgtgtgggtgatcactgcagtgaataccaacaaagtgatccagattaatttcgaagaatttgacctggagattgggtacgacacgctgactatcggagatggaggtgaagtgggcgacccacgcaccgttctgcaagtgttgaccggaagcttcgtccccgatctcattgtgtcgatgagttctcagatgtggttgcacttgcaaacagacgagagtgtcggaagtgtgggcttcaaggtcaattacaaggagattgagaaagaaagttgtggtgaccccgggacccccctctatggcattcgcgaaggtgatggattcagtaacagggatgtacttagatttgagtgtcaatttggcttcgagcttataggggaaaagtccattgtgtgccaggagaataatcagtggagcgccaatatccctatttgcatattcccttgtctgtcaaacttcacggctccaatggggacagttttgagcccggactaccccgaaggatacgggaacaacttgaactgtatctggaccattatcagtgatccaggttcgcgcattcatctgtcattcaacgactttgacttggagagtcagtttgacttcctggcagtgaaggatggggatagccctgaatcccccattctcggaacgtttactggcgccgaagtacctagccatctgacctccaacagccacatcctaagactcgaatttcaggccgatcattctatgagcgggcggggtttcaatattacatacaacacttttgggcataacgaatgtcccgatcctggaatccctattaacgccagaaggttcggcgacaacttccagctcgggtcttctattagtgtgatctgcgaggaaggctttattaagactcagggcactgagaccattacctgtatcctcatggacggcaaggtgatgtggtctggacttattccgaaatgtggggcaccctgtgggggtcatttttctgcgccttcaggcgtgatcctctcgccaggctggccaggttattacaaagatagtttaaactgcgaatgggttattgaagccgaaccaggacattctataaagataacctttgaaaggttccagacggagctgaattatgatgtcctggaagtccatgatggcccgaacctactgagccctttgctcggtagctataacggcacacaggtcccacagtttctattctcctcgagcaatttcatctatctgctcttcactacggataattcaagaagtaacaacggtttcaaaatccactacgaatctgtgaccgtgaatacgtattcttgtctagacccagggattccagtccacggcagacgttacggtcatgacttcagcattggttctacagtgtcttttagctgcgatagcgggtaccgcctctctcacgaagaaccactgctgtgcgaaaagaaccactggtggtcacacccactgcctacttgtgacgcactatgcgggggggatgtccggggcccgagcggtacaatcctctcgcctggttaccctgagttttatcctaattcgctgaactgcacgtggactgtggacgtcactcacggaaagggcgtgcagttcaacttccacaccttccacctggaagatcatcatgactatctgcttatcactgaaaatggcagctttacccaacccttggctcgactgaccggaagcgatctcccgcccactatcaacgctggcctctacggcaacttccgggcacagttgcgtttcatctccgactttagcatcagttacgaaggattcaatatcaccttcagtgaatataacttggagccttgtgaggaccctgggatcccccaatacggctcccgaattggcttcaactttggcattggcgacacactcacattctcttgctccagcggatatcggctagaaggtacgtccgaaatcatctgcctcggtggcggtagacgggtttggtccgccccacttcctcgttgtgtggcagaatgcggtgcaagcgcaactaataacgaaggcatactgctgagtccgaactaccctctgaattatgagaacaaccacgagtgcatctatagtatccaggtgcaggccggcaaagggatcaatatttcagcacggacattccatttggcccagggggatgtgttaaagatctacgacggcaaagacaagaccacacatctgctgggggcctttaccggtgctagcatgaggggactaacactgagcagcacaagcaatcaactctggctcgagtttaactcagacacagaaggcacagacgaaggtttccagctcgtatatacctctttcgagctcagccattgtgaggatccaggcatccctcagttcggttacaagatcagtgaccagggtcactttgcgggcagcactatcatttatggctgcaatcctggttacactctccatggttcatctctcctcaagtgcatgaccggagagcggagggcttgggattaccccctcccttcctgcattgccgagtgcggcggtcgtttcaaaggcgaaagctctggacgcatcctgtcaccaggatacccttttccatatgacaacaacctgagatgcatgtggatgattgaagtcgatccgggcaacatcgtgagcctgcagtttctcgctttcgacacagaggcgtcacatgacattttgagagtctgggacgggccacccgaaaatgatatgctgctcaaagagatttctgggagcctcatccctgagggaatccacagtacccttaatatcgtgactattcagtttgacaccgacttttatatcagcaaatcaggtttcgctatccagttctcctccagcgtggcaactgcctgtagggatcctggtgtcccaatgaatggtactcgcaacggggatggccgcgagcccggagatacagtcgtctttcagtgtgatccggggtatgaactgcagggcgaggagcggatcacatgtatccaggtggagaaccggtacttctggcagccttccccacccgtttgcatagccccttgtggaggaaatctgactggtagttcaggttttatattgtcgcccaatttcccccatccttacccccactctcgtgattgtgactggacgataacagtgaatgccgactacgtaatatcgctggcattcatctctttctcaatcgagccaaactacgatttcctgtacatctatgatgggcctgattcaaattcaccccttatcgggagctttcaagatagcaagctgcctgaaaggatcgagtcaagctctaatacgatgcatttagccttccgcagcgacggctccgtgtcatacactggttttcacttggagtataaggccaagttgcgggagagttgttttgatccgggaaacataatgaatggcaccaggctcggcatggactataaactagggtccactgtgacctactattgtgacgccggctacgtcctgcagggctattctacactcacgtgcattatgggtgacgatgggaggcccggatggaatcgcgctctgcctagctgccatgctccgtgtggctcaagaagcaccgggtcagaggggactgtgttgagtccaaactatccgaagaattactctgtaggacataattgcgtgtattcaattgccgttcccaaggagtttgttgtctttggtcaatttgtattttttcagacaagcttacacgacgtggtggaagtctacgacggacctacccaacagagcagcctcctctcatctctttccggatcccactctggcgaatcccttcctctttctagtggaaatcagattaccatccggtttacctcagtgggccctatcacggcgaaagggtttcacttcgtctatcaggcagtgcctcggactagtagcacacaatgtagctcagtgccagaaccacggttcggacggcgtattggcaacgaatttgcagtcggctctagcgtgctgtttgattgcaatcccggatatatcttacatggctccatcgcaattcgttgcgaaacagtccccaacagtctcgcccaatggaatgattcactgccaacatgcattgtcccttgcggcggtattctcactaaaaggaaaggaacaatcttatctccaggataccctgagccatacgataataatttgaactgtgtatggaaaatcactgtgccagaaggtgctgggatccaggtgcaggtcgtatccttcgcaactgagcataattgggactctctggatttctacgacggcggcgataataatgcacctcgcctgggaagttatagcgggaccacaattccacatctcctgaatagtacgagcaacaatctctaccttaactttcagagtgatatctccgtgagtgctgctggattccatctagagtatacggccattgggcttgattcttgcccggaacctcagactccatcgagcgggatcaagattggcgatcgctatatggtaggtgatgttgtgtcgtttcaatgcgaccaaggttattccctccagggacacagccacatcacttgcatgcctggccctgtccgtcggtggaactacccgattccaatctgtctcgctcagtgcgggggagcaatgagtgatttctccggggtgattctgtcgcctggattccccggcaactatccatcaagcttagattgcacatggactataaacttacctatcggtttcggggtgcatctgcaatttgtgaattttagcacagaaacaattcacgattatttagaggttcggtctggctcgtctgaaacatcaaccgtgatcggccggctgtctggtccccagatcccttccagtctcttttctactacacatgagacttcattgtactttcattcagattatagccaaaataagcagggcttccacatcgtgtatcaggcttaccaactgcagtcctgtcccgatccaaggccattccgaaacgggttcgttatagggaacgacttcaccgtggggcaaactatctctttcgaatgtttccccgggtacacactgatcgggaacagcgcccttacatgcctgcatggagtgtctcgaaactggaaccatcccttgccccgctgcgaagccttgtgcgggggcaacatcactgccatgaacggcacgatttattcaccagggtacccagatgagtatcccaactttcaggactgtttctggctggtgcgggtgcctcccggcaacgggatctacattaactttactgtccttcagaccgagcctatctacgactttataacggtctgggatggaccagatcaaaatagtccccaaatcggacagttctccggaaacacagcacttgaaagtgtttacagtacatcaaatcagattcttatcaaatttcatagcgattttaccacgtccggcttctttgtcctcagctaccacgcctaccagttacgcgtctgccagcccccaccaccagtgcctaatgcagagatcctgaccgaagacgatgaattcgagataggcgacataatccgctatcagtgtcttcccggctttaccttagtgggcaatgccatcctgacctgcagactgggagagagactgcagatggatggagccccccccgtctgccaagtgctttgccctgctaacgagctccgcttagattccacaggagttattctttctcctggataccccgattcctatcccaacctccagatgtgtgcctggagcatcagcgtggaaaagggctacaacataaccatgtttgtggaatttttccagaccgaaaaagagtttgacgtccttcaggtctacgatggacctaacatccagagcccggtactcatttctctgtccggtgattattccagcgcatttaacatcaccagtaatggacacgaggtgttccttcagtggtcagcagaccatggcaacaataagaaaggctttcgaattcggtacatagcattctattgttctacccccgagagccccccccacggatatatcataagtcagaccgggggacagttgaacagcgtggtaagatgggcttgcgacagaggcttccgcctggttgggaaatcaagtgcggtctgcagaaaatctagttatggctatcatgcctgggacgctcccgtgcctgcctgtcaagccatttcctgtgggattccgaaagcccccactaatgggggtatcctcaccaccgactacctggtggggacaagagtaacctacttctgcaacgatggatacagattaagtagcaaggagctaaccaccgctgtgtgtcaaagcgacggaacctggtcaaatcacaataagactccaagatgtgtggtggtgacgtgcccgtcaatcaactccttcatactggagcatgggcgctggcggatcgtgaacgggagtcactatgagtacaaaactaaggtggtgttttcgtgtgacccaggatatcacggccttggaccggcttcgattgagtgtctgccaaacgggacttggtcatggcgcaacgagcgcccatactgccagatcatttcttgcggcgaacttccaaccccacctaatgggaacaaaataggcacacagacaagctacggctccactgcaattttcacttgcgatctaggattcatgctggtgggaagcgccgtcagggagtgtctttcctccgggctgtggtcagagtctgagacacggtgcctcgccgggcactgcgggattcccgaactcattgtgaatggccaggtcatcggcgagaattacggatatagagacacagtcgtatatcagtgtaatcctggattcaggcttataggttccagtgttagaatctgccagcaggaccataactggagtggacaactgcccagctgcgttccggtatcttgtggccatcccggttccccaatctatggacgaacatccggaaatggatttaactttaacgacgtcgtaaccttttcttgcaacatcggatacctgatgcaaggtcctactaaagcacaatgccaggctaacagacagtggtcccatccgcctccaatgtgcaaggtcgtgaattgctccgaccccggcatccccgcaaatagcaaacgtgaaagcaagattgagcatggcaacttcacctatggtactgtggtattctacgattgtaaccccgggtattttctttttggaagcagtgtgttgatttgccaaccgaacggacaatgggacaagcccttacctgaatgcattatgatagactgtggtcaccccggcgttccgccaaatgccgtcctttccggagagaagtacacttttgggtcaactgtacactactcatgtacagggaagagaagtctcttagggcagtccagccgcacctgtcagctgaatgggcactggtccggtagtcagccacattgttccggcgatgccactggtacatgcggagatccaggtacccctggacatgggtcccggcaggagtctaacttcagaactaagtcaaccgtccgctacgcatgtgacacgggatatatccttcacggtagtgaagagcggacctgcctagcaaatgggtcctggaccggccggcagccggagtgcaaagctgtacagtgtggtaaccccggaaccactgcgaacggaaaggtgttccgcattgatggtacaactttctcatcaagcgttatctattcgtgcatggaggggtatatactgagcggaccaagtgtcagacagtgcaccgctaacggtacctggagtggaaccctgcccaattgcaccatcatttcgtgtggtgatccaggcataccagcaaatggactcagatacggcgatgattacgtagtcggtcagaatgtgtcgtacatgtgccaacctgggtataccatggaactgaacggtagcagaattcgcacatgtactatcaacggcacctggagtggagttatgcctacgtgccgtgccgtaacatgtcctacccccccacaaattagtaacggccgcctggaaggcacaaacttcgattggggattctctatatcttacatttgtagccctggttacgaactcagctttcctgccgtcttaacatgcgtggggaatgggacttggtccggcgaggtacctcagtgtctccccaaattctgcggagaccccggaattccggctcagggaaaacgcgaaggaaagagctttatctatcagtctgaggtctcgtttagttgcaacttcccctttattctggttgggagctctactcgcatttgtcaggctgatggtacatggtctgggtctagccctcactgcatagaaccaacgcagacatcttgtgagaacccaggcgttcccagacatggttcccagaataacaccttcgggtttcaggtaggttcggtggtgcagtttcactgcaaaaaaggtcacctgcttcagggatcaacaacaagaacttgcctgcccgacctgacatggagcggaatacagccggaatgtattccacacagctgcaagcagcccgagacacccgcccacgctaatgtcgtcggcatggatctgccaagccatgggtacaccctaatttacacatgccagcctggattcttcctggcgggcgggaccgaacacagagtctgccgcagcgacaacacctggacagggaaagtaccaatatgcgaggccggatccaagatcttggtgaaggacccaagaccagctttgggtactccttcaccaaagttatccgttcccgatgacgtttttgcccagaactacatctggaaagggagttacaattttaagggcagaaaacagcccatgactttgacggtgactagttttaacgcttctacaggtagagtaaacgccaccctgtcaaattccaatatggagctgcttctttcgggcgtgtataagagtcaagaggcccggctcatgctgcgaatctacctgattaaggtacctgcccatgcgtctgtgaagaagatgaaggaagagaactgggcaatggatggatttgttagcgccgaaccggatggtgctacctacgtattccaggggttcatccagggtaaagactacgggcagttcggtttgcagcgcctagggctcaacatgtccgaagggtccaattccagtaaccagccacatggcacaaacagcagttcggtggctatcgctattctcgtccccttcttcgcactgattttcgctgggttcggattttacctgtacaaacagcgcacagctcctaagacacaatacactggttgcagcgtgcatgaaaacaataacggtcaagccgccttcgaaaacccgatgtatgacacaaacgccaagagtgtggaaggaaaggccgtgcggttcgatcccaacctaaatactgtgtgcacaatggtgtag

SEQ ID NO: 184114 - DNA, 11004 bp, synthetic construct
  misc_feature 1..11004: note = Description of Artificial Sequence: Synthetic coding sequence
  source 1..11004: mol_type = other DNA
atgtggagctggttcctgtgctggaagcccgtgcagctggaccggcagaccgcctccggcttcatctacacctgcggaggtaccctgaaaggacttaatggtaccattgagagccccggctttccctacggttatcctaacggggcaaactgtacctgggtgatcatcgccgaggaacgcaacagaattcagatcgtttttcagagctttgcattagaagaggagtatgactatctttcactctacgatggacatccgcatccaaccaacttccggacccggctgaccggcttccacttgccgccaccagtgacgtcaaccaagtctgtgttttccttgcgcctcacctccgacttcgcggtctcagcccacggttttaaggtttactacgaagagctccagagcagttcatgtgggaatccaggagtcccccctaaaggtgtgctctacggtacccgctttgatgtgggcgacaagattaggtacagctgcgtgactggctacatccttgatggccatccccagctgacttgcattgcaaacagcgtgaatactgcatcatgggatttccccgtcccaatatgccgtgctgaggatgcatgtgggggaactatgagaggtagttcggggattataagctccccgagcttccctaacgagtatcataacaacgctgactgtacctggaccattgtggcagagccaggggacaccatctccctaatctttaccgactttcagatggaggagaaatatgattatctggagatcgaaggctcagagcctccgactatttggttaagtggaatgaacattcccccccccattatttctaataaaaattggctacgactgcactttgtcacggattccaatcaccggtatagaggttttagtgcaccttaccaggggtcctcaaccctgacgcacacaacaagcacaggtgagctggaggaacacaaccggactacaacaggcgcgattgcagttgcttcaacacccgcagatgtgacagtcagtagcgtcacagccgtgactatccatcgactgtcggaagaacagcgtgtgcaggtcacatcactgaggaattcggggctggatcctaacactagtaaggatggcttatcccctcaccctgccgatacccagtcaacacgaagacgacctcggcacgctgagcagatcgaacggacaaaagagctcgccgtggtaactcacagggtgaaaaaggctattgactttaagtctagagggtttaaactatttcccggtaaggataattccaataagtttagcatcctcaatgaagggggtataaagactgcctccaacttatgtcctgacccaggtgaaccagagaatggcaaaaggattgggagtgatttttccctgggctctactgttcagttctcttgtgatgaagattatgtcttacagggagctaaaagcattacgtgtcagcgcattgccgaagtctttgccgcgtggtctgaccatcgacccgtctgcaaggtaaaaacatgtggcagcaacctccaggggccatccgggacattcacctcacccaacttccccttccagtacgactccaatgcccagtgtgtttgggtcattacggccgtcaacaccaacaaagttattcaaattaatttcgaggaattcgacctggagatcggttatgatactctgaccattggagatggaggcgaggtgggagatccgcgtactgttcttcaggtcttgactggatctttcgtgcctgacctgatcgttagcatgtcttcacagatgtggctacaccttcagactgacgagtctgtgggctctgttgggtttaaagtgaactacaaggagattgaaaaggagagctgcggagaccctggcacccccctctatggcattcgcgagggcgacgggttctctaaccgtgatgtgctgaggttcgagtgtcagtttggcttcgagctaatcggtgagaagtccatcgtgtgtcaagagaataaccagtggtcagcgaacattccaatatgtattttcccttgcctttccaacttcactgcgccaatgggtactgtgctcagtcccgactacccggaaggctacggaaacaatctgaattgcatttggacaataataagtgatcctggctcccgtattcatctctcttttaatgatttcgacctggagagtcaattcgattttctcgctgtgaaggacggagattctcccgaatccccaattctgggaacctttacaggcgccgaggtgccgtcccatctcacaagtaattcacatatactccgtttggaatttcaggccgaccactccatgtcgggccgaggctttaacatcacctacaatacatttggccataacgagtgtcctgatcctggcatccccattaatgctagacgcttcggggacaactttcagctgggaagtagcatcagtgtgatatgcgaggagggcttcatcaaaacacagggtacagagactatcacatgcattctgatggacggtaaggtgatgtggtcaggactgatcccgaaatgcggggccccttgcggcgggcacttttctgcccccagtggggttattctttctcctggctggcccggatactataaagatagcttgaactgtgaatgggtcatcgaggccgagccgggacactccatcaagatcacttttgaacggttccagacagagttaaattatgacgtgctagaagtgcacgatggaccaaacctactgtcgcccctcttgggcagttacaacggcactcaggttccacaattcctctttagttcctctaacttcatttacttactgttcacgaccgacaattcccgcagtaataatggatttaaaatacactacgagagtgtcacggtaaatacttactcctgcctggatccaggcatccccgttcatgggagaagatacggacacgactttagcattgggtccaccgtctcatttagctgcgatagcggctacaggctcagtcatgaggaaccgcttctttgtgagaagaatcactggtggagccacccgcttcctacctgcgatgctctctgtggcggtgatgtgcgcgggcctagcgggacaatcctgtcacctggatatccagagttctatccaaattcactcaactgcacttggacagtcgatgttacccacggtaaaggcgtgcagttcaacttccatacatttcacttggaagatcatcatgattatttgttgatcacagagaacgggagcttcacccagccgttggccagattaaccggctcagaccttccccctaccatcaacgccggactttacggcaattttagggcacagctgaggtttatctccgacttctctatctcctatgaaggattcaatatcaccttttcagaatataatctggaaccatgcgaagacccaggcataccacagtatggatccaggatcgggttcaacttcggcatcggagacacattgacattttcctgctcctcaggatatagattggagggcacatcagaaatcatttgcctgggcgggggacggagggtctggtctgcccctctgcctcggtgtgtggccgagtgtggagctagtgctaccaacaatgagggcatcctgttaagccctaactatccgctgaattacgagaacaaccatgagtgcatttattcaatacaggtgcaagccggaaaaggcatcaatatctcagccagaacctttcacctggcacagggtgatgtcctgaagatttacgatgggaaggataaaactacgcacctgctgggcgcctttaccggtgccagcatgcgcggcctcaccctgtcttccaccagtaatcagctgtggttggagttcaatagcgacacagagggcacagacgaaggctttcagttagtgtatacatcattcgagctttctcactgcgaagaccccgggataccccaattcggatacaaaatttcagatcaggggcactttgcaggcagtaccattatttatgggtgtaacccgggttacaccctccacgggagcagtctacttaagtgcatgactggggaacgcagggcatgggactatcctctcccctcttgcattgccgagtgcggaggaaggttcaagggagagagcagcgggcgaatactcagcccagggtatccgttcccttatgacaataatttacggtgtatgtggatgatcgaggtggacccgggtaacattgttagcttgcaatttctggcttttgataccgaagccagccacgatatcctgcgggtctgggatgggcctccagaaaacgacatgctcctgaaagagatatccggaagcctgatccccgagggcatccatagcactttaaatatagtcaccattcaatttgatactgacttttatatctcaaagtcaggcttcgctatccaattcagttcttctgttgcaaccgcctgtcgggaccccggtgtgccgatgaatgggactagaaatggtgatggacgtgaaccaggcgacactgttgtgttccagtgtgacccaggatacgagctgcagggagaggagcggatcacctgcattcaggtcgaaaatcggtatttctggcaaccctccccccctgtctgcattgctccatgtggcggaaacttaacgggtagctctggcttcattctcagtcctaatttccctcatccttacccacatagccgagattgtgactggaccataacagttaacgccgattatgtcatcagcttggcctttatctctttctccatcgaaccgaattatgatttcctgtatatctatgacgggccggacagtaatagccccctgattggtagttttcaggactccaagctcccggaacgtatagaatcaagttctaatacgatgcatcttgcattccggtccgacggtagtgttagctatacaggatttcatttagaatacaaggccaaattgagagagtcctgtttcgatccgggaaacatcatgaatggcacccgcttaggcatggactacaagctcggctcaacggtgacctactactgcgacgctggctacgtcctccaggggtattcgacactcacatgtatcatgggagatgacgggagacccgggtggaatcgtgccctgcctagttgccatgccccatgcggctcgaggagcacgggatccgaaggcacagttctgagccctaattaccctaagaactatagcgtgggacacaattgtgtgtacagcatcgccgttccaaaggaattcgtggtttttggacaattcgtgttttttcagacgtccttgcacgatgtggtggaggtatatgatgggcccacacagcagtctagcttgttgtcttccctcagcggatcccactcgggcgagagcctgccactgtcgtcaggtaatcagataaccatacgcttcacgagtgttggccctataaccgcaaaaggatttcacttcgtgtaccaggctgtgcctcgcactagcagcacacagtgcagctcagtaccagaaccacggtttgggaggagaattggaaacgagttcgctgtgggatcctctgtgctgttcgattgcaaccccggttacatcctgcacggcagcatcgctattcgttgcgaaacagtcccaaactccctggcccagtggaatgatagcttaccaacctgcattgttccatgtgggggcattctgaccaagagaaaaggtaccattctcagtccaggctaccctgagccctatgacaataacctgaattgcgtgtggaagatcaccgtgccggaaggcgctggcattcaggtgcaggtggtctccttcgccaccgagcacaactgggattcgttggacttctacgatgggggtgacaacaacgcccccaggcttggcagttacagtggaactacaatacctcacctcctcaattcaacatcgaataatctctacctaaattttcagagtgatatatcagttagcgctgccggcttccatttagaatataccgcaattgggttagactcatgcccggagccccagacacccagctcgggcattaaaatcggggaccgctacatggtcggcgacgtcgtgtcatttcagtgtgatcagggatactctctacagggccactcccacatcacttgtatgcctgggccagtgaggagatggaattatcctatacccatctgcctcgctcagtgtggcggggcaatgagtgatttctcaggagtgattctgtctccaggattccccggcaattacccctccagcctcgactgcacctggaccatcaatcttcccattggatttggggttcacctgcagttcgtgaatttttctaccgagacaatccacgactatttagaagtacgttccgggtccagcgaaactagtaccgtcattggccgtttatcaggtcctcaaatcccatcctcactattctccactactcacgagacttccctctactttcactccgactacagtcagaacaaacagggattccacattgtgtaccaggcataccagctccagagttgcccagatcccagacctttccgcaatggcttcgttatcggaaatgatttcacagtgggccagacgatttcttttgagtgttttcccgggtataccctgataggtaattccgcactgacttgtctacatggtgtgtctagaaattggaaccaccccctgcccaggtgtgaggcactgtgcggtggtaacatcactgcaatgaacgggaccatctactctcccgggtatccggacgaataccctaacttccaggactgtttctggctggtgcgtgtacctccagggaatggtatttacattaattttaccgtactccagaccgaaccaatctatgattttattactgtctgggatggccccgaccagaacagccctcaaattggccaattcagtggcaatacagccttggagtccgtgtactcgaccagtaatcagatcctgatcaagtttcattcggatttcacaacgtccggcttctttgtcctgtcttaccacgcataccaacttcgtgtttgtcaaccaccccctccagtgccaaatgctgaaattttgactgaggatgacgagtttgaaataggtgatattattcgttatcagtgcctcccagggttcaccctggtgggcaatgcaatcctgacatgcagactgggggaaaggcttcaaatggacggagctccacccgtttgccaggttctgtgtccagccaacgaactgcggcttgacagcactggcgtgatactgtcacctggctatccagattcatacccgaacctccaaatgtgcgcgtggtcaatttccgttgagaagggctataacatcactatgttcgttgagttttttcagacggagaaagagtttgatgtgctgcaagtctacgacggacccaacatccagtctcctgtcctgatttcgttgtcaggcgattactccagcgcctttaatatcaccagcaatggacacgaagtgtttctacagtggagcgcggaccacgggaataacaaaaaggggttccgcatccggtatatcgccttctactgttcgacgccggagtctccaccgcatggctacatcatcagtcagaccggcggacagctcaactcagtggtgaggtgggcctgtgacagaggattcaggctcgtgggtaagtcgtctgcggtatgccggaagtcatcttacggttatcatgcatgggatgcacccgtccccgcctgccaggcaatcagctgcggtatacctaaagcgcctactaacggcggaattttaactaccgattacctcgtagggacacgggttacttacttctgtaatgatggatacagactgtcatccaaagaattaaccacagccgtgtgtcagtcagatggtacgtggagtaatcacaacaaaactccacggtgtgtcgtggtgacatgcccatcaattaactctttcatcctggagcacggaaggtggcgtatagtcaatggcagccactacgagtataagacaaaggtggtttttagttgtgatcccgggtaccatggcctggggccggcctcgatcgagtgcctcccaaatggtacctggtcctggcgcaacgaaagaccctattgccagatcatcagctgcggcgagttacccactcctcctaacggaaacaaaattggaacgcagacttcttacggcagtactgctatcttcacctgcgaccttggattcatgctcgttgggagcgccgtgcgcgagtgtttaagcagcggcctttggtcagagtccgagacccgctgcttggcaggtcactgcggcatccccgagcttatcgttaatgggcaggtgattggcgaaaactacggttatagagatactgttgtataccaatgtaacccgggcttcagactcatcgggtcgagtgtaagaatatgtcagcaagaccacaactggtcagggcagctgccaagttgtgtcccagtatcttgcgggcacccgggaagccccatttacggccggacgtccgggaacggcttcaacttcaatgatgtggtgacattctcatgcaacattggatacctgatgcaggggcccacaaaagctcagtgccaggctaatagacaatggagccacccgccacccatgtgtaaggtagtcaactgcagcgaccccggcattccagcaaactccaagcgggaaagcaaaatcgaacatggcaattttacctacggcactgttgtgttctatgattgtaatcccggctattttctgttcggatcctctgttctgatctgtcagcccaacggccagtgggataagcctctcccagagtgcatcatgatagattgcggccaccctggtgtgccaccgaatgccgtgctgtctggagagaaatatacgttcggtagcacagtacattattcttgtaccggtaaaagatccctcctaggtcagagctccaggacttgccagctgaacggccattggagtgggtcccagccgcattgtagcggagacgctaccggtacatgcggcgacccaggaacaccgggacacggatcccgccaagaatccaacttccgtaccaaatccactgtgagatacgcctgcgacactggctatatccttcatggaagtgaggagaggacatgtctggccaatgggtcctggactggccggcagcctgagtgcaaagctgttcagtgcggcaaccccggtaccacggccaacggcaaggtgtttcgaattgatgggacaactttctcctcctccgttatctacagctgcatggaggggtacatattatctggtcctagcgtcagacaatgcacggctaacggcacttggtccggtaccctgcctaattgcaccatcatcagttgtggtgatccaggtatccctgcaaacggactgcggtacggagatgactatgtcgtaggccagaacgtgagttacatgtgtcaacccgggtacacaatggagcttaacgggagcagaattcgcacatgtacgattaacggcacctggtccggagtgatgcctacatgcagggccgtgacatgcccgacaccaccccagatcagtaacgggagacttgaagggaccaacttcgactggggcttttccatctcttacatttgctcccccggctatgaactgtccttcccggcagttttgacttgtgtcgggaatgggacatggagcggagaggtccctcagtgtttacccaaattctgcggagatcccgggatccccgcccaggggaagagagagggcaaaagctttatttaccaaagcgaagtctccttcagctgtaacttcccttttatcctggtaggctcttcaacaagaatctgtcaggcagacggcacttggtccgggagtagtccgcactgcattgagcccacgcagacatcctgtgagaatccgggagtgccccggcatggttcccagaacaatactttcgggtttcaggtggggtccgtagtgcagttccactgtaagaaagggcatctgcttcagggaagtacaactagaacctgcctcccagacctgacttggtcgggcatccagcccgagtgcatccctcatagctgcaaacaacccgaaacccccgctcacgctaacgtggtgggaatggaccttccaagccacggatacacccttatctatacatgtcagcctggttttttcctggccggggggaccgaacatagggtgtgtagaagtgacaatacatggacaggcaaggtgccgatttgcgaggccgggagtaagatactcgtgaaagatccaagacctgcactgggaacccccagccccaaactgtccgtacccgatgatgtcttcgcccaaaactacatttggaagggtagctataattttaaagggcggaaacagccaatgacattgactgttacctcatttaacgccagcactggccgcgtgaacgctaccttgagcaacagtaacatggaactattgctaagcggggtctataaaagccaggaggcgcgactcatgttgagaatctatttgataaaggtcccagcacatgctagcgttaaaaaaatgaaggaggagaattgggccatggacggtttcgtgtccgccgaacccgatggggccacatacgtgtttcaggggttcatccagggcaaggattatggccaatttggccttcagcggttggggcttaatatgtccgagggctctaattcctctaaccagccgcacggaactaattccagcagcgtcgcaatcgctatactggttccatttttcgccttaatctttgctgggttcggattctatctgtacaagcagcggacggctcctaaaacacagtatactggctgttcggtccacgagaacaacaacggtcaggcagcatttgagaaccctatgtatgacacaaatgccaaatccgttgaagggaaggcagttcgcttcgaccccaacctgaatacagtttgcactatggtgtag

SEQ ID NO: 184115 - DNA, 10914 bp, synthetic construct
  misc_feature 1..10914: note = Description of Artificial Sequence: Synthetic coding sequence
  source 1..10914: mol_type = other DNA
atgaagggcatccggaagggcgagagccgggccaaggagagcaagccttgggagcccgggaaaaggaggtgcgcaaaatgtgggagactcgactttatactgatgaagaagatgggaatcaaatctggatttactttttggaatcttgtctttctgctcactgtgtcttgcgttaagggtttcatctacacttgcggcggaaccttaaagggtttgaatggcactatagagagccctggttttccatacggatacccgaatggcgcaaactgcacctgggtgataatagcagaggaaagaaataggatccagatcgtattccagagcttcgcacttgaagaggagtacgattacctgtcactgtatgacgggcacccccacccaactaatttcagaacccggttgacgggttttcacctgcccccacctgtgacctcgaccaagagcgtgttctccctcagactcacttcagacttcgcggtgtctgcccacggattcaaagtctactacgaggaacttcaatctagttcctgcggcaatccaggggtgccgcccaagggggtcttgtatggaactcgattcgatgttggtgacaagatccgttatagctgcgtaacagggtacatactggatgggcatcctcagctaacctgtatagccaactcagtaaacactgcctcttgggatttcccagtgcctatttgccgcgccgaggacgcatgcggggggacaatgcgggggagttcagggattatctcttcccccagctttcccaatgagtaccataacaatgctgactgtacgtggacgattgtagcagagccaggagacacaataagcttgatttttaccgatttccagatggaggagaagtacgactatctcgaaattgaaggctccgagccccccaccatatggctgagcggaatgaacatacctccacccattattagtaataagaattggctaagactgcatttcgtgacagactctaatcatagatacagaggattctccgctccatatcagggttctagtaccctcacacacacaacttcaactggcgagctggaagagcataacagaaccacaacaggcgctattgctgtcgcttccacccccgccgacgtgaccgtttcttcagtgacggcagtgacaatccaccgtcttagtgaagagcagcgggttcaggtcacctctcttcggaattctggactggatcctaatacctccaaggatgggctcagcccacaccctgcggacacccagtccactagaaggaggcctcgccatgctgaacagattgaaagaacgaaagagctggctgtggttactcacagggtaaagaaggctatagactttaagtcacgcggttttaaactgtttcctggaaaagacaacagcaacaaattctccatcctgaatgagggtggcattaagaccgcatcaaatctgtgcccagatcccggagagcccgaaaacggaaagaggatcggatcagacttctccctgggatctactgtgcagttttcctgtgatgaggattacgttctgcagggagcaaagagcattacgtgccaacggatcgcagaagtatttgccgcgtggtccgatcaccgccccgtttgtaaagttaagacctgcggctctaatctgcagggtccgagtggtacctttacctctccaaatttcccttttcaatatgattctaatgcacagtgtgtgtgggtcattactgccgtgaacacaaataaggttattcagataaactttgaggaatttgatctggaaatcggctacgatacactgaccattggcgacggaggagaagtgggggatcccaggactgtccttcaggtcctcaccgggagttttgtacccgatcttatcgtgagcatgagttctcagatgtggctgcaccttcagaccgatgagagcgtgggctctgtaggattcaaagtgaactataaggagatagaaaaggagagctgtggtgatccgggaacccctctctacggaattcgggaaggagacggcttcagtaacagggacgtcctgagattcgagtgtcaattcggcttcgaactgatcggagaaaagtctatcgtgtgtcaagagaacaatcagtggagcgccaacattcctatctgcatcttcccatgtctgagcaacttcactgccccaatgggtacagtgctctcccctgactatccggagggctacggaaataacctcaattgcatttggacgatcatcagtgaccccggctccaggatccatctgtctttcaatgattttgacctggagtctcagttcgacttcctggcagtcaaggatggtgacagccctgagtcccctatactgggcacgtttacaggagcagaggtccctagtcatttgactagcaatagtcacatactgcggttggagttccaggctgaccatagcatgtcagggagaggattcaacattacgtacaatacatttggccacaatgagtgtccggatcccggaataccaataaatgctaggcgtttcggcgacaattttcagctgggttcctccatttccgtcatatgcgaagagggatttatcaaaactcagggcactgaaacaatcacctgcatcctgatggatggcaaggttatgtggtctggactgatccctaaatgtggggccccatgcggtggacacttctcagccccgtccggggtgatcctgagtcctggctggcctgggtactacaaagatagtctgaactgtgagtgggtgattgaggctgagcctggacacagtatcaagataacctttgaacgattccagaccgaactgaattatgatgtcctggaagtccatgatggccccaacctcttgtcccctttactgggatcatacaatggcactcaggtgccccagtttctcttcagctcttcaaattttatctatctgctgttcactacagataactccagaagcaataatggcttcaagatccactacgaatccgttaccgtgaatacctattcctgcctggatcccgggattccagttcacgggaggcgctacgggcacgacttctctatcggcagcacagtttcattctcatgcgatagcggatatcgactgagccatgaagagcctctcttatgtgagaaaaaccactggtggagccacccactgccaacctgtgatgccttatgtgggggggatgtgcgcggtcccagtggcaccattctctcacctggctatcccgaattttaccctaatagtctgaactgtacctggaccgtagacgtcacacatgggaaaggggttcagttcaactttcacacatttcacctggaggaccatcacgactatctgctgataaccgaaaacggctccttcacccagccgctggccagactgaccgggtccgacctgccacccaccataaacgcgggcctgtacggaaatttccgtgcccagttgcgcttcattagcgatttctcaatcagttacgaaggctttaatatcaccttttccgaatacaatctggaaccttgtgaagatcctggcattccccagtatggatccaggatcggctttaacttcggtatcggggacactttgacattctcctgttcttctgggtacagactggagggcacttccgaaattatttgtctgggcggcggcaggcgggtgtggagcgctcctttgcctcgatgcgtagccgagtgcggggcctcagccaccaacaacgagggtatactgttgtcaccgaactatcccttgaactacgagaacaatcatgagtgtatctacagtattcaggtgcaggcgggtaaggggatcaacattagcgcgcgaacgtttcacctggcgcaaggcgatgttcttaagatatacgatggaaaggataagactacacacctcttgggagcgttcacaggagcctcaatgagagggttgacccttagttccacatccaaccagctctggctcgagttcaactctgacacggaggggacagacgagggatttcagctggtatatacatccttcgagctgtcacattgcgaagatcctggcatacctcagttcggttacaagatctctgatcaggggcatttcgcaggttccactatcatttatggctgcaaccctgggtatacccttcacgggtcttccctactgaaatgtatgactggggagaggagggcctgggattaccccttaccctcgtgtatcgccgagtgcggtgggcgctttaagggggaatctagcgggcggatcctctcacctgggtacccattcccttatgataacaacctccgctgcatgtggatgatcgaggtcgaccccgggaacatcgtcagtctgcagtttttggccttcgatactgaggcctcccatgacattctcagagtctgggatggcccaccggaaaacgatatgctgctaaaagaaatctctggcagtttgataccagaaggcatccattcaactctgaacatcgttacaatccagttcgacacagatttttatattagcaaatcaggttttgccatccaattttcttcatcggtggccactgcctgccgggatcccggagtgcctatgaatggcacacgcaatggcgacgggagagaacccggggacaccgtggttttccagtgcgatcccggctatgagctccagggggaggagcgaattacttgcatacaggtggaaaataggtacttctggcaacccagtcccccagtgtgcatcgccccatgtgggggcaacctcacagggagttcaggatttatcctgtccccaaactttcctcatccatacccacacagtcgggactgtgattggaccatcaccgtcaatgccgattatgtaatatcccttgctttcatttcttttagcattgagccaaattacgactttctctacatatacgacgggcctgattctaattcccccctaattgggtcatttcaggactctaagttgcctgaaaggattgagtcatcaagcaatacaatgcacttagccttcagatctgacgggtctgtgagttatactggttttcacctcgagtataaagccaaattgagagaatcatgctttgaccccgggaatatcatgaacggcaccaggctcggcatggactacaaattggggtcaaccgtcacctattactgtgacgcagggtacgtgctgcagggatactctactctaacatgcatcatgggagacgatggtcgccccggttggaaccgcgcgttaccctcctgtcacgcgccctgtggctccagatctaccgggtcagagggcacggtcctcagcccaaactaccccaagaactacagcgtcggccataattgcgtctattctatcgcagtgccaaaggagtttgcggtgcctagaacctcttccacccagtgtagtagcgtccctgaaccacgattcggtagacgaatcgggaatgaatttgcagtgggatcctctgtcctgtttgattgcaatccagggtacatcctgcatggcagcatcgccataaggtgcgaaactgtgccgaacagcctggcccagtggaacgatagcctccctacatgcatcgttccctgcgggggaatcttgaccaaacgcaaaggaaccatcctgtcacccggttatcctgagccttacgacaacaacctgaactgcgtgtggaagatcacagttccggagggcgcgggtattcaggtccaggtagtgagtttcgctacggagcacaattgggatagcttagacttctatgacgggggcgacaataacgccccaagactgggctcatatagtggtactaccatccctcatctgctgaactccacgagtaacaatctgtatttaaacttccagagcgatatttctgtatccgcagctgggttccacctcgaatatacggcaattgggctggactcttgcccagaaccccagaccccatcctctgggataaaaatcggggacagatacatggtcggggatgtggtatcttttcagtgcgaccaaggatatagcctgcagggtcatagccacattacctgcatgcccggtccagtgcggagatggaattaccccatcccaatttgccttgcacagtgcggtggcgctatgtcagatttttctggagtgatcttgtccccaggtttccccgggaactacccttcttccctggattgtacgtggaccatcaatctgcctatcggttttggcgtccacctacagtttgttaattttagcacagaaacgatccatgattacctcgaggtgagatccggctcctcagagacctcaacagttatcggccgcctgagtgggccgcagatcccatcctccctgttcagcacaacccacgagactagcctttattttcatagcgactactctcagaacaagcaagggttccacatagtgtatcaggcgtaccagttgcaaagttgtcctgatccccgtccatttcgaaatgggtttgtgataggaaatgacttcaccgtgggccagaccatcagttttgagtgtttcccaggctacactttgattggaaatagcgctctcacctgcctgcatggcgtaagcagaaactggaaccatccattgccaaggtgcgaagcactgtgtggggggaatatcacagctatgaatggaacaatatacagccccggctacccagacgaataccctaattttcaggattgtttctggctagttcgcgtgccgcctggaaacgggatctacatcaacttcaccgtactgcaaacagagcctatctatgattttataaccgtttgggatgggcctgatcagaattcaccgcagatcggccaattttccggtaacacagccttggagagcgtctatagtacaagcaatcagattctgataaagttccatagtgatttcactaccagtggcttttttgttctgtcataccacgcatatcaattgcgagtctgccagcccccaccgccagtgccaaatgcggaaatcctgaccgaagacgatgaatttgaaattggcgacatcatacgctatcagtgtctcccgggctttacactggtcggtaatgccatccttacctgtcgacttggagagcggctccagatggatggcgcacctcctgtatgtcaggtgctgtgccctgcaaacgaactcagactggacagcaccggcgtgattctgtctcccggctatccagactcatatccaaacctgcagatgtgtgcctggtcaataagcgttgaaaaagggtataacatcactatgtttgttgaattctttcagaccgaaaaagagtttgacgtgttacaggtgtatgacggtccaaacatccagtctcccgtgttgatctcgctgtccggcgattacagctctgcttttaacattacttctaatggacatgaggtctttttgcagtggagcgccgaccatggcaataacaaaaaaggctttagaattagatacatcgccttttattgctctacgccagaatcaccgcctcacggatatattattagtcagaccggcggacagctgaattcagtggtccgctgggcttgtgacaggggcttcaggctggtcgggaaatcttctgctgtctgtaggaagtcgtcatatggctatcacgcgtgggacgcgccagtgcccgcatgccaggcaatttcctgtgggattcctaaggcccccaccaatggagggatcctgaccacagattacctagtcggaaccagagtgacttacttttgtaacgatggctaccgcctctcgtccaaggagctcaccacagcggtctgccagtctgacggaacatggtccaatcacaacaagactcctagatgtgtggtcgtgacttgtccttcaatcaacagctttatcttggaacacggtcgctggcgtatagtcaacggatctcactacgagtataagacaaaagttgtgttctcctgtgatcctggctaccacggcctcggtcctgccagtatcgaatgtctgcccaacggaacctggagttggcgcaacgagagaccatattgtcaaattatctcatgtggcgagcttcccacacctcctaacggtaacaagattgggactcagactagctacgggtcgaccgccatattcacatgcgacctgggctttatgctggtgggctcagccgtgcgggagtgcctgagctctgggttgtggagtgagtccgaaacccgctgccttgctggacactgcggcatcccggagctgattgttaatgggcaggtcattggagaaaactatgggtaccgggacactgttgtgtatcagtgtaatcccggatttcgccttatcggctcctcggtcagaatttgccaacaggatcacaattggtccggacagctcccctcctgcgtccccgtgagttgtggacaccccggtagccctatttatggccgaacatcaggaaacggcttcaactttaacgacgtggtgacattcagttgcaatatcggctatttgatgcagggtcccacgaaagcccagtgtcaggcaaaccgtcagtggagccacccaccccccatgtgtaaagtggttaactgttctgaccctggcatccccgccaattctaagcgagagagcaagatcgaacacggaaacttcacatacggaacggtggtgttctacgattgtaacccaggatactttttgtttggctccagcgtcctcatatgtcagcccaacggacagtgggataaaccactgcctgaatgcattatgatagattgcggccaccctggagtgccgcctaacgctgttctatctggtgagaaatatacttttggatctaccgtccattatagctgtacaggcaaacgttcccttctgggacagagcagccgaacctgccagctcaacggccactggtctgggtcccagcctcactgcagtggtgatgcgactggaacatgcggtgatcccggcacaccagggcacggtagtcggcaagaaagcaatttcagaacgaaatccactgtgagatacgcgtgcgatacaggctacatcctgcacgggagcgaggaacgtacatgcctggcaaacggctcttggaccgggaggcaacctgagtgcaaagccgtccagtgcggcaatcctggaaccaccgctaacgggaaggtatttcgaatcgatggcacgactttctcatccagcgtgatatacagctgcatggagggatacatactgtcgggtccatctgtcaggcagtgtactgccaatgggacctggtcaggtacgttgccaaactgcactattatttcatgcggtgatccaggaatccctgctaatggtctgagatacggagacgattacgtggtgggtcaaaatgtttcctacatgtgtcagcccgggtatactatggagctcaacgggagcaggattagaacatgtacgattaacggcacttggtctggagttatgccgacatgtagagccgtgacctgtcctaccccccctcagatctcaaatggtcggctggagggaacgaattttgactggggtttcagtatctcttatatctgtagccctggatatgaactgagctttccagccgtgctgacctgtgtgggtaacggcacgtggtcgggggaagttcctcaatgcctacctaagttttgtggggatccaggcatccccgcacagggtaaaagggaggggaaaagtttcatttatcagtctgaggtgtctttctcatgtaacttccctttcattctggtcggctcatccactcgcatatgccaggctgatggcacatggtccggaagttcaccccactgcatagagcccacacaaacctcatgcgagaatcccggggtgcctcgtcacggctctcaaaacaacaccttcggtttccaggttggttccgtagttcaatttcactgcaagaagggccatctgcttcaagggtcaacaacacgtacctgtctccctgacttaacgtggagcggtatccagcctgaatgtatcccacactcctgcaagcagcctgagacccctgcacatgctaatgtggtaggcatggacttaccatcccatggctacactctgatttacacctgccagccaggtttctttctggctggtggaacagaacatcgcgtgtgtcggtctgataacacctggactggaaaagtgcccatatgcgaagctggttcgaagatcctcgtgaaggacccaagacctgctctggggacaccctctcccaagctgagcgtgcctgatgacgtgttcgcacagaattatatctggaaagggagttataactttaaaggcaggaaacagcctatgacactaacagtcacctccttcaatgcatctaccggacgagtgaatgctactctctcaaactcaaatatggagttattgcttagcggggtgtataagtcccaagaggcccgcctcatgttgcgcatctatctcatcaaggttcctgcccacgcctcagtaaaaaagatgaaagaggagaattgggcaatggatggattcgtttctgctgagcccgacggcgccacttacgtgttccagggctttattcagggcaaggactacggccagtttggcctccagcgcttaggactgaacatgtcggagggaagcaactcctctaatcagcctcatgggacaaattcctccagtgttgctatcgcaattttggttccattctttgcacttatcttcgcgggctttggattctatctgtataaacagagaaccgctccgaaaacccagtacaccggttgcagcgtgcacgaaaataataacggacaggctgctttcgaaaatcccatgtacgacacaaatgcaaagtccgtggaggggaaggcagtcaggttcgatccaaatttgaacacggtctgtactatggtttag

SEQ ID NO: 184116 - DNA, 10617 bp, synthetic construct
  misc_feature 1..10617: note = Description of Artificial Sequence: Synthetic coding sequence
  source 1..10617: mol_type = other DNA
atgaagggcatccggaagggcgagagccgggccaaggagagcaagccttgggagccgggcaaacggcgctgcgcaaaatgtggcaggttagacttcattctgatgaagaagatgggaatcaagtcgggatttactttttggaacctggtttttctacttactgtgagctgtgtgaaaggcttcatttatacctgcggagggaccctgaagggactgaatggcaccatcgaaagccctggcttcccgtacgggtacccaaatggagccaactgtacctgggtcatcattgccgaggagaggaaccgcattcagattgtcttccagtctttcgctttggaggaagaatacgactatctgtccctgtacgacgggcacccacatcctacaaactttagaactcggctgacaggattccacctgccccccccagtgacctccactaaatccgtgttttccttgcgcctgacatctgattttgccgtctctgcccatggttttaaagtgtactacgaggagctccagtcctcgagctgcggaaaccccggagtgccaccaaaaggagtgctatacggaactaggttcgacgttggcgacaaaatccgctatagctgtgtgacaggatatattttggacggccacccccaactcacttgcattgcgaacagcgtcaacacagcaagttgggattttcccgtcccgatttgtagggctgaagatgcctgcggagggacaatgcgcgggtcatcaggcatcatctcttcaccatcctttccaaacgaataccataacaacgcggactgcacatggaccattgttgctgagccaggcgataccatttctctcatcttcacggactttcagatggaggagaaatatgattacctggaaattgaggggagcgaacctccaacaatatggctctctggcatgaacattcctccgcccataatttctaacaagaactggcttcgtttacattttgtgaccgattcaaaccaccggtacaggggatttagtgcgccctatcaggttaaaaaggccattgatttcaagagtcgcggcttcaaattatttcctgggaaagataactccaataagttcagtatcttgaatgaggggggaatcaaaactgcctctaacttatgtccagatccgggagaacctgagaacggaaaaagaattgggtccgactttagcctgggtagtacggtccaattcagctgtgacgaagactacgtacttcagggtgccaagtccattacctgccagcgcatcgccgaagtgttcgctgcttggtcagaccacagacctgtttgtaaagttaaaacctgtggaagcaacctccagggccccagcggaacatttactagtcctaattttcccttccagtatgactcgaatgcgcaatgcgtgtgggttataacggctgtaaacacgaacaaggtcatccagatcaactttgaagagttcgacctggagatcggctacgacacacttaccataggcgatggcggggaggttggggaccctcggactgtgctacaagtgctgacagggagcttcgtgccagatttaatcgtctctatgagtagccagatgtggctgcacctacagaccgacgagagcgtcgggtcagtcgggtttaaagtcaattataaggagatagaaaaagaatcttgcggcgatcccgggactcctttgtacggaatccgagagggggatgggttctctaacagagacgtactaaggtttgagtgccagttcggctttgaactgattggtgaaaaatcaatcgtatgtcaagagaacaatcaatggagcgccaatattcctatctgtatattcccctgcctgtccaactttaccgccccaatgggcaccgtgctcagcccagactatcctgaaggctatggtaataatttaaactgcatctggaccattatcagcgaccccggcagtcgcattcacctgtctttcaacgactttgatcttgagtctcagttcgacttcctggctgttaaagacggagacagccccgaatccccgattcttgggacatttaccggcgccgaggtccctagccatctgactagcaactctcacattctgagactggaatttcaggccgatcacagtatgagcggccgaggattcaacatcacatacaacaccttcgggcacaatgagtgtccggatcctggcattcccatcaatgcaaggcgattcggagacaactttcagctgggctccagcatatcagttatttgtgaggagggttttataaagacacagggcaccgaaacaataacctgtattttaatggacggtaaagtgatgtggtcagggctgatccccaagtgcggggctccttgtgggggccactttagcgcgccatcgggcgtgattctttcacctgggtggcccggatactacaaagatagcctgaactgtgaatgggtgatcgaagctgaacctggtcatagcatcaagatcactttcgagagatttcagaccgaacttaactacgacgtcttggaagtccatgacgggcctaacctgctctctcccctgctcgggtcttataacgggacccaggtcccgcagtttcttttctcctctagcaacttcatttacttactgtttacaacagataatagcagatctaacaacgggttcaaaatccattatgaatctgtgactgtgaatacctactcctgtttggacccaggaatcccggtacacgggagacggtatggccatgatttcagcatcggatctaccgtcagtttctcttgtgacagcgggtatagacttagccatgaggaaccactgctttgtgagaaaaaccattggtggtcccaccctctcccgacctgtgacgcgctttgtgggggcgatgtgagaggacctagcggaaccatcctgtcaccaggatacccagagttttacccgaactcactgaattgtacatggacagtggatgtgacccacggtaagggggtgcagtttaattttcacacatttcacctcgaggaccaccatgactacctgttgattacggaaaatggctctttcacccagccactggcccggctcaccggttcagacctaccacctaccataaatgcaggactgtacgggaacttcagagcgcagctacgcttcatttctgacttctctatcagctatgagggctttaatataacattcagcgagtataatcttgagccgtgtgaagaccctggaatacctcagtatggcagcaggataggatttaatttcggcattggagatactttaacatttagttgtagctctggctaccgacttgaaggaacatcagagataatttgcctagggggaggccggagagtctggtctgcccccctgcctcgctgcgtcgccgagtgcggagcgtcagccaccaataatgaaggcatactactgagcccaaattacccgctgaattacgagaataatcatgagtgtatctactctatccaggttcaagctgggaaaggtattaacatctccgcgagaaccttccatctagctcaaggagatgtgttgaagatttacgacggtaaggataagaccacgcatctgttgggggcgtttaccggggcaagtatgcgggggttgaccctttcaagcacaagtaaccagctgtggctggagtttaacagcgatactgaaggcacagacgagggatttcagctggtgtatactagtttcgaactctctcactgcgaggaccctggcattccacagttcgggtacaaaatttctgatcagggacactttgccgggagtacgatcatttacggctgtaatccaggttacacattgcatgggtcaagtctgctaaagtgtatgacaggcgagcgacgggcatgggattaccccttgccttcatgcatcgccgagtgcgggggacgctttaagggcgaaagctcaggaaggatactgtctcccggctatccctttccctatgacaataatttgaggtgcatgtggatgatcgaagtagaccccggcaacatcgtcagccttcagttcttagcttttgatacagaagcatcacatgacatccttcgggtctgggatggcccccctgagaatgacatgctgctgaaggagatatctggctccttgataccagaagggattcactccacactcaacatcgtcacaatccagttcgacactgatttttacatcagtaagtcaggatttgcaatccagttctcctcttcggtagctacagcgtgtagggatcccggagttcccatgaacgggacgcggaatggagacggacgggaacctggggacacagtcgtgttccagtgcgaccccgggtatgaactgcaaggggaggagagaatcacctgcattcaagtggaaaataggtatttctggcagccatctcccccagtatgcattgccccctgcggtgggaacctcacaggctcaagcggtttcattctctctcctaatttcccacacccgtacccgcacagcagggattgtgattggacgattacggttaatgctgactatgtgatttctttggcctttatcagcttctctatcgagcctaattatgattttctgtacatatacgacggaccggactccaattccccgctcatcggctctttccaagatagcaaactgcctgaacgaatcgaaagcagctcaaatactatgcatttggccttccgcagtgacggtagtgtcagttacactgggtttcatctagaatataaggcgaagctgcgagaaagttgctttgaccctggaaatatcatgaacggcactagactgggaatggactataagcttggttctaccgtgacatattattgcgacgctgggtatgtgctacagggttactccacacttacctgcattatgggtgatgatggacgccctgggtggaacagggcccttcccagctgccacgctccatgcggctccaggtctaccggttcagaggggacagtcctgagtcccaactaccctaagaactattccgtaggtcataattgtgtttactcaatcgcggtccctaaggagttcgttgtttttggccaatttgtgtttttccaaactagtctgcacgacgtggtggaggtgtacgacgggcctacacaacagtcaagcctacttagttcactgtccgggtcacactctggggagagtcttcccctctccagcggcaatcagattactattagatttaccagtgtcgggcctattacagccaaagggttccatttcgtgtatcaggctgtgcctagaaccagcagtacccagtgcagctctgtgcccgagcccaggtttggacgcagaatcgggaacgagttcgccgtgggttcttcagtgctgtttgattgtaatccagggtatatacttcatgggagcatagccatcagatgtgaaacggtccctaatagtctcgcacagtggaatgatagcctgcctacctgtatagtcccatgcggagggatcctcacaaagcggaaaggcactattttgtctcccggttacccagagccctacgataacaacctgaattgcgtgtggaaaataacagtgccagagggcgctggcatacaagtccaggtggtgagctttgcaactgagcataactgggactccctggacttctacgacggtggggacaacaacgcgcctagacttggaagctacagcggaactacaatcccccaccttctcaacagcacaagtaataatctgtacctgaactttcagagcgacatcagcgtgtccgcagcagggtttcacctcgaatacaccgccattggactggacagttgccccgaaccccagaccccctcgagcggcataaagatcggggatagatatatggtgggggacgtggtcagttttcaatgtgaccaaggatacagcctgcagggccactctcatataacatgcatgcccggcccagtacggcgatggaattatcccattcccatatgtctggcacaatgcgggggggccatgtccgacttctcaggggtcattctcagccccgggtttcccggcaattatccaagtagtctggactgcacttggaccatcaatctccccattggcttcggagtccacctgcaatttgtaaatttttccaccgaaactatccacgactacctggaagtgcgcagcgggtcaagtgagacatcgactgtcatcggccgcttgtccgggcctcagatcccttcctccctgttttccacaacccacgagacctccctctacttccactcagattatagccagaacaagcaaggcttccatatagtgtatcaggcttatcaactccagtcttgtcccgatcccagaccatttaggaacgggttcgtaatcggcaatgattttaccgtaggccagacgatcagttttgaatgcttccctggatatacattgattggaaacagtgccctgacctgcctccatggcgtgagtcggaattggaaccatcccctcccacgatgcgaagccctatgtggcggtaacattaccgccatgaacggcacaatttatagcccaggttatcctgacgagtatcccaactttcaggattgcttttggcttgtgcgtgtccccccaggaaatgggatatatatcaattttactgtgctccagacggaacctatatacgacttcattaccgtttgggacggtcccgatcagaactctcctcaaataggccaattcagtgggaacacggctttagaatccgtgtatagcacgtccaatcagatactcattaaatttcattctgactttaccactagtggattcttcgtcctctcataccacgcgtaccagctgcgtgtgtgccagcctccccctccagtgcctaacgctgaaattctgacagaggatgatgaattcgagatcggcgacataatccggtaccaatgtctccccggattcacactcgtaggcaacgcaatactgacctgccgactgggggagcgactgcaaatggacggagcacctcccgtgtgtcaggtgctgtgccccgcaaacgaactgcgcctggattccacgggcgtgatcctgagccctgggtaccctgatagttatcctaatctgcaaatgtgtgcctggtctatatcagtcgaaaaaggatataacatcacaatgtttgtcgaattcttccaaacagagaaggaattcgacgtgctgcaggtgtatgatggccccaacattcagtcccccgtacttattagcctgtctggcgactattcatctgccttcaacataacatccaacgggcacgaagtgtttctgcagtggtccgccgaccacggaaacaataagaaaggattccgcatacgctacattgcattctactgtagcacacccgagtctcccccacatggatacatcataagtcagactggcggtcagctcaacagtgtggtgcgatgggcttgcgatcgggggtttaggctcgtcggtaagtcgagtgctgtttgccgcaagtctagctacgggtaccacgcatgggacgctcccgtcccggcgtgccaggctatcagttgtggaattccgaaagccccaactaatggcggcatcctgaccacagactatctggttgggacgcgcgttacatacttctgcaatgatggttaccggctttcttcaaaggaattaacaactgctgtgtgtcagagcgacggaacctggagcaaccacaacaagaccccgcgatgtgtcgtgattagctgtggggaacttccaacacccccgaacgggaacaaaattggaactcagaccagctacgggtcgaccgcgatatttacatgtgacttagggtttatgttggttggtagcgcagttcgggagtgcctgtcatccggactgtggtcagaatccgagacaagatgcctggctggtcattgcggaataccagagttgatcgtgaatggacaggtaatcggagaaaattacgggtaccgtgatacagttgtataccaatgcaaccctggctttagattaatagggtccagcgttagaatttgtcagcaagaccacaattggagcggacaattaccctcatgcgtacccgtcagctgtggtcacccgggatccccaatatacggtcggaccagcggaaatgggttcaacttcaacgacgtcgtgaccttctcctgtaacatcggatacctgatgcaaggtccgacaaaggcccagtgtcaagctaatcgacagtggtcgcacccgccccccatgtgcaaagttgtcaattgttctgatcctggtatccccgcgaactctaagagagagagcaagatcgagcacggaaacttcacttatggaacggtggtcttctatgactgtaatccaggctacttcttgtttggctccagtgtcctgatatgccagccaaatggacagtgggataagcctctcccagaatgtattatgatcgattgcggacaccctggcgtgccaccaaacgccgtcttgagcggcgagaaatataccttcgggtcgaccgtgcactattcatgtacagggaagagatctctgctcggtcagtcgtccagaacctgtcagctgaatggacactggtccgggagccagccgcactgctctggggacgccaccggaacatgtggcgatcccggcaccccaggacacggttctaggcaggaatctaatttccgcaccaaaagcacggtgcgctatgcctgcgacaccgggtacatccttcacggaagcgaggagcggacatgtctagccaatgggtcttggaccgggcgccagccagagtgtaaggctgtgcagtgcgggaatccaggcaccactgctaatgggaaagtgttcaggattgacgggaccaccttttcatcatcagttatatattcgtgcatggaaggttatattctgagcgggccatccgttcggcaatgcactgctaacggaacctggtccgggacccttccgaattgcaccataatatcctgtggggatccgggaatcccggctaatggcctaagatacggagacgattatgtagtggggcaaaacgtctcttatatgtgccaacccgggtacaccatggagcttaacggctctcgaatccgtacctgtactattaacggaacttggtctggcgttatgccgacgtgccgagcagtgacatgccccacacctccacagatttccaacgggcgactagagggaacaaacttcgattggggattctccatcagttatatctgctctccgggctatgagctcagctttcctgctgttcttacatgtgtcggcaacgggacctggtccggcgaggtcccccagtgccttcccaaattctgtggcgatccaggtatcccagctcagggaaaacgcgaaggtaagtcattcatctatcagtctgaggtgagcttttcttgcaatttcccgttcatactggtaggatccagcacaaggatttgccaagccgacggcacttggtcaggatcctctccccactgcatcgaacctactcagacatcctgtgagaaccctggagtaccgcgtcatggtagtcagaataatacatttggctttcaagttggatcagtggtgcagtttcactgcaaaaagggacatctcctgcagggttccaccacacggacctgtttgccagatctcacatggtctgggattcagcctgagtgcataccccactcttgtaagcaacctgaaacaccagctcacgcgaacgtggtgggaatggatctgccttcacacggatacaccttgatttacacttgccaacccgggttttttttagccgggggcaccgaacatagagtgtgccgttctgataatacctggactggtaaggtgcctatttgtgaggccggttccaagatcctggtgaaagatcctagacccgcactggggactccttctccgaagctgagcgtgccggacgacgtcttcgcgcaaaactacatctggaagggaagttataacttcaaggggcggaagcagccaatgactctgacggtgacatcattcaatgccagtactgggcgagttaatgcaactctgagtaattctaatatggaactccttctctccggggtttacaaatcccaggaagcacgcctgatgttgcgcatttatctcatcaaggtcccagcccatgcatcagtgaagaaaatgaaagaagagaattgggccatggatggatttgtgtcggcagagcctgatggtgccacctacgtgtttcaaggttttatccagggaaaagattacggacagtttggtcttcaacggctgggcctcaatatgtccgaaggaagcaactcttcaaatcagccccacggcaccaattccagctccgtggctatcgccatcctcgtgccttttttcgctctgattttcgctgggttcggtttctatctttataaacaaagaacagcccccaagacccagtacaccggttgcagtgtgcatgagaataataacgggcaggcagcgttcgagaatcccatgtacgatactaatgctaagtcagtggaaggcaaggccgtgagatttgatcccaacttgaatacagtttgcacaatggtatag

SEQ ID NO: 184117 - DNA, 2511 bp, synthetic construct
  misc_feature 1..2511: note = Description of Artificial Sequence: Synthetic coding sequence
  source 1..2511: mol_type = other DNA
atggccggcctgaactgcggcgtgagcatcgccctgctgggcgtgctgctcttaggggctgcccggctcccaaggggggcagaggctttcgagatcgcactgccacgggaatctaatataactgtgttgatcaagctcggtaccccgacattgctggccaaaccctgctatatagtgatcagcaagagacacattacgatgctgtccataaagagtggggagagaatcgttttcacattttcatgtcagagccccgagaatcacttcgttatcgagatccagaaaaacattgattgtatgtccggcccatgtccattcggtgaggtccagctgcagccttctacttcccttctccccactctgaaccgtacgtttatttgggatgtgaaagcccacaaatccatcgggctggagctgcagttttcaatccccaggctgaggcaaattggaccaggtgaaagctgccccgacggcgtgactcacagtatctctggacgcatagacgctaccgttgtgcgtattgggactttctgctcaaatggcactgtgtcccggataaagatgcaggagggcgtaaaaatggccttacacctgccctggtttcatccccggaatgtgtcgggcttcagcattgctaacagatcctcaattaagcgcctttgcatcattgagagcgtgttcgagggtgagggatcagccaccttgatgtccgctaactaccccgagggatttcccgaagacgagctgatgacatggcagttcgtggtgccagctcatctgcgggcttcggtatccttcttgaactttaaccttagcaactgtgaacgcaaagaggaacgcgtcgaatattacattcccggctctacaactaatcctgaggtgtttaaattggaagacaagcagcccggaaacatggccggaaatttcaacctgtccctccagggctgcgaccaggacgcgcagagccctggcatcctccgactgcagttccaggtgctggtgcagcaccctcaaaatgaatccaacaaaatctatgtagtagatctctctaatgaacgagcaatgtctctcactattgagccccggccagttaagcaatcaaggaagttcgttccaggttgcttcgtctgtctggagagtcgaacctgttcttcaaatttaaccctcactagcggtagtaagcacaaaatcagcttcctgtgtgacgacctcacacgcctgtggatgaatgtggagaagactattagttgtaccgaccataggtattgtcaaagaaagagctattctctgcaagtaccgtccgatatcctccacctccccgttgagcttcacgacttttcctggaagctcctggtcccaaaggacagactcagcctcgtgttagtgcccgcccagaaacttcagcaacatacacacgaaaaaccctgtaatacctctttcagttatcttgtcgcctctgccattccttcacaggatctgtattttggtagcttctgtcccggaggaagcattaagcagatacaggtgaagcagaatatctctgtgacattgcgcactttcgcccccagtttccagcaggaggcttcccgacaggggctaacagtgtcctttattccatactttaaagaagagggcgtttttacggtgacccctgacaccaagtctaaagtgtatctgcgcactccaaattgggaccgaggcctcccatcattgacctccgtgtcctggaatatttccgtcccacgcgaccaagtcgcctgtctcacttttttcaaagagcgctcaggagtggtgtgtcagacaggacgcgccttcatgattattcaggaacagagaactcgcgccgaggagatcttttcattagatgaagatgtcctgcccaagcccagctttcaccaccactccttctgggtgaatatctcgaactgctcgccaacgagcggcaaacagctggacctgttgttcagtgtcaccttgacccctcggaccgtggatctgacagtgattttgatagctgccgtagggggaggggtcctgcttttgtcagccttgggactgatcatctgttgtgttaagaaaaagaagaagaagacaaataagggcccagcagtaggcatatataacgataacattaacactgaaatgccacggcagcctaagaaatttcagaaaggaaggaaggacaatgatagtcatgtctacgccgtaatcgaggacactatggtctatggacatctactacaggattcctccgggagtttcttacaaccggaggtcgacacgtaccgaccgttccagggcaccatgggtgtttgtccaccttctccgccgaccatttgcagccgcgcgccgactgctaaacttgctacagaagaaccaccaccaaggagtcccccagaatcggaaagtgaaccgtatactttctcacatcctaacaacggcgacgtatctagcaaagatacagacatccctcttttgaacactcaagagcccatggaaccagcagaatag

SEQ ID NO: 184118 - DNA, 1032 bp, synthetic construct
  misc_feature 1..1032: note = Description of Artificial Sequence: Synthetic coding sequence
  source 1..1032: mol_type = other DNA
atggccggcctgaactgcggcgtgagcatcgccctgctgggcgtgctcctgctcggcgctgccaggttgccgaggggagccgaggctttcgagatagccctccctcgagaatcgaacattaccgtgcttataaagcttgggaccccaaccctactggctaagccttgctacatcgtgattagcaaacggcacataaccatgctatccatcaaaagcggcgagcggatcgtgtttacatttagttgccaatcccccgaaaatcactttgttatagagatccaaaaaaacatagattgtatgtcaggcccatgcccctttggggaagtccaactacaaccctctacctctctgctgcccaccctgaatcgaacattcatttgggatgtcaaggctcacaaatctattgggctcgagttacagtttagtataccacgtttgcgtcagatcgggcctggagaaagttgccccgacggggtaacccactccatcagcggccggatcgacgccacggtggtgaggattggcacattctgtagcaatgggaccgtctccaggataaagatgcaagaaggcgtgaaaatggcactgcaccttccttggttccatcctcgcaacgtgtccggctttagtatagcaaaccggtcaagcatcaagcgattgtgcataattgagagtgttttcgagggggaagggtcagctaccctcatgagtgccaactaccctgagggcttccctgaggacgagcttatgacctggcaatttgtggttcccgcgcatctgagagccagcgtatctttcctgaacttcaacttgagcaattgtgagcgaaaggaggagcgcgtggagtactacataccgggatctactacaaatcccgaggtgtttaagctagaagataaacaaccgggaaatatggctggtaacttcaacctatccttgcagggttgcgatcaggatgcacagtcacctggtatcttgaggctgcaatttcaggtcctggtccagcacccgcagaacgagagcagcgagtag

SEQ ID NO: 184119 - DNA, 513 bp, synthetic construct
  misc_feature 1..513: note = Description of Artificial Sequence: Synthetic coding sequence
  source 1..513: mol_type = other DNA
atgatgaacatgagcctgcccttcctgtggagcctgctgaccctgcttatttttgctgaggtgaacggagaggctggagagctggaactccagcggcagaagcgctccatcaatctgcagcagccacgtatggccaccgagcgcggcaatctggtgtttctgaccggctcggcacagaatatcgagttccggactggctccttaggtaagattaaactgaacgatgaagatctgagcgaatgtttgcaccagatccaaaagaacaaggaggacataatcgagctaaagggatccgctatcggcctaccccagaatattagttctcagatctatcaattgaactcaaagttagtagacctggaacggaagtttcagggcctgcagcagacagttgataagaaggtatgttccagcaacccctgccagaatggtggaacatgcctcaatcttcacgattccttcttctgcatttgcccaccacagtggaaggtatcccatctgctgtttggttag

SEQ ID NO: 184120 - DNA, 10872 bp, synthetic construct
  misc_feature 1..10872: note = Description of Artificial Sequence: Synthetic coding sequence
  source 1..10872: mol_type = other DNA
atgatgaacatgagcctgcccttcctgtggagcctgctgaccctgctgatttttgccgaagtgaatggagaggcaggcgagctcgagttacagcgccagaaaaggtccattaacctccagcagcctagaatggccactgagcgcggcaatttagtctttcttacaggtagcgctcagaacattgagtttagaacaggcagccttggtaagatcaaactcaacgacgaggatctgagtgagtgcctgcaccaaattcaaaaaaataaagaagacattatcgaactgaagggcagcgccattgggctaccccagaatatttcctcccaaatctaccaattgaattcaaagttggtggacctggagcgcaaatttcagggtctgcagcagacagtggacaagaaagtgtgcagctccaacccatgtcagaacggcggcacttgcctgaatcttcacgacagtttcttttgcatctgtccaccgcaatggaagggtccactgtgtagcgccgacgtgaatgagtgtgaaatctatagcggtaccccactctcctgccaaaatggcggaacgtgcgtgaataccatggggtcttactcatgtcactgtccccccgaaacctatggaccccagtgtgctagcaagtatgacgactgtgagggcgggagtgttgctcgttgtgtacacggaatctgtgaggacctcatgcgtgagcaggctggggagcccaaatattcatgcgtgtgcgacgccgggtggatgtttagcccaaactcgccagcctgcactctcgaccgggatgagtgctcgtttcagcccggaccgtgcagcaccctggtccagtgttttaatacccagggctcattctattgcggtgcatgcccaaccggctggcagggaaatggctacatttgcgaggatatcaacgagtgtgagattaacaatggaggttgctccgtagccccaccggtagagtgcgtgaacacccctggtagcagccactgtcaggcatgcccccccggctatcagggggacggtcgggtgtgtacgctcaccgatatatgctccgttagtaacggtggctgtcatccagatgcgtcctgcagtagcacccttggcagtctgcccctttgcacctgtctgcccggatacaccgggaacggctatggtcctaacggatgcgtgcagctgtccaacatttgtctttctcatccatgtctgaatggccaatgcattgataccgtgagcggctacttttgtaaatgtgactccggatggaccggagtcaattgcaccgaaaatatcaatgaatgtctttctaacccgtgtcttaacggcgggacctgcgtagacggtgttgattctttttcctgcgagtgtacacgtctgtggactggcgccctctgccaagtgcctcaacaggtttgcggggaaagtctttcaggcataaacgggagctttagctaccggtccccagatgtaggttatgtccatgatgtgaactgcttctgggtcattaagactgagatgggcaaggtcctcagaattactttcaccttcttcaggctggaatccatggataattgcccacacgaatttctgcaagtttatgacggcgatagcagttctgccttccagctggggcgcttttgtggaagctctctgccccacgaattactgtcctcagataatgcactgtacttccacctgtactctgagcatctcaggaacggcagaggttttaccgtacggtgggagacccagcagccggagtgtgggggcatccttacaggcccctatggctccattaagagtcctggctatccgggcaactatccccctggaagagactgtgtgtggatcgtggttaccagtcccgatctcctggtgacgtttactttcggaacccttagcctggaacaccacgacgattgcaacaaggattacctggaaatcagagacggccctctctatcaggatcccttgctgggaaaattctgtactaccttcagcgtgcctcccttgcaaactaccggtccttttgcacgcatacacttccactctgactcgcagatcagtgaccagggattccatatcacctacctgaccagtcccagcgacttgcggtgcggcggtaattacaccgatccggaaggcgagctgttcttacctgagctgtcagggccttttactcataccaggcagtgtgtgtatatgatgaaacaacctcaaggtgagcagatccagattaatttcactcacgtggaactgcaatgccagagcgacagttcgcagaattatatcgaggtgcgcgatggagaaactctcctgggcaaagtatgtgggaacggaacgatcagccatattaaatcgataacaaattcggtttggattcggttcaaaattgatgcatccgtggagaaagcgagctttagggctgtgtaccaggtcgcatgtggggacgagttaacaggggagggcgtgattcggtctccattctttccaaacgtatatcccggggagaggacatgcaggtggaccatacaccagcctcaatcccaggtgattctgctgaattttacggtgtttgaaatcgggtcttcagcacattgtgaaacagattacgtggaaatcggttctagctctattcttggctccccagagaacaaaaagtactgtggcactgacataccaagctttataacatccgtgtataactttttgtatgtcacattcgtaaaatcgagtagcaccgaaaaccacggatttatggcaaagttctcagcggaggacttggcctgcggcgagatacttacagagagcaccggaacaatccagtcccccggtcacccaaatgtgtatccacatggaattaattgtacttggcacattctggtgcaacctaaccacctaatccatcttatgttcgagacttttcacctcgaatttcactataactgtaccaatgactatctcgaagtgtatgacacggatagtgagacaagcctagggaggtactgtggcaagtccatccctcctagtttaacaagctctggtaacagcctgatgctggtctttgtgacagacagcgacctcgcctacgagggattcctgattaactacgaagcaatttccgccgccacagcctgtctacaggactacactgacgatctgggaacttttacatctcctaactttccaaataactatccaaacaattgggagtgtatatacaggataacagtccgtacaggacagcttattgctgtgcactttaccaacttttccctggaggaagcgatcggcaactactacactgatttcctcgagatccgcgatggagggtacgagaagagtccgctgctgggcatattttacggctccaatctgccccccacaattatctcacattccaacaagctatggctgaagtttaagtctgaccagatcgatacgaggtcaggctttagcgcttactgggatgggagtagcacaggttgtgggggaaatctcaccacctcatccgggactttcatttcacctaattaccccatgccttactaccattccagcgagtgctactggtggttgaagagcagccacggttccgcatttgagcttgaattcaaggactttcatttagaacatcatcccaattgcaccctcgactacttagccgtctacgacgggccatcctctaattcccatctgctgacacagctttgtggcgatgagaagcctcccctcatcagatcatcgggagactctatgtttattaaactgagaacagacgagggccagcaaggacgcggtttcaaagcagaatacagacagacctgcgaaaatgttgtgatagtaaaccagacgtatgggatactggagtccattggctatcccaatccttactctgagaaccagcattgtaattggactattcgtgccacaaccggcaacactgtgaactatacctttctggcattcgatctcgagcatcacattaattgtagcacagactatttggagctttatgacggtccgcgccagatggggcgctattgtggtgtagatttacctccaccaggtagtaccacgtcttcaaagctgcaggttctgctcttgacagacggggttgggcggcgggaaaaaggattccaaatgcagtggttcgtttacggttgtggaggcgagctcagtggggcgactggatcctttagcagccccggctttcccaacaggtacccacccaacaaagaatgtatctggtacatcagaacagaccccggctcctccattcagctgactatccatgactttgacgtggaataccactccagatgcaacttcgatgttcttgaaatttacggagggccggattttcacagcccgaggatcgcccagctgtgtacgcagcgaagccccgaaaacccaatgcaagtttcgagcacgggcaatgagctggccatcagatttaaaaccgatctatcaattaacggccggggtttcaacgcaagctggcaagccgttaccggcgggtgcggagggatcttccaggccccctcaggagagattcactcaccgaactaccctagcccctaccgctctaacaccgactgcagctgggttatccgggtggaccgaaaccaccgagtgctgttgaactttactgattttgacctcgagcctcaggactcctgcattatggcttatgacgggttgtctagcactatgtcaagacttgctaggacatgtgggcgggaacagcttgcgaacccaatcgtgtcttccggcaattccctgtttttacgcttccagtcaggccccagtagacagaatcgagggttccgggctcagttcaggcaagcttgcgggggccacattttgacctcctcttttgacaccgtgtcttcaccacgcttcccagccaactaccccaataatcagaactgttcttggatcatccaggcccagcctccactgaatcacataacactgtccttcacacattttgaactggaaaggtccaccacctgcgcaagagatttcgtggaaatcttggatggcggacacgaggacgctccgttacgcggcaggtactgtggcactgacatgccccatcccattacgtcgttcagctctgctttgaccctccgcttcgtgtccgactcctccatctctgccgggggtttccacacaaccgttactgcttcagtctcggcctgtgggggcacattttacatggccgaaggaatcttcaacagccctggctatcctgacatctatccgcccaatgtagagtgtgtgtggaacattgtctccagtcctggtaatcgattgcaactgtcgttcatatcattccaattggaggattcccaggactgcagcagggattttgttgaaattagagagggaaatgccactggacatttagtggggcgctactgtgggaattcgttcccgctgaattatagcagcatagtcggacacacactctgggtgcgtttcatcagtgatggaagcggtagcgggaccggcttccaggccacgtttatgaagatcttcggcaatgataacatcgttggaacacacggcaaagtcgcctcgccgttttggccggaaaactacccccataactcaaattatcagtggacagtcaatgttaatgcctcacacgtggtccacggtcgaattctcgaaatggacatagaagagatccagaactgctattatgataagctgagaatctacgatggcccttcaatccacgcccggctgatcggcgcttattgcgggactcagaccgaatctttttcctccacgggtaattccctaacgttccacttttattcagatagtagtattagcggcaaagggtttctcctcgagtggtttgcagtcgacgctcccgatggggtgttacccaccatcgctccaggagcctgtggaggttttctccgtaccggcgatgcacccgtgtttctgttttcccctgggtggccggattcttatagcaatagagtagactgtacatggctcatccaggcccccgactccactgtggaactgaacatactatccctggatattgagtcacataggacatgcgcttatgatagtttggtaattcgggacggggacaacaatctagcacaacagttggccgtgttatgcgggagagaaatacctggacctattaggtctaccggtgaatatatgttcattagattcacatccgacagcagcgttactcgcgccggatttaacgcgagcttccataagtcttgtggcggctaccttcacgccgatagaggcatcattactagtcccaagtacccagaaacttacccttccaatttaaattgttcctggcatgtgctggtgcagtctgggctcacaattgcagtgcactttgagcagcccttccagattccaaatggcgactcatcttgcaatcagggcgattatcttgtgctccgtaatggtcccgacatatgtagcccccctctcggaccaccgggcggcaatggccacttctgtggctcccacgcatcgtccaccctttttacaagcgacaatcagatgttcgtacaatttatcagtgaccatagtaacgaggggcagggcttcaagattaaatacgaagcaaagagcctggcttgcggggggaacgtctatatccacgacgccgatagtgctggctacgtcacaagtccaaaccatccacacaattatcctccgcatgctgactgtatttggatattggctgcaccgccagaaaccaggattcaactccagttcgaggaccgttttgacatcgaagtaacgccaaactgtacgagtaattacctggaattacgggatggtgtagatagcgatgctccgattctatcgaagttttgtggaacttccctgccttcgagccagtggtctagcggcgaagtaatgtacctgaggttccgatcagacaacagcccaacccatgtgggcttcaaggccaaatactccattgctcagtgtggcgggcgggtcccgggacaatcaggagtggtggaaagtattggccacccaacactgccttaccgagacaaccttttctgcgaatggcatctgcaagggctgtccgggcattatctgactatctcatttgaagacttcaacctgcagaattcctccggatgtgaaaaagactttgtggagatttgggataatcatacaagtggcaatattctgggccgatattgcggcaacactatccccgactccatagacactagctcaaacacagctgtcgttcggttcgtgaccgatgggtctgtaacagccagcgggttcagactgcggtttgagtcaagcatggaggagtgtgggggggatctccaaggctccattggcacatttacttcccccaattatcccaaccccaatccccacggccgcatatgtgagtggaggatcaccgcccctgaaggccgaaggatcaccttgatgtttaacaatctgcgtctggcgactcatcctagttgtaacaacgagcatgtcatagtgtttaacgggattaggagcaacagccctcaacttgaaaagctgtgttcttctgtgaatgtgtcaaacgagataaagagctctgggaatacaatgaaggtgatctttttcacagacgggtcgaggccgtacggaggcttcaccgcttcctacaccagctctgaagatgccgtgtgcggcgggagcctcccgaacacccctgaggggaacttcacctcacctgggtatgacggcgtccggaattacagccgcaatctgaattgcgagtggactttatctaacccgaaccagggtaatagtagcatcagtattcattttgaagacttctacctggaatcccatcaggattgtcagtttgatgtcctggagtttcgagtgggagacgcagacgggcccctgatgtggagactgtgtggtcctagcaagcctaccctacccctcgtcattccatacagccaggtatggatccatttcgtaactaatgaaagggtggagcatataggttttcatgcgaagtactccttcacggactgcggtggaattcaaattggtgatagtggggtgattacttcaccaaattatccgaatgcgtacgactctctcacccactgtagttctttgctggaggctcctcaggggcacactatcacactgacctttagcgattttgacatagaaccacatacgacctgtgcatgggatagtgtgaccgtaaggaacggaggctctcctgaatctcctataatcgggcagtactgcggaaacagtaatcctagaacaatacagtcaggctccaaccagctggtagtaactttcaacagtgatcattcactgcagggtggcgggttttatgctacatggaatacacaaactctcggatgtggcgggatatttcattctgacaacggcacgattcggagtccacattggcctcagaacttcccggagaattcccgctgcagctggaccgcgattacccacaagtctaagcatttggaaatcagcttcgataacaattttctaatcccgtcaggagatggccagtgtcaaaatagctttgtgaaggtgtgggcaggcaccgaggaggtggataaggctttgctggcgacaggttgcgggaacgtggcccccggccctgtgatcacgccatcaaacacgttcaccgccgtgttccaaagccaggaggccccagcacaaggattttcagcatctttcgtatctcggtgtggctcgaatttcacgggtccttctggctatataatttcaccgaactaccctaagcagtatgacaacaacatgaattgcacctacgtgatcgaagctaaccctctgtccgtagtgctcctcacattcgtgtctttccacctggaagctcgctccgctgtaaccggatcatgtgtgaatgacggcgtccacatcatcagaggttattcggtaatgagcaccccttttgcaaccgtgtgcggcgacgaaatgccagctccactgaccattgccggccctgtcctcctgaacttttattccaacgagcagatcactgactttgggttcaagttttcttatcgcatcatatcatgtggcggtgtcttcaacttctcttcagggattattacttctccagcctacagctacgccgactacccaaatgacatgcactgtctttacacaattaccgtgtcagacgacaaagtgatcgagctgaaattttcagactttgacgttgtgcccagcacctcctgttcacacgattacctcgccatctacgacggcgcaaatacctcagaccctctgctgggcaagttttgtggatctaaacggccgcctaatgttaagtcctctaacaatagtatgttgctggtctttaaaaccgacagttttcagacagccaaggggtggaaaatgagtttccgacagactttaggacctcagcaaggctgtggagggtatctgactggttctaataacacctttgcaagtcctgactctgacagcaacgggatgtatgacaagaacttaaattgtgtgtggatcataatagctccagtcaacaaagtgatccatctgacatttaataccttcgcactcgaagccgcctctacacgacaaaggtgcctgtatgattacgtaaaactatatgatggggattcggaaaatgccaacttggccggcaccttctgcggaagtacggtgccagccccattcataagctctgggaatttccttaccgtgcagtttatcagtgatctgaccctcgagagagagggattcaacgcgacttataccattatggatatgccatgtgggggcacttacaatgccacatggaccccccagaatataagttccccgaattcatccgatcccgatgtacctttcagtatctgtacatgggtgatcgattcaccacctcatcagcaggtaaaaatcactgtgtgggctttgcagctcacgagccaggattgcacacagaattacctgcagctgcaggattctcctcagggccacggaaactcacgatttcagttctgcgggcgtaacgcatcagcggtccctgtgttttattcatctatgagcaccgcgatggtgattttcaaatccggcgttgtgaaccgcaattcccgcatgagtttcacttaccagatagccgattgcaatcgcgactatcataaagctttcggtaacctcagaagccccggttggcccgataattacgacaatgataaggattgcacagtcaccctcactgcgccccagaaccacactattagtcttttcttccattcgctcgggattgagaattccgtggaatgtagaaacgactttctcgaggtgagaaatggtagtaattctaacagtcccctcctcggcaagtactgcgggacacttctcccaaatcccgttttttctcagaataacgaactctacctgaggttcaaatccgattccgtgacaagcgaccggggatatgaaatcatctggacctcatctccctcgggatgcggcggcaccctatacggagatcgcggttcattcacttccccaggctaccccggtacttatcctaacaatacctattgcgagtgggtcctggtggcgccggccggccgcctggtgacaatcaatttctactttataagcatcgatgatcctggcgattgcgtccagaactacctgaccctgtatgatggacctaacgcaagctcaccatcgagtggcccatattgcggaggagataccagtatcgctcccttcgtcgccagttccaatcaggtgtttattaagtttcacgctgattacgccaggcgaccctccgcttttagactgacctgggactcttag

SEQ ID NO: 184121 - DNA, 318 bp, synthetic construct
  misc_feature 1..318: note = Description of Artificial Sequence: Synthetic coding sequence
  source 1..318: mol_type = other DNA
aacagcaagctggtggacctggagcggaagttccagggcctgcagcagacagtggacaagaaggtatgctctagcaacccatgtcaaaatggcgggacttgcctgaatctacacgatagcttcttctgcatctgccccccacaatggaagggaccactgtgctctgctgacgtaaatgagtgtgagatctactcgggtacccctctctcctgccagaacggtggcacgtgcgttaatacaatggggtcctacaggaatccctgctctaatatccccaaagaacccgaagagggaagccgagactggcaccgtgagtag

SEQ ID NO: 184122 - DNA, 267 bp, synthetic construct
  misc_feature 1..267: note = Description of Artificial Sequence: Synthetic coding sequence
  source 1..267: mol_type = other DNA
agcaccggcaacgagctggccatccggttcaagaccgacctgagcattaatggcagggggtttaatgctagttggcaggctgtaaccggaggctgtggaggaatcttccaggccccaagcggagagattcattcccccaactatccaagtccatacaggtctaacaccgactgctcctgggtgattagagtcgaccgcaaccaccgcgtgcttctaaatttcacagattttgatttggagccccaggattcatgtatcatggtgtag

SEQ ID NO: 184123 - DNA, 1395 bp, synthetic construct
  misc_feature 1..1395: note = Description of Artificial Sequence: Synthetic coding sequence
  source 1..1395: mol_type = other DNA
atgagccacagctggaacgtgctgtggctgaccttctgcagcgacagcaatggcatgtacgataagaacctgaattgtgtgtggatcattatcgccccagtgaataaggtcattcacctgaccttcaacactttcgccctcgaggccgccagcaccagacaaagatgcctgtacgattacgtgaagctttacgatggggattcagagaacgccaatctggccgggactttttgtggctctacagtccccgccccttttatttcatctggaaattttctgactgtccagttcatctctgacctgacccttgaacgggagggcttcaatgcgacttatacaatcatggacatgccctgtggcgggacatataatgcaacctggacaccacagaatatatcatcccccaactcgtccgaccctgatgtccccttctcaatctgtacctgggtaattgatagccctccccaccagcaggtgaaaatcactgtctgggccctccagctgacatcacaggactgtacccagaactacctccagttacaagacagtccacagggacatggaaattcccgtttccagttttgcggtagaaatgcctcagccgtgcccgtcttctactcatcaatgtctacagccatggtaatattcaagtcgggcgttgtcaacagaaactccagaatgagctttacttatcagatagccgattgcaaccgcgactatcacaaggcctttggcaaccttaggagccctggatggccggacaactacgacaacgacaaagactgtacagtcaccctaaccgctcctcagaaccacaccatctctctgttcttccattctctgggcattgagaatagtgtcgagtgtcgcaatgacttccttgaggtgagaaacggatccaattcaaactcaccactgctgggcaaatactgcggaacactgctgccaaaccctgtattttcacaaaataacgagttatatttgcgttttaaatccgacagtgtcacgtccgataggggttatgaaatcatctggacttcttcgccatctggctgcggtggcacgctgtacggggacagaggatcatttacttcaccaggctatcctggaacttatcccaataatacatactgcgagtgggtgctcgtggctcctgcgggccggcttgtcactatcaatttctacttcatcagcatcgatgaccccggggactgcgtacagaactacttgaccctttatgatggccccaatgcatcttccccatccagtggcccatactgcggcggtgacaccagcatagcacctttcgtggccagctccaaccaggtgttcattaagttccatgccgattacgccaggagaccctccgcgtttcggctcacctgggacagttag

SEQ ID NO: 184124 - DNA, 864 bp, synthetic construct
  misc_feature 1..864: note = Description of Artificial Sequence: Synthetic coding sequence
  source 1..864: mol_type = other DNA
atggagctggagcggatcgtgagcgccgccctgctggccttcgtgcagacccacctgcccgaagctgacttaagcgggctagatgaggtcattttttcatacgtgcttggcgtacttgaggaccttggcccatctggaccatccgaggaaaattttgacatggaggccttcacagagatgatggaagcctatgtgccaggattcgctcacattccaagaggcacgataggagatatgatgcagaaacttagtggccagctgtctgatgcaagaaacaaagaaaacctacagccccagagctcaggagtccagggacaggtgcccatatcaccagagcctttgcagcgtccagagatgctcaaagaagagaccagatcatcagctgctgccgctgccgacacccaggacgaggcgacaggtgccgaggaggagctattgcccggtgtcgacgtcctcctcgaggtgtttcccacatgctctgtggagcaggcgcagtgggtgctggccaaggcccgtggagacctggaggaggcagtgcagatgctggttgagggaaaagaggaaggacccgccgcttgggaaggccctaatcaagatctacccaggcgcctaagaggtccccagaaggacgagctaaaaagtttcattctacaaaaatacatgatggtggactccgcagaagatcagaagatccatcggcccatggcccccaaggaggcacccaaaaaattgattcgatacatcgataatcaagtggtctccacaaagggggagcgtttcaaggatgtacgcaatccagaggccgaagagatgaaagccacttacattaacttaaagccagcacggaaatatagattccactag

SEQ ID NO: 184125 - DNA, 1365 bp, synthetic construct
  misc_feature 1..1365: note = Description of Artificial Sequence: Synthetic coding sequence
  source 1..1365: mol_type = other DNA
atggccgccgcccccggcggcagcgcccagcccgccggccccggcccaaggcttggcttcagcacagcagattccggggtggggatgagcggattgaatcctggccccgccgtcccgatgaaagaccacgacgccattaagctgttcgtgggacagatacccaggggtcttgacgagcaggatctgaagcctctcttcgaagaatttggccgtatttatgaactgacagtcctgaaggatcgccttacgggccttcataagggctgtgcctttttgacctattgtgctagggattctgccctgaaggcacagagcgcacttcatgagcagaagacactgccaggcatgaacaggccgattcaggtgaagcctgccgcctcagaggggcgcggcgaggacagaaagctgttcgtgggcatgctggggaagcagcagggagaagaggacgtgagacggctcttccagcccttcggccatatcgaagagtgcacagtcctccggagccctgacggcacctctaaaggttgtgcttttgtgaagtttggcagccagggagaggcccaggctgctattcggggccttcatgggagccggacaatggccggcgccagcagtagcctggttgtcaaactggcagataccgaccgtgagcgggccctgaggagaatgcagcaaatggccggacatctcggggcattccacccagctccactgccccttggagcatgcggggcctatacgacagctatcctgcagcaccaagctgccctactggccgctgctcagggaccaggcttggggcccgtcgcggccgtcgccgcacagatgcagcacgtggcagccttctctctggtggccgcgccgctgttacctgcagctgcagccaactcacccccgggctcgggccccgggacacttcctggtctgcccgcccccatcggcgtaaatggcttcgggccattgaccccccagacaaacggacagcctggcagtgacacactatacaataacggcttgagcccttaccccgcccagagtcctggcgtggccgaccctctacagcaggcctatgccgggatgcaccattacgctgggcccgaggggtgcaacctgttcatctatcacctcccgcaggagtttggagatgccgagttgatccaaactttcctccccttcggcgctgtggtcagcgctaaagtgtttgtcgatagggcaactaatcagagcaaatgctttgggttcgtctcttttgataaccctacttcagcacaaacggccatacaggctatgaacggtttccaaatcggcatgaagcgtctgaaagtgcagctcaagagacccaaggacgctaatagaccatattag

SEQ ID NO: 184126 - DNA, 1398 bp, synthetic construct
  misc_feature 1..1398: note = Description of Artificial Sequence: Synthetic coding sequence
  source 1..1398: mol_type = other DNA
atgaaggagcccgacgccatcaagctgttcgtgggccagatcccccgccatcttgaggaaaaggacctaaagcccattttcgaacagttcggaaggattttcgagttgaccgtgattaaggataaatacaccgggctgcacaaagggtgcgcattcctcacatactgtgctagagattcggcacttaaggcgcagagcgcccttcacgagcagaaaactctgcctggcatgaacagacctattcaggtaaaaccagcagactctgagagcagaggcgaggacaggaagctcttcgtggggatgcttgggaagcagcaaacggacgaagacgtgcggaagatgttcgagccattcgggactatagacgaatgtaccgtcctcagggggcctgacgggacaagcaaggggtgtgcttttgttaagttccagactcacgccgaagcacaggccgctataaatactttgcacagctcgaggactcttcccggggccagtagcagcctagttgtgaaatttgccgacaccgagaaagaacgcggtctgcgcagaatgcagcaagttgcaacacagctgggaatgttttctccgatagcactccaatttggagcctattccgcatatacgcaggccctcatgcagcagcaagccgccctcgtcgcagctcatagtgcttacctctctcctatggccactatggctgctgtccagatgcaacacatggcagcaatcaatgccaacggcctgatcgctacacccattacgccaagttcaggaacctctaccccaccagcaatcgctgcaactccagtgagtgcaattcccgcagctctgggagtgaatgggtactcccctgtccccacccagccaacggggcagccggccccagacgcgctgtaccccaacggggtgcacccctatcccgcccaatctcccgctgctccagtcgatcctttgcaacaggcctacgctggtatgcaacactatacagctgcctaccccgccgcctactccctcgtcgcaccagcgtttccacagccaccggcacttgtggcacagcagcccccccccccaccgcagcagcaacagcagcagcagcagcagcaacagcagcagcagcaacgagaaggccccgatggatgcaatatcttcatataccacctgcctcaggaatttaccgacagcgaaatcttgcagatgtttgtgccatttggccacgtaatctccgccaaagtcttcgtcgacagagccacaaatcagtccaagtgttttgggtttgtctcattcgacaaccccgcgagtgctcaggcagctatccaagctatgaacggatttcaaataggtatgaagcgtttaaaagtgcaattgaagcggcctaaagacgccaatagaccctactag

SEQ ID NO: 184127 - DNA, 1248 bp, synthetic construct
  misc_feature 1..1248: note = Description of Artificial Sequence: Synthetic coding sequence
  source 1..1248: mol_type = other DNA
atgaaggagcccgacgccatcaagctgttcgtgggccagatcccccggcatttggaagagaaagaccttaagccgatttttgaacaattcggcaggattttcgagctgactgtgattaaagataagtacaccgggctgcacaaagggtgcgcattcctgacatattgtgctagggacagtgccctgaaggcccagtcggccttgcacgaacagaaaaccttaccaggcatgaaccgacccattcaggtcaagccagccgactccgaaagcaggggcgaggacagaaaactgtttgtgggcatgttgggtaagcagcaaaccgatgaggacgtgcgtaaaatgttcgagcctttcggtacaattgatgagtgtaccgtactgagaggtcctgatggtacatccaagggttgtgcttttgttaagttccagacgcacgctgaagctcaggccgccataaacaccctgcacagctcgcggacgctgccaggtgcctcttcaagcctcgtagtgaagtttgccgacacagaaaaagaacgcgggctcaggcggatgcagcaggtcgcaacgcagcttggaatgtttagccccatagcactacaattcggggcttattcagcttatacccaggcgctaatgcaacagcaggctgcgctggtggccgcacactctgcttacctgagcccaatggccactatggccgcagtccagatgcagcacatggccgcgataaatgcgaacggtctgatcgccacacccattacccccagtagcgctcagagtcctgccgcccctgtggaccccttacagcaagcatacgcaggtatgcagcactatactgcagcgtacccagcagcgtacagtctggtagcacccgctttccctcaaccacctgccctggtggcacaacagcctcctcccccaccccagcaacagcagcagcagcagcaacagcagcagcaacagcaacagcgcgaagggcctgatggctgtaatatctttatctaccacctaccacaagaatttaccgatagtgaaatccttcagatgtttgtgccgttcggacatgtgatcagcgccaaagtgttcgtcgacagagccacgaatcagagcaagtgctttggattcgtgtccttcgataacccagcctccgcccaggcagcgattcaagctatgaacgggtttcagatcggaatgaagaggctgaaggtgcagcttaagcggcccaaggacgcaaaccggccatattag

SEQ ID NO: 184128 - DNA, 900 bp, synthetic construct
  misc_feature 1..900: note = Description of Artificial Sequence: Synthetic coding sequence
  source 1..900: mol_type = other DNA
atgaaggagcccgacgccatcaagctgttcgtgggccagatcccccgtcacttagaagaaaaagacctgaagccaattttcgagcagttcggtcgcatctttgagctgacagttatcaaagacaagtatacgggcttacacaaaggctgcgccttccttacttactgtgcaagggacagcgctctcaaggcccagagtgcgcttcacgagcagaagaccttgccaggcatgaatagacctatacaggtgaagccagccgactctgagagtagaggagacagaaagctgtttgtcgggatgctgggcaaacagcagacagatgaggatgtgcgaaagatgttcgagcccttcggcaccatcgatgaatgtaccgttctgagaggcccggacgggacctctaagggttgtgcattcgtgaaatttcaaacacatgctgaggctcaggccgctattaataccctgcacagctctaggacgcttccaggggcatcgagctccctagtcgtgaagttcgccgacacggagaaggagagaggcctgcggcgcatgcagcaggtcgctacacagctggggatgttctccccaattgcactgcagttcggcgcatatagcgcctacacacaggccctgatgcagcagcaggccgccctggtcgctgcccacagtgcatatttatctcctatggccaccatggctgcggtccagatgcagcacatggccgccattaacgccaacggactgatcgctacgccaattacaccaagttctgccaaggggcatggctacgcatccctcgccccccgggcccactttttgctggacgccctcctcgcattcgtcagggagaggggtacagggtccaaagccccaggctacctgccatctgccggcctgttgtag

SEQ ID NO: 184129 - DNA, 783 bp, synthetic construct
  misc_feature 1..783: note = Description of Artificial Sequence: Synthetic coding sequence
  source 1..783: mol_type = other DNA
atgcagcaggtggccacccagctgggcatgttcagccccatcgcccttcagttcggagcttattccgcatacacgcaggctcttatgcagcagcaggctgcattagtagccgcacatagcgcctacctctcacctatggccaccatggccgcggtgcaaatgcagcacatggccgcaatcaacgctaatgggctgatcgctactcctataacacccagttcagggacaagcacaccacctgccatcgctgccactccggtgtccgccattccagccgcacttggggtcaacggctactcacctgtcccaacgcaaccaaccggtcagcccgcccctgacgcactttatcccaacggtgtgcatccgtatcccgcagcttatcctgcggcatatagcctggtggcccccgcttttcctcagccaccagccctggtggcgcaacagccccctcccccaccacagcaacaacaacagcaacaacaacagcagcagcaacaacagcaaagagaagggcccgacggctgcaacatcttcatctaccatctcccccaggagtttactgattctgagatactgcagatgtttgttccctttggccatgtcatctcggcaaaagtcttcgtggaccgtgcaaccaatcaatcaaaatgtttcgggttcgtgagctttgacaatccggccagcgctcaagccgccatacaagccatgaatggtttccaaatagggatgaaaagattgaaggttcagctcaagaggccgaaggacgccaatagaccatattag

SEQ ID NO: 184130 - DNA, 1401 bp, synthetic construct
  misc_feature 1..1401: note = Description of Artificial Sequence: Synthetic coding sequence
  source 1..1401: mol_type = other DNA
tgagtggaggagagcgccgccggcgagcagagcagcggcacccagattcccagacatctcgaggaaaaggatctaaagccaatcttcgagcagtttggcagaatcttcgagctgaccgtcatcaaagataagtacacaggtctgcataaaggctgcgccttcctgacttactgcgctcgtgacagcgcgcttaaagcacagtcagcactgcacgaacagaagacgctgccaggtatgaatcgccctattcaagttaagcccgctgatagcgaatctagaggtgacaggaaactgttcgtcggcatgctgggcaagcagcagaccgatgaggatgtgcgtaagatgttcgagccttttggtaccatcgatgagtgtactgttcttcgcggcccagatgggacaagcaaggggtgtgcattcgtgaaattccagactcatgcggaggcacaggccgcgatcaatacactacattcatctcgcaccctgcctggagcttcatcctctctggtggtgaaattcgctgatacagagaaggagcgaggtctgcggcggatgcagcaggtggccactcagctgggaatgttcagccccatagctctccagttcggagcatattccgcgtatacgcaggcgctcatgcagcagcaggcagccctggtggccgctcactccgcttacttgagtccaatggcaacaatggcagcagtccagatgcaacacatggccgctatcaatgcgaatgggctcatcgccaccccaattactccctcgtctggcacctcgactcctcccgcaattgccgctacacccgtcagcgccattcctgccgctttgggagtgaacgggtactcaccggtaccaactcagcccactggtcagccagcaccagatgcgctctaccctaacggtgtgcacccgtacccagcacagagccctgcagcacccgtggaccctctccagcaggcatacgcgggtatgcagcactacaccgcagcgtaccccgctgcttattccctggtggctccagccttccctcagccacctgccttagtcgctcagcagcctcctccccctccccagcagcagcagcagcagcaacagcagcagcagcagcagcaacagagagagggccctgacggttgcaatatttttatataccacctgccacaggagttcaccgactcagagatcttgcaaatgtttgttccatttggacacgtcatatctgccaaagtcttcgtcgatagggctacaaatcagagcaaatgcttcggattcgtgagctttgataatcctgcatctgctcaagctgccattcaagcaatgaacgggttccaaatcggcatgaagcgattgaaagtccagttgaagcgccctaaggatgctaatagaccgtactag

SEQ ID NO: 184131 - DNA, 1347 bp, synthetic construct
  misc_feature 1..1347: note = Description of Artificial Sequence: Synthetic coding sequence
  source 1..1347: mol_type = other DNA
atgtacatcaagatggccaccctggccaacggccaggccgacaacgcctctttaagtacaaatggactgggatcatcacccggctctgcaggtcatatgaatggactgagccattcgcccggcaatcccagcacgatccccatgaaggatcatgacgccattaaactgttcattggccaaattccgcggaaccttgatgagaaagatcttaagcccctgttcgaggagtttggcaagatatacgagctgactgtgttaaaggataggttcaccgggatgcacaagggttgcgcattcttgacatattgtgaaagagagagtgccttaaaagcgcagtccgccttgcacgagcagaagacattgcccggtatgaaccgccctattcaggtgaaaccagcggactccgagtctcgaggtgaagaccgcaagctctttgtgggaatgctcaacaagcagcagtcagaggacgatgtgcgcaggctgtttgaggccttcggcaacatagaagagtgcacgatcttgagaggtccggacggaaatagtaagggctgtgcattcgtgaaatattcatctcacgctgaggcacaggccgccattaacgcattgcatggcagtcagacaatgcctggagcctccagttccctggtggtgaagtttgccgacacagacaaggaaagaactatgcgccgcatgcagcagatggcggggcagatggggatgtttaaccccatggccataccgttcggggcgtatggggcctacgcacaggcccttatgcagcagcaagcagcgctcatggccagtgtggcgcagggagggtatttgaaccctatggcggcctttgctgcagcccaaatgcagcagatggcagctctgaacatgaatggtctggccgccgcgcccatgacgcctacctcaggcggaagtactccccctggcataacagcacctgctgtcccgtcgatcccctctccgattggtgtcaacggttttactggcctccctccacaagccaacggacagccggcagctgaggccgtgtttgccaatggcatacatccctatcccgcccagtcacccacggcagcagatccgctgcaacaagcctacgccggcgtgcaacagtacgcagggccagccgcataccctgccgcatacggacagatttcccaggcgttccctcagccgcctcccatgataccccaacagcagagagagggcttcgtctcattcgacaaccccgcttcggcccagacggcaatacaggcaatgaatgggtttcagatcggcatgaaacgactgaaagtgcagctgaaacgtcctaaggatgcaaaccgtccatactag

SEQ ID NO: 184132 - DNA, 639 bp, synthetic construct
  misc_feature 1..639: note = Description of Artificial Sequence: Synthetic coding sequence
  source 1..639: mol_type = other DNA
gtgagcgccgagggccccgagcgggccgcccgggccgaggacagcgccagagatgagccggcagatccgggcgaagcttgcggacaacgcgagcctaaggaccgcaaacttttcgtgggaatgttgaataaacaacagtcggaggacgacgtgcgtaggctatttgaagcctttgggaatatcgaggaatgcaccatactgaggggtcctgacggcaacagcaaaggttgcgcatttgttaagtatagtagccacgctgaagcacaagctgccattaacgctttgcatggcagccagacaatgccaggggcctcgagttccctggtcgtgaagtttgcggacaccgacaaggagagaaccatgcgccgcatgcagcaaatggcaggtcagatggggatgttcaaccccatggctatacccttcggtgcatatggcgcatacgcccaggcccttatgcagcagcaggccgcattgatggcttcagtggctcagggcggctatttaaatcccatggctgcttttgcagccgcccagatgcaacagatggccgccttgaatatgtggcctggagggaggacttatgaccctaacttgaggtggcagcacccctcaggccaccactgcacttcacgggcctag

SEQ ID NO: 184133 - DNA, 1461 bp, synthetic construct
  misc_feature 1..1461: note = Description of Artificial Sequence: Synthetic coding sequence
  source 1..1461: mol_type = other DNA
atgtacatcaagatggccaccctggccaacggccaggccgacaacgcgagcctttcaaccaatggcctgggctccagccctggttctgctggtcatatgaatggcttatcccacagcccgggcaatccgtccacaatccccatgaaagaccatgacgcgattaagttattcatagggcagattccgcgcaacctcgatgagaaggatctcaaacctctgtttgaggaatttggtaaaatctacgagctgacagtcttaaaggaccgtttcacaggaatgcacaaagggtgcgcattcctcacttattgcgagagagagtcagccctaaaagcacaatccgcattacacgagcagaagacgctgccgggaatgaataggcccatccaggttaaacccgcggactccgagtcacgcggagggtcgagttgcttgcgccagcccccctcccaggatcgaaaattgtttgtgggaatgctcaataagcaacagtccgaggacgacgtccggcgcctctttgaggcttttggaaacattgaggaatgcaccatactacgaggccctgatgggaattcaaagggttgcgccttcgtcaaatacagctcccacgctgaggctcaggctgctattaacgctctgcacggcagtcagacgatgcctggtgccagtagcagcctggttgtaaagtttgccgatacggacaaggaaaggactatgaggaggatgcaacagatggctggccagatgggaatgtttaatccaatggcaattcccttcggggcctatggcgcatacgcccaggccctgatgcaacagcaggcggcattaatggccagtgtcgcccagggagggtacctgaaccccatggctgcttttgccgcggcccagatgcagcaaatggctgcacttaatatgaacggtctagctgctgcgccaatgactcccacctctggcgggagcaccccccccggcatcactgctcctgccgtccccagcattccttcgcccatcggtgtgaacggatttactggactccccccgcaggccaatggacagcccgctgcggaggccgttttcgcaaatggaatccacccgtatccagcacagagtcctacggctgctgacccactgcagcaggcttatgccggagttcagcagtatgcaggcccagccgcttaccccgccgcttacggtcagatttcacaggcctttccccagcccccacccatgatcccccagcagcaacgagagggaccagagggctgcaacttgtttatctaccatttgccccaggaatttggggacgcagagctgatgcagatgttcctgccattcggattcgtatccttcgataaccccgcctcagctcagacagcgattcaggctatgaatggcttccagattggaatgaaacgacttaaagttcagctgaagcgacctaaagacgccaatagaccctattag

SEQ ID NO: 184134 - DNA, 1458 bp, synthetic construct
  misc_feature 1..1458: note = Description of Artificial Sequence: Synthetic coding sequence
  source 1..1458: mol_type = other DNA
atgtacatcaagatggccaccctggccaacggccaggccgacaacgccagcctgtccacaaatggtctcggctcctccccggggtctgccggacacatgaacggactgtcacattcaccgggcaacccctctaccatacccatgaaggatcacgacgcaattaaactttttattggccaaattcctagaaatttggacgagaaggatttaaaacccctatttgaggagtttggcaaaatctacgagttgacagttctgaaagataggtttacaggcatgcataaaggctgtgcttttctgacctactgtgaaagagaatctgccctgaaggctcagagcgcattacacgagcagaagactctccccgggatgaataggccaattcaagtaaagcccgctgactccgagtcccggggagggtccagttgtctgaggcagcccccttcccaggacagaaagctgtttgtaggcatgctgaataaacagcagagcgaggatgacgtgagacgtttattcgaggcattcggcaacatcgaagaatgcactatactgcgcggcccagatgggaactctaaaggctgtgcctttgtgaagtactctagccacgccgaagctcaggctgctattaatgctctccacggttctcagaccatgccaggggcaagcagctctcttgttgtgaaattcgcagatacagacaaggagcggacaatgcggaggatgcaacagatggctggccagatgggaatgttcaatcctatggcaatccccttcggcgcgtatggcgcatatgcccaagcaatgcaacagcaggctgcactgatggcctctgtggcccagggaggttatctgaatcctatggccgcgttcgcagcggctcagatgcagcaaatggcggcactgaacatgaacggcttggctgcagcacctatgacccccacgagtgggggaagcaccccgcccgggatcaccgccccggctgttcctagcattccctcgcctatcggggtgaacgggtttaccgggctgccgcctcaggcaaacgggcaacccgccgccgaggccgtcttcgcaaatgggatccacccttatcccgcgcagtccccaacagccgcagatcccctacaacaagcctacgccggtgtccagcagtacgctggacctgccgcctaccccgcagcttacggccagatttcccaggccttccctcagcccccccctatgattccgcagcagcagagggaaggccctgaggggtgtaacctctttatctatcacctgccccaggagtttggagacgcggaactgatgcagatgtttttgccattcgggtttgtgagctttgacaatcccgccagtgctcagaccgccatccaggcaatgaatggctttcagatcgggatgaaaaggttgaaggtgcagctaaaacggcccaaggacgctaaccggccgtactag

SEQ ID NO: 184135 - DNA, 1455 bp, synthetic construct
  misc_feature 1..1455: note = Description of Artificial Sequence: Synthetic coding sequence
  source 1..1455: mol_type = other DNA
atgtacatcaagatggccaccctggccaacggccaggccgacaacgcatcattgtccaccaatgggctcgggagtagccccgggagtgctgggcacatgaacggcctgtcccatagtccaggcaacccctctaccatccccatgaaagatcatgatgcaatcaagctgttcatcggccaaattccacggaatctcgacgagaaagacctcaagccactgtttgaggagttcggcaagatttacgaactcactgtgctcaaagaccgctttaccggcatgcacaaggggtgtgctttcttgacctattgcgagcgggaatcagcgctgaaggcccagtccgccctgcacgagcagaagacgttgccgggcatgaaccgcccaatccaagtgaaacctgccgacagtgagtcacgcggcggatccagctgcctgaggcaaccaccgtcccaccggaagctatttgtgggaatgttaaacaagcagcagtctgaggatgacgtacgtagactctttgaggcctttggaaatatcgaggagtgtacgatcctcagaggtcctgacggtaattcaaaaggatgtgccttcgtcaagtatagctcccatgctgaagctcaagccgctattaacgccctgcacggcagtcagacaatgcccggagctagtagcagcttggtcgtcaagtttgccgatactgacaaggaacgtactatgcgtcggatgcaacagatggctggacagatgggaatgttcaatccaatggcaatcccattcggggcttacggtgcttatgcccaggcaatgcagcagcaggccgctcttatggcatccgtcgctcaggggggctatttgaatcccatggcagcattcgcggcagcacaaatgcagcagatggccgcattaaacatgaatggtttggctgctgcaccaatgacgccgacaagcggcggctccactcccccagggatcaccgcccccgctgtgccctcgatccctagtccaatcggcgtaaatggattcacaggactccctccccaagcaaacggccagccggcggccgaggctgtttttgccaacggcatccatccgtaccccgcccagtcacccacggctgcagaccctctgcagcaggcttatgcaggtgtacaacaatacgccggccccgccgcctaccccgctgcatacggacagatcagtcaagccttccctcagccaccacccatgatccctcagcagcagagagagggacccgagggatgcaacctgttcatctaccacctcccccaggaatttggggatgccgaactgatgcagatgtttttgccatttggctttgtcagcttcgataaccccgcgtctgcccagacagccatccaagccatgaacggcttccagataggtatgaaaaggctgaaagtccagcttaagcggcccaaagacgccaaccgaccctattag

SEQ ID NO: 184136 - DNA, 1458 bp, synthetic construct
  misc_feature 1..1458: note = Description of Artificial Sequence: Synthetic coding sequence
  source 1..1458: mol_type = other DNA
atggcccggctgaccgagagcgaggcccggcggcagcagcagcagctgttgcaaccccggccgagtcccgttggctcatctggtccagagcctcccggtggccaacctgacggaatgaaagatctcgacgccataaaactgtttgtgggacagatcccccgccatctcgatgagaaagatctaaaaccactgtttgaacagtttggcagaatttacgaactcacggttcttaaagatccatacacaggcatgcacaaggggtgcgctttcctgacatactgcgctcgggactcagctattaaggcccagaccgctctgcatgagcagaagaccctccccggcatggcccgtcctattcaggtgaagccagccgactctgagagtaggggcggcagggatcgcaagctgttcgtggggatgctcaataagcaacagtccgaagaagacgtgttgcgcctattccaaccctttggggttattgacgaatgcacggttctccggggaccagacgggagctccaagggctgcgcctttgttaagtttagcagccataccgaggcacaggccgccatccatgcactgcacggctctcaaacaatgccaggcgctagtagtagtctcgtggtaaagttcgctgacacagataaagaaagaaccctgagacgaatgcagcagatggttggacaactgggtattcttacgccatcactgacactgcccttctcaccttactctgcctatgcccaagccctcatgcagcagcagacaactgtgctcagcactagcgggtcctatctgtcccctggcgtggccttcagcccatgtcacatccagcagattggagcagtcagcctgaatgggctgcctgcaacgccaattgcccctgccagcggcctgcactcaccaccgctgttgggcacaaccgctgtgcctgggcttgttgctcccatcaccaacggattcgcaggcgttgtccctttcccaggcggtcaccctgctttagagactgtctatgcgaatggcctagttccttatcccgcacagtcccccacagtagcagagaccctacacccggcgtttagcggcgtgcagcaatacactgccatgtatccgacagcagcaattacacccatcgcacattccgtcccacagccaccccccctgctccagcagcaacagcgcgaggggcccgagggttgcaacttgtttatatatcatctgccccaggagttcggggacaccgaattgactcaaatgttcctgccatttggtaacatcatctcttctaaagttttcatggatcgggccaccaatcagagcaaatgtttcggcttcgtcagctttgataatcctgcttctgcacaggcagccatacaggcaatgaacggatttcagattgggatgaaaaggctcaaggtgcaactgaagaggcccaaggatccggggcatccctactag

SEQ ID NO: 184137 - DNA, 963 bp, synthetic construct
  misc_feature 1..963: note = Description of Artificial Sequence: Synthetic coding sequence
  source 1..963: mol_type = other DNA
atggcccggcccatccaggtgaagcccgccgacagcgagagccggggaggcagagacaggaaactctttgtaggcatgcttaacaagcagcaatcggaagaggatgtactgcggttattccagccgttcggggtgattgacgagtgcacagtcctcagaggtcccgacgggtctagcaagggatgtgcatttgtaaaattttcaagccacacggaggctcaggccgccatccacgctctgcatggcagccaaacaatgccaggcgcctccagttctctcgtcgtgaaattcgcggacactgacaaggaaagaacattgcggagaatgcaacaaatggttggacagctgggcatcctgaccccctccctcactctgccctttagcccgtactccgcctacgcgcaggctcttatgcaacagcaaactaccgttctgtcaacatctggctcgtatctgtcaccgggcgtggcattcagcccctgccatattcagcagatcggtgcagtgagtctgaatggcctgccggctacacccatcgccccagcgtctgggttgcactcaccaccactcctcgggaccaccgctgtgcccgggctggtggcaccaataacgaacggcttcgcaggcgtggtgccctttcccggaggtcacccagctctggagacagtctacgcgaacggtctggtgccctatcctgcgcagtcccccactgtggccgagactctccatccggcgttctcgggggttcagcaatataccgctatgtatcccactgctgcaattacacccattgcccattctgtaccgcagcccccacctctcctgcagcagcagcagagggaaggagtttggaggcatggagccgacgccgatgtgcctaccttacggcaataccatttcctgcagggggtgtacgggtcatcgtatcaacctgaacaggtgtttcgtttgagggaactctag

SEQ ID NO: 184138 - DNA, 1230 bp, synthetic construct
  misc_feature 1..1230: note = Description of Artificial Sequence: Synthetic coding sequence
  source 1..1230: mol_type = other DNA
atggcccggctgaccgagagcgaggcccggcggcagcagcagcagttgctgcagccacgcccatctcccgtgggttctagtggccccgagcccccaggcggtcaaccagacggcatgaaggacctagatgcaatcaagctgttcgtgggacagatccctcgacatcttgacgagaaggatctgaagccacttttcgaacagttcgggaggatatacgagctaactgtgttgaaggatccttatactggcatgcataagggctgtgcattcctgacatattgtgcccgcgattccgcaatcaaggctcaaaccgcactacacgagcaaaagacgctgcctggaatggcccgcccgattcaagtgaaacccgcagatagcgagagccgcggcggacgagacagaaaactcttcgtcggtatgctcaacaaacagcaaagcgaagaggacgtgcttaggttgttccagcctttcggggtgattgacgagtgcacagtcctccgtggacccgatggctcatccaaggggtgcgcctttgtcaagttttctagtcacacggaggcgcaggcagctatacatgccctccacggcagtcagacgatgcccggcgcttcctcttctctcgtagtgaagtttgctgatacagataaagagcggaccctacggagaatgcagcagatggttggacagctcggcatactaaccccaagcctgaccctgccatttagcccctatagcgcctatgcccaggccctgatgcagcagcaaaccaccgtgctgagcaccagcggatcctatctgtcaccaggggtagctttctccccttgccatatccaacagattggagccgtcagcttgaacggtcttccagctacccccattgcccctgcctccggtgtggtgccttttcccgggggacatccagctctcgagactgtgtacgctaacgggctggtgccttacccagctcaatctccgacggtggctgagacactgcatcccgccttctccggcgttcaacaatacaccgcgatgtatcctacagcagcgatcacgcctattgcccactccgtgccccagccacctccattactgcagcagcagcaacgcgaaggagtgtggagacacggagcagacgctgacgtcccaactcttcgacagtaccacttcctgcagggcgtgtatgggtctagttatcagcccgaacaagtttttcggctgagagagctttag

SEQ ID NO: 184139 - DNA, 1446 bp, synthetic construct
  misc_feature 1..1446: note = Description of Artificial Sequence: Synthetic coding sequence
  source 1..1446: mol_type = other DNA
atggccgccgcccccggcggcagcgcccagcccgccggccccggcccccgcctcgggtttagtacggccgattccggggtgggaatgtccggtctcaatccaggtcccgcagttcctatgaaggaccatgatgccatcaaactttttgtcggtcaaatccctagaggcctcgacgagcaggaccttaaacccctctttgaagagttcgggcgtatctatgaactgaccgtcctgaaggaccggctcaccgggctacataaggggtgcgcattccttacatactgcgccagggatagcgctttgaaagctcagagtgccctccacgagcaaaaaacccttccaggcatgaatcggccaattcaagtgaaacctgctgcctctgaaggccggggcgaagaccgcaagctgttcgtaggcatgttgggaaagcagcagggtgaggaagacgtccgacggctcttccagccattcggacacatagaagagtgcacggtcctccgatctcccgatggtacctcgaagggctgtgcgtttgtcaagttcggaagccagggcgaagctcaagccgcgatcagggggctgcatggttccaggacaatggctggcgcaagtagctcgctagtggtaaagcttgctgatactgacagagaaagggcccttaggaggatgcaacagatggcagggcacttgggggcgtttcaccctgcccctcttcctctgggggcgtgcggcgcctacacaactgctattctgcagcaccaggcagcacttcttgcagccgcccagggccccggcctggggcccgtggccgctgtagcagcgcagatgcagcacgttgcagcattttcactcgtagccgcacccttactccccgccgcggccgccaatagtcctccagggagtggtccaggcacgttgccagggttgcccgccccaattggtgttaacggctttggccctctcacgccccagactaacggccaaccaggctctgacaccctctataacaacggtctctccccttacccggcacaaagtccaggtgtggccgaccccctacagcaggcctacgcaggaatgcatcattatgccgcggcgtatcctagtgcttacgcacctgtgtccaccgccttcccacagcagccctccgccctgcctcagcagcagcgcgagggaccagagggctgtaacctgttcatctaccatctgccgcaggagtttggtgacgcagagttgatccagacattcctcccattcggagcagtggtgagtgctaaggtctttgtggacagggcgaccaaccagtctaaatgctttgggtttgtgtccttcgacaatcctacgagtgcgcagaccgccattcaggcaatgaacggtttccaaatcgggatgaaaaggctgaaggtgcaactgaaacgtccaaaggatgctaatagaccttactag

SEQ ID NO: 184140 - DNA, 1107 bp, synthetic construct
  misc_feature 1..1107: note = Description of Artificial Sequence: Synthetic coding sequence
  source 1..1107: mol_type = other DNA
atgatcagcgacccccccagcaacaacagctggaacagcgtgctgtacctcctggaagataggaagctcttcgtggggatgctggggaaacagcagggtgaggaggacgtacggagactattccagccctttggacatatagaggagtgcactgttcttagatcaccagacggtacttccaaaggctgcgcctttgtaaagtttggaagccagggcgaggcccaagctgccataagaggcctccatggcagcaggaccatggccggagccagctcatcattggtcgtgaaactcgccgacactgacagggaacgggccctaaggaggatgcagcagatggccggccatctgggagccttccacccagcacctttgccactgggggcctgtggagcttacaccacagccatcctccaacatcaggccgctcttctagcggctgcacagggacctggactcggaccagtagcagccgtggctgcccagatgcaacacgtcgcggcattttccctggtcgcagcccccttactcccggctgccgccgccaactctccgcccggtagtggccctgggacactacccgggctccctgctcctataggggtcaacggctttggacctctcactccgcaaacgaacgggcagccggggtccgataccttatacaacaatggactgagtccttaccctgcacaaagtccaggagtggcggatccgctgcagcaggcttacgcagggatgcaccactacgccgctgcatacccaagtgcctacgcccctgtgtctacagcctttccccagcaaccgtccgcacttcctcaacagcaacgggaaggcccagagggctgtaacttgttcatctaccacctaccacaggaattcggggacgcagagctgatccagacttttctcccattcggggcagtagtaagtgccaaggtattcgtggacagggcaactaaccagtctaaatgctttggcttcgtcagcttcgacaaccccacaagcgcacaaaccgcaatacaggccatgaatggttttcagattgggatgaaacgactgaaagttcagctgaaacgccccaaggacgccaacagaccatactag

SEQ ID NO: 184141 - DNA, 1365 bp, synthetic construct
  misc_feature 1..1365: note = Description of Artificial Sequence: Synthetic coding sequence
  source 1..1365: mol_type = other DNA
atggccgccgcccccggcggcagcgcccagcccgccggccccggcccgcgcctgggtttctccaccgcggattccggggtggggatgtcaggcctgaatcccgggcctgcagtgccaatgaaagatcacgacgccatcaagttattcgtggggcagattccacgcgggctggatgaacaggatctgaagccacttttcgaggaattcggacggatctacgaactcaccgtgttgaaggaccggttaaccggactccataagggctgtgcttttctcacctattgcgcacgcgattcagcgctgaaagctcagtcagccctgcatgagcagaagacccttcctggcatgaataggcctatccaggtgaagccggccgcatctgaggggaggggtgaggataggaagctcttcgtcgggatgcttggcaagcagcagggcgaggaagatgtgcgcagactttttcagcctttcggacacatcgaagaatgtactgtgctgcggagccccgatggcacatcaaaaggctgcgcattcgtcaaatttggatcccagggagaggcccaagctgccataaggggactgcacggaagcagaaccatggccggagcctcctcatctctggtggtcaaacttgcagatactgaccgagagcgggccctccgtagaatgcagcagatggccggccatttgggcgcttttcacccagcccctctgccattaggtgcatgtggtgcctacacgaccgctatccttcagcaccaagcagcattgctagctgctgcccagggtcctggattgggccctgtcgcagcagtcgcggcccagatgcagcacgtggcagcattttccttggttgccgcgcccctgctgcctgcggcagctgcaaattcccctccagggtcgggcccgggaacactgcccgggctgcctgctcccattggcgtaaacgggtttggccccctgaccccacagaccaacggccaacccggctctgatacattgtataacaacggcttgagtccatatcccgcgcaaagccccggggtcgccgatcccctacaacaggcttacgccggcatgcaccattacgcaggccccgagggctgcaatctgttcatctaccatctgccgcaggaattcggggacgccgagttaatccagacatttctcccttttggggctgtcgtgtcagcaaaggtgtttgtggacagggcgacaaaccaatctaagtgcttcggttttgtttccttcgataacccaacaagcgcccagactgccattcaagcaatgaatgggtttcagatcggcatgaaaaggctgaaagttcagctcaagcgaccgaaagatgctaatcgtccctattag

SEQ ID NO: 184142 - DNA, 1029 bp, synthetic construct
  misc_feature 1..1029: note = Description of Artificial Sequence: Synthetic coding sequence
  source 1..1029: mol_type = other DNA
atgctgggcaagcagcagggcgaggaggacgtgcggcggctgttccagccattcggtcacatcgaggagtgcacagtcttgaggagtcctgatgggacctctaaggggtgcgcattcgtgaagttcggaagccagggtgaggctcaggccgccattcgaggattacacggtagcagaaccatggccggtgcctctagcagtttggtggttaagctggccgataccgaccgcgagagagcccttcggcgaatgcagcagatggctggccacctgggcgctttccatccagctcctcttcccctcggggcttgtggcgcctacacgactgcgatcttgcagcaccaagctgccctattggctgcggctcaggggcccggactcggtccagtggccgccgtggccgcccaaatgcagcatgtggctgcattttcactagtggccgcgcccctgctccctgctgccgccgcgaattccccaccgggttccggcccggggactttaccagggcttccagccccaatcggtgtgaatggctttgggcccctgacaccgcagactaatgggcagccgggcagcgacactctgtacaataatggcctcagcccctaccccgctcaaagcccaggtgttgctgatcccctgcaacaggcctacgccggtatgcaccactacgccgccgcttatccatctgcatacgcccccgtgtcaactgccttccctcagcagccctccgctttaccccagcagcagagagaggggccagagggctgtaacctttttatctaccatttaccccaggagttcggcgacgcggaactgattcagacatttctaccttttggagcagtggtctccgctaaggttttcgtggaccgcgcgacaaaccagtctaaatgttttggcttcgtctcctttgataaccccacatctgcccaaacagcgatccaggcgatgaacggattccagattgggatgaagaggttgaaggtgcagcttaagcgtcctaaagacgccaatcggccatactag

SEQ ID NO: 184143 - DNA, 1035 bp, synthetic construct
  misc_feature 1..1035: note = Description of Artificial Sequence: Synthetic coding sequence
  source 1..1035: mol_type = other DNA
atgaaccggcccatccaggtgaagcccgccgccagcgagggccggggagaagatcggaaactgtttgtagggatgcttggcaagcagcaaggcgaggaagacgtgagacggctgtttcagcctttcggacatattgaggaatgcacagttctacggagccctgacggaacatctaaagggtgcgcttttgtaaaatttggctcccagggcgaagcccaggcggctatcagaggccttcacggctctcgcaccatggccggagcttcatccagtctggtcgtgaagctggcagacactgatagagaacgggccctgcgacgcatgcagcagatggccgggcacctcggggccttccatcccgcacctcttccactgggggcatgtggtgcctatacaacagcgatactgcagcatcaggcggcgctcctggccgcagcccaaggccccgggcttgggcccgtagcagcggtggccgctcagatgcagcatgttgctgctttttccctcgtcgcggcgcctcttcttcctgctgcagctaattcgcctccaggcagcggtccaggtacacttcccggactgcctgcacctattggcgtgaacgggtttggccctctgacaccccaaaccaatggccaacccgggagtgacaccttatacaataatggattatcaccatatcccgctgcatatcctagcgcttatgcccctgtgtctaccgcattccctcaacagcctagcgctctcccacagcagcagcgtgaaggtcctgaagggtgcaacctgttcatataccacctcccccaggagttcggggacgccgagctgatccaaacatttttgcctttcggcgcagtggtgagtgctaaggtcttcgtcgacagggctaccaaccagagcaagtgctttggctttgtgtccttcgataatcccacctctgctcagaccgcaattcaggcgatgaatggcttccagatcgggatgaaaagattgaaggtacagctaaagagaccgaaagacgccaatagaccctattag

SEQ ID NO: 184144 - DNA, 1980 bp, synthetic construct
  misc_feature 1..1980: note = Description of Artificial Sequence: Synthetic coding sequence
  source 1..1980: mol_type = other DNA
atgctgtacaagcagctgcggcaggcctgcgaggaccacgtgcaggcacagatcctgccttttcgggaggactcccttgactctgttctgtttcttaaaaagattaatacatgctggcaggatcactgccgacagatgatcatgatccgtagtatctttctatttctcgatagaacctatgtccttcagaatagcactctgccgagtatttgggacatggggcttgaattgtttcgtacccatattatcagtgataaaatggtgcagtccaaaaccatcgacggtatcctgctgctcatcgagcgggaaagatcgggcgaagccgtggacaggagtctccttcggtcacttctgggcatgttgagcgatctacaagtgtacaaggattcttttgaactgaagtttctcgaggagacaaactgcctttacgccgccgagggtcagcggctgatgcaggaacgtgaagttcccgaatatctgaatcacgtgtctaagagactggaagaagagggggacagagtgattacgtacctagaccattcaacgcaaaagccgctgattgcctgcgtggaaaaacagctgttaggggagcatctcaccgcaatactgcaaaaaggactggaccacctccttgatgagaatagggtgccagacctggcgcagatgtatcagctcttcagcagagttcggggtggacagcaggctttacttcagcactggtccgagtacataaagacttttggtaccgcgatcgtgatcaatccagaaaaggataaggacatggtgcaggacctgctcgatttcaaagataaggtcgatcatgtcatagaagtctgctttcaaaaaaacgaacgattcgtaaatttgatgaaagagagcttcgaaactttcattaacaaaaggcccaacaaacccgccgaactcatcgccaagcacgtggactccaagctgcgcgctggtaacaaagaggctaccgacgaggagctcgagcggactctggataagattatgatcctctttcgcttcatccacggtaaggatgtattcgaggccttttacaagaaggacttggccaaacgactgctcgtgggcaaaagtgctagcgttgatgccgagaaaagtatgctgtccaaactaaagcatgagtgtggcgcagccttcacgtcaaagttggaagggatgttcaaagacatggagctctccaaagacattatggtgcacttcaaacagcatatgcagaaccagagtgatagtgggcccatcgacctaaccgttaatatcctgaccatgggctattggccaacatacacccccatggaggtgcacctgacccctgaaatgattaaactgcaggaggtttttaaagcgttttatctgggcaagcactcgggcagaaaactgcagtggcagaccacccttggtcacgctgttctgaaagccgaatttaaggaaggtaagaaggaattccaggtttccctctttcagacacttgtcctgttgatgttcaacgagggggacggattctcttttgaggagatcaagatggctacagggatcgaggattccgaactgaggcgtaccctgcagtcccttgcttgtgggaaggcgagggtacttatcaagtccccaaaaggcaaggaggtagaggacggggacaaatttatttttaatggtgaatttaaacataaactctttcgcatcaagatcaatcaaatccaaatgaaagagactgtggaggagcaggtgtccacaaccgaacgcgtgttccaagaccggcagtaccagatcgatgccgcgattgtgaggataatgaagatgcgcaagaccctcggccacaatttgctggtatctgaactgtataatcaacttaagtttccagtgaagccaggcgatctcaagaaacgcattgagtctttaattgacagggactatatggaacgtgacaaagacaatcccaatcagtaccactacgtggcttag

SEQ ID NO: 184145 - DNA, 2280 bp, synthetic construct
  misc_feature 1..2280: note = Description of Artificial Sequence: Synthetic coding sequence
  source 1..2280: mol_type = other DNA
atggccgacgaggccccccggaagggcagcttcagcgccctggtgggacgaacgaatggcctgaccaagcctgccgccttggctgccgcacctgctaagccaggcggcgcaggcggttccaaaaagctggtgatcaaaaattttcgggatcgcccgcgtctgcccgataactacacgcaggacacctggcgcaagttgcacgaggccgtgagagcagtacagtcctccacgtctatccgctacaatttagaggaattgtatcaagccgtcgagaacctgtgtagccacaaagtgtccccgatgctgtataagcagctgcgccaggcttgtgaggaccatgttcaagcccagatcctccctttccgagaagatagcctggactctgtgctcttcctcaaaaagatcaatacctgttggcaggaccattgccgccagatgatcatgattcgatctatcttcttatttctcgatcgtacatacgtgttacagaacagcacactgccatccatttgggacatgggcctggaactcttccgtacgcacatcatctcagataagatggtccagagcaaaactatcgatgggatcttgttgctgatcgagcgtgagcggtcaggcgaagcagtggatagatctctgctcaggtcactgctgggcatgctcagcgatctccaagtttacaaggacagttttgagctcaaattcctcgaggagaccaactgtctatacgccgcggagggacaacgcctgatgcaggagagggaggtcccagaatatttaaaccacgtcagcaagaggctcgaagaggaaggcgatagggtgatcacctacttggaccattccactcagaagcccctaatcgcgtgcgttgagaaacagcttttaggggagcacctgaccgctatcctccagaaaggactcgatcatctgctcgacgaaaatcgggtgcccgatctggctcagatgtaccagctcttctcgcgagtgcggggaggccaacaagccctgttgcagcactggagtgagtacatcaaaacattcggcaccgccatagtgattaaccccgagaaggataaggacatggttcaggacctcctggattttaaggacaaggttgaccacgtgatcgaggtgtgcttccaaaaaaatgagcgctttgtaaacttgatgaaggagagcttcgagacgttcattaataagcggcccaacaaacccgccgaacttattgccaagcatgtggattctaagctcagagcaggaaataaggaagccactgatgaagaactggaacgcactctggacaagatcatgatcctgtttaggtttattcacggtaaggatgtctttgaagcgttctacaagaaggatcttgccaagcgtctcctggtggggaagtctgcaagcgttgatgcagagaaatctatgctttccaagcttaagcacgagtgtggggccgccttcacatccaagttggaggggatgttcaaggatatggaattgtctaaggacataatggtgcattttaagcaacacatgcagaaccaatctgacagcggtcccatagatctgactgtgaacatattgaccatggggtattggccaacctataccccaatggaggtgcacctgactccggaaatgattaagttgcaggaggtgttcaaggcattctacctgggcaagcactctggccggaagctacagtggcaaaccaccctcggccacgcggttctcaaggccgaattcaaagaaggaaaaaaagaatttcaggtgtccctgtttcaaaccttggtcctgttgatgttcaatgagggagacgggtttagcttcgaagagataaaaatggcaacagggattgaagattctgaattgcgacgaacccttcagtccctggcgtgcgggaaggcaagagttctaatcaagagccctaaaggaaaggaagtcgaggatggggacaagttcatcttcaatggcgagttcaaacataagttatttaggattaagattaaccagatacagatgaaggagaccgtcgaggagcaggtgtccacgactgaaagggtgtttcaggatcgtcagtaccagattgatgcagcaattgtccggataatgaagatgcgcaagacactgggacataatctgctcgtgtccgagctctataatcaactgaaatttcctgttaaacctggagatctcaaaaaaaggatcgagagtctcattgatagggactatatggaaagagacaaagataatcccaatcagtaccactacgttgcttag

SEQ ID NO: 184146 - DNA, 1980 bp, synthetic construct
  misc_feature 1..1980: note = Description of Artificial Sequence: Synthetic coding sequence
  source 1..1980: mol_type = other DNA
atgctgtacaagcagctgcggcaggcctgcgaggaccacgtgcaggctcagattctgccattccgcgaggattctctagattcagtactgttcctgaagaagatcaacacctgctggcaggatcattgtaggcaaatgattatgatccgatccatctttctattcttggatcgtacgtacgtgcttcaaaattctaccctgccctcaatttgggacatgggcctggagctgttccgcacacacatcatctccgataagatggtgcaaagcaagacaatcgacggtatactgctgctgattgagagggagcgctccggcgaagccgtggaccgctccctcctaaggagcttgttgggcatgctcagcgatctgcaggtttacaaggactcttttgaactgaaatttttggaagagacaaattgcctatatgccgccgagggccaacgactcatgcaggaaagagaggttcctgaataccttaaccacgtatctaaaagactcgaagaagagggagacagggtgattacatacctggaccattccacgcagaagccgctgattgcatgcgtggaaaaacagctgctcggcgaacacctgacggcaatactacagaagggattggaccatctgctcgacgaaaatcgtgtacctgacctggctcaaatgtatcaactattcagccgcgtaagaggcggccaacaggctctgttgcagcactggtccgaatatatcaaaacatttggaacagccatagttatcaatccggaaaaggataaagatatggtgcaggatctcctggatttcaaggacaaggttgatcacgttatagaagtctgctttcagaagaatgaaaggttcgtcaacctcatgaaggaatccttcgagacctttatcaacaaaagaccgaacaaacccgcggaactcattgcaaaacacgtcgatagtaagttacgtgcaggcaataaggaagcgactgatgaagaattggaacgaacgttggacaagatcatgatcttattccgcttcatccacggcaaagatgtttttgaggctttctataagaaggacttagccaaacggctcctggtaggaaagtccgcctccgtggatgcagaaaagtcgatgctatccaagctgaagcatgaatgtggcgccgcatttacttccaagctcgagggaatgttcaaagacatggagctgagcaaagacatcatggtgcatttcaaacaacatatgcagaaccaatctgactctggtcccatagatctgactgttaacatacttactatgggatattggccaacatacactcctatggaggtccacctgacccccgaaatgatcaaactccaggaggtctttaaggccttttatctgggcaagcatagcggccgcaagctgcagtggcaaacaacgttgggccacgccgttctcaaggcagaatttaaagagggaaaaaaagagttccaggtctctcttttccagaccctagtgctgctaatgtttaatgaaggcgacggcttttccttcgaggagataaagatggcgacggggatcgaagatagtgagctgcgccggaccctgcagtcactagcgtgcgggaaggcccgtgtactcatcaagagccctaaagggaaggaggtcgaagatggtgataaatttattttcaatggagagttcaagcacaagctgtttagaattaagatcaatcagatccaaatgaaggagacagttgaggagcaggtcagtactacagaacgcgtgtttcaggatcgacagtatcagatagacgccgctatcgtgaggatcatgaagatgaggaagacgctgggacataacctgctcgtctcagagctttacaaccaactaaaatttccagtgaaacccggcgatctcaagaagcgaatcgagtcgttaatcgatcgagactacatggaacgagacaaggataaccccaaccagtaccactacgtggcatag

SEQ ID NO: 184147 - DNA, 1980 bp, synthetic construct
  misc_feature 1..1980: note = Description of Artificial Sequence: Synthetic coding sequence
  source 1..1980: mol_type = other DNA
atgctgtacaagcagctgcggcaggcctgcgaggaccacgtgcaggcgcaaatcctccccttcagagaagattccctggactctgttttgtttctcaaaaagatcaatacttgctggcaagaccattgccgacagatgatcatgatccggtccatctttttattcctggacagaacttatgtcttacagaactcaaccctcccatccatctgggacatggggctggagctttttagaacccatatcatttctgataagatggttcagtccaaaacaatcgatggaattttgttgttgatcgagagagaaaggagcggcgaggctgttgataggtctctattacgcagtctgctgggaatgctgagcgatttacaggtgtacaaggactcattcgagctgaaattcttagaggaaacgaactgtctgtacgccgctgaagggcaacgtcttatgcaggaaagggaagtgcctgagtaccttaatcacgtgagcaagaggctggaggaggaaggagaccgagttattacatacctggaccatagcacacaaaagccactaatcgcctgcgtggaaaaacagctcctgggagaacacctgactgcaatcctacagaaaggactcgatcacctgctggatgagaatcgggtccccgatctggcccaaatgtatcagctctttagtagagttcgcggagggcagcaggccttgctgcaacactggagcgaatacatcaaaactttcggcaccgctattgttattaatcctgagaaagacaaagacatggtgcaggaccttcttgacttcaaagataaagtcgaccatgtgatcgaggtgtgtttccagaagaacgagcgattcgtgaatctaatgaaagagtccttcgagacctttatcaacaagcgacccaataaacccgctgaactcatcgccaagcatgtcgactcaaagctcagggctggaaacaaagaggcaacagatgaggagctggaacgaacactggacaaaataatgatcttatttcgttttatccacgggaaggacgtgttcgaagccttctataaaaaagatctcgcaaaacgactcctggtgggtaaatccgcctcggtggatgctgagaaaagtatgctatccaagctcaagcatgaatgtggtgctgccttcacttccaagttggaaggcatgttcaaagacatggaactgagtaaggacataatggtacattttaagcagcatatgcagaaccagtctgactccggcccgatcgatcttacagtaaacatcctgacaatgggctattggccaacttacacccccatggaggttcacttaactcctgaaatgatcaagctgcaagaggtgtttaaggccttttaccttggaaaacacagcggaagaaagttgcagtggcaaacaacactcggccacgctgtccttaaggccgaatttaaagaagggaagaaggagtttcaagtctctcttttccaaactctggttctattaatgttcaatgagggtgacggcttttcattcgaagagattaaaatggcgactggaatcgaagacagcgaacttcgcaggacactgcagtccttagcctgcggaaaagcacgcgtgttaataaaaagcccgaaggggaaggaggtcgaggacggcgataagtttatcttcaatggtgagttcaaacataagttattccggataaagattaaccaaatccaaatgaaagagaccgtcgaggagcaagtctcgactacagaacgggtattccaagatcgacagtaccagatagatgccgcaatcgttaggataatgaagatgcgtaagactctcgggcataacttgctggtttccgagctttacaaccagctgaaattccccgttaaacccggagatctcaaaaaacggatcgagagcctgattgatcgcgactatatggagagagacaaggataatcccaaccaataccactacgtcgcctag

SEQ ID NO: 184148 - DNA, 2703 bp, synthetic construct
  misc_feature 1..2703: note = Description of Artificial Sequence: Synthetic coding sequence
  source 1..2703: mol_type = other DNA
atgaagagcgtgtgccccgtgaccagcggcttcagcagccccagcccatcagcagccgccgctgcacaagaggttcgaagcgcaacagacggcaacactagcactacccctcctacctctgccaaaaaacggaagttgaactccagctcatccagcagctctaattcgtccaatgagagagaagactttgatagcacttccagttccagcagtacaccccctcttcagcctcgagacagcgcgagtcccagcaccagctctttttgccttggcgttagcgtggctgcctccagtcacgtgcctatacagaagaaactgaggttcgaggataccctggagttcgtgggctttgatgccaagatggctgaagagtcctcgtcttcaagctcttcctctagccctacagccgccacgagccagcagcaacagctgaagaataagtccattcttattagctctgttgccagtgttcatcacgctaatggcctggctaagtcttcaaccactgtgagctccttcgctaattcaaagcccggcagtgctaagaagttggtgataaaaaactttaaggataagcccaaactgccggaaaactatacagatgagacttggcagaaattaaaggaagcagtagaagccattcaaaattccacatccatcaaatacaatctcgaggagttgtatcaggccgtcgaaaatctgtgttcgtataagataagcgccaacctttataagcagctgaggcagatttgcgaagaccacatcaaagcccagatacaccaatttagggaagattccctggattccgtgctattcctgaagaagattgaccgctgctggcaaaaccactgtaggcagatgatcatgatccgatccatttttctttttctggatagaacgtatgttctacagaactcaatgctgccttccatctgggatatgggcctggagctgtttagggcacatattatttctgatcagaaagtgcagaataagactatcgacggtatcctgctgctcatagagcgagaaagaaatggggaggcgattgatcgtagcctgctacgctcccttctgagcatgctttccgatcttcaaatctatcaggattctttcgaacagcgattcctagaagaaacaaaccgtttatatgctgccgagggtcagaagttgatgcaggagcgcgaggtgccggaatatttgcatcatgtaaataaaaggctcgaggaagaggccgaccggctcatcacatatctggaccaaactacccaaaaatcgcttatcgctaccgtggaaaagcaactacttggggagcatttaactgcaatcctccaaaaaggattgaataacctgctggacgagaatcgcattcaagacctgagcctgctttatcagctattttcgagagtgcgcggcggtgtccaggtgcttctacagcagtggatcgagtatataaaggcttttggttctactatcgtcattaatcctgaaaaggacaaaactatggtacaggagttgctggatttcaaagacaaggtcgatcatattatcgacatctgttttttaaagaacgagaagttcattaatgcaatgaaggaggcctttgaaactttcatcaacaagagacctaataagcccgccgagctcatcgccaagtacgtggattcaaaactaagggcaggcaataaggaggccacagatgaagagctcgagaagatgctggacaagatcatgatcatctttcggtttatctacggtaaggacgtttttgaggccttctataaaaaggacctggctaagaggctattagtgggcaaaagtgcatcagtcgacgcagagaaatctatgctttccaaacttaaacatgaatgtggagccgcgttcacgagcaaactcgagggtatgtttaaggacatggaactctccaaagacattatgatacagttcaagcagtacatgcaaaaccagaatgtgccagggaacatagaactgaccgtcaatattttaaccatgggctattggcctacgtatgttcccatggaggttcacctgccacccgaaatggtaaagctccaggaaatattcaagactttctacctcggaaagcactcaggtcggaagctccagtggcagagtaccttaggtcactgcgttttgaaagccgagttcaaagagggcaaaaaggagttacaggtttctctcttccagacactcgtcctactcatgttcaacgaaggcgaggaattctcacttgaggagataaagcaagccaccgggatcgaagatggtgagctcaggcgcaccctacagtcactggcctgtggtaaagcccgagttctggctaagaacccgaaagggaaagacatcgaggacggagataagtttatatgcaatgatgacttcaagcacaaacttttcagaatcaagattaaccagatccagatgaaggagaccgtggaggaacaggccagcacgactgagagggtgtttcaggatcggcagtatcaaatcgatgccgcaatcgtgcgtattatgaagatgagaaagaccctaagccataacctgctggtttccgaagtttataatcagctcaaattcccagttaagcctgcggaccttaagaaacgcatcgagtcactcatcgacagagactacatggaaagagacaaagagaatcccaaccaatacaactacatcgcatag

SEQ ID NO: 184149 - DNA, 2688 bp, synthetic construct
  misc_feature 1..2688: note = Description of Artificial Sequence: Synthetic coding sequence
  source 1..2688: mol_type = other DNA
atgttccccaccggcttcagcagccccagccccagcgccgccgccgccgcccaggaggtgagatctgctacggatgggaacacttcgacgacacctcctacgagtgcaaaaaagcgcaaattaaactcaagttccagctctagtagtaactcaagcaacgagagggaagatttcgatagcacttcatcttcgtcctctacccccccgctccagccgagagacagcgcttccccgagcacatccagcttttgtctcggcgtctctgtggcagcaagttctcacgtgccgatccaaaagaaactgaggttcgaagatacactggaattcgtcggttttgacgccaaaatggccgaggagtcctcctcgagctcatcatcttccagccccaccgctgccacatctcagcagcaacagctaaaaaacaagtctatcttaatatcctccgtggcctctgttcatcatgccaatggattggccaagtcatccactactgtgagttcctttgccaattcaaagcccggttcagccaagaagttggtgattaaaaattttaaagataagccaaagctgcccgagaattataccgatgaaacctggcaaaaactgaaggaagcggtcgaggcaatacagaactccacatctattaagtataatctcgaagaattgtatcaggccgtggaaaatttatgctcgtataaaatctctgcaaatctgtataaacagctgcggcagatatgcgaggatcatattaaagcccagatacatcagttcagggaggactcacttgactcagtgctattcctcaaaaagatagatcggtgttggcagaaccactgcaggcaaatgatcatgatccgctccattttcctcttcctagatcggacttacgttcttcagaattccatgcttcccagcatttgggatatgggccttgaactcttccgagcccatataattagtgaccagaaagttcagaataagactatcgacggcatactattactgattgagagagaaaggaatggtgaggccattgaccgctcccttttgaggagcttgctctcaatgctgtcagatctgcaaatttaccaagactcatttgaacagcggttcctggaggagaccaatcgcctgtacgccgctgaaggccagaagctgatgcaggaacgggaggtgccagaatatctccaccacgtaaacaaaagactggaagaagaggctgatcgcttgatcacctatttggaccaaaccacgcagaagtcactgattgccactgtagagaagcagctcctaggggagcatctcacggctattttgcagaaaggcctgaataatttgttggatgagaatcggatccaggatctgtctctattataccagctgttcagcagagtgaggggcggagtgcaggtcctcctgcagcaatggattgaatatatcaaggcctttggctcgaccatagtaatcaaccccgaaaaggacaaaacaatggtgcaggagctcctcgactttaaggataaggtggaccatattatcgacatctgttttctgaagaacgagaagttcatcaatgccatgaaagaggcctttgaaacctttatcaataaaaggcctaataagccagccgagttgattgccaagtatgtagatagcaagctgcgggccgggaataaggaggccacggatgaagaactggagaaaatgctggataaaattatgatcatttttcggttcatatacggcaaggacgtctttgaagccttctacaagaaagacttggccaaacgtctgctagtgggaaagagtgcatccgttgacgctgagaagtctatgctttcaaaactaaagcacgagtgcggtgccgccttcacgtccaaactggaggggatgttcaaagatatggaattatccaaagacattatgattcagttcaagcaatacatgcagaatcagaatgtcccgggtaatatcgaactgacagtgaacatactgacgatggggtattggccaacatacgtccccatggaggtccatctgccacctgagatggtgaagttgcaagagatttttaagacattttatttgggcaagcactctggacgaaaactgcaatggcagtccactttgggacactgtgtactaaaggctgaatttaaagagggcaagaaagaactccaggtgtctttgtttcagacacttgtcttgctgatgtttaatgagggtgaagagttctcactcgaggagataaagcaggcgacaggcatcgaggatggggaactgcgcagaaccttacaaagtctggcctgcggcaaagccagggtgttggctaaaaaccccaaaggcaaggatatagaggatggggataagttcatttgcaacgacgactttaaacataaactctttcggattaaaataaaccaaatacagatgaaagagacggtggaggagcaggcctccacaactgaaagggtgttccaggatcgccagtaccagattgatgccgccattgtgaggattatgaaaatgcgaaaaacgctgtctcacaatttgctcgtctccgaggtgtacaatcagctgaagttccctgttaaaccagccgaccttaagaaaaggatcgagtccctaatcgacagggactatatggaaagagacaaggaaaaccccaaccagtacaactacatcgcctag

SEQ ID NO: 184150 - DNA, 705 bp, synthetic construct
  misc_feature 1..705: note = Description of Artificial Sequence: Synthetic coding sequence
  source 1..705: mol_type = other DNA
atgatcgaccccgacttcgccgacaagcccaagctgcccgagaactacaccgacgagacctggcaaaaactgaaagaagccgtcgaggcaatccagaattctacctccatcaagtacaatttagaagagctttaccaagccgtcgaaaacctttgctcttataaaatctcggcgaacctgtacaagcagttaagacagatatgcgaggaccacataaaagcccagatccaccaatttagagaggactcccttgattccgtgctcttcttaaagaagatagatcggtgctggcaaaatcactgtcggcagatgatcatgattaggtccattttcctgttcctagaccgcacctacgtattacagaattctatgctgccctctatatgggacatgggtctggaactgtttcgggcacacattatttccgatcagaaagtccaaaacaagacgatagatggcattctgttgctgatcgagagggaaagaaatggtgaggccatagatcgctccctactgcgttcattattgtctatgttgagtgacctgcaaatctaccaagattccttcgagcaacgattcttggaggaaacaaatcggctctatgctgcggaaggacagaagctgatgcaggagagagaggttcccgaatatcttcatcacgtgaacaaaagactggaagaagaggccgaccgtctgatcacatag

SEQ ID NO: 184151 - DNA, 2742 bp, synthetic construct
  misc_feature 1..2742: note = Description of Artificial Sequence: Synthetic coding sequence
  source 1..2742: mol_type = other DNA
atgatgagccagagcagcggcagcggcgacggcaacgacgacgaggcaaccacctccaaagacgggggattttcaagtcccagtccttccgccgctgccgctgcccaagaagtgaggtcagctacggatgggaacacatccaccacaccccccacttccgccaagaaacgcaagctcaattcctcttcgtcctcatcttccaacagttccaatgagcgggaggacttcgattctaccagttcgtcctcatcaacgcctcccttgcagccaagggacagcgcttctcccagcaccagcagcttctgtttgggtgtgtcagtcgccgctagtagccacgttcctattcaaaaaaagctgagatttgaggacaccctcgaattcgtcggttttgatgctaaaatggccgaagagtccagttcctcaagtagcagtagcagtcctaccgccgctaccagccaacagcaacagttgaaaaataaaagtatcctgatttccagcgtggcttcagtgcaccacgccaatggcctggcaaaatcgtctacgacagtatctagtttcgcaaacagtaaaccaggctctgcgaaaaaactggtaataaaaaactttaaggacaaaccaaagctgcccgaaaactacactgacgagacgtggcaaaagcttaaagaggccgtggaggcaatccagaatagcacttcaataaagtacaatctcgaagagctatatcaggccgtcgaaaacctatgtagctacaaaatctccgctaacctctataagcagcttcgtcaaatttgtgaagaccacatcaaagctcagatccatcaatttcgcgaggatagcttggattccgtgctgttcctcaagaaaattgatcggtgctggcagaaccactgtcggcagatgattatgatacgttccatctttctctttcttgatcgaacgtatgtgctgcaaaatagtatgctaccttcaatatgggacatgggtctcgagctgtttagagcccatattatctctgaccaaaaagttcagaacaaaactatcgatggaatccttctactgatagagagggagagaaacggagaagccatagaccggagcctcttacggagcctgctgagtatgctgtccgacctacagatctatcaggactcttttgagcaacgattcctggaagagactaatcgcctgtacgctgccgaggggcagaagctaatgcaggagagagaagttccagagtatctccatcacgtgaacaagcggctcgaagaggaagctgatagactgatcacatacctggaccagaccactcaaaagtcattgattgcgacagtggagaagcagctacttggcgaacatctaacagcgatcttgcagaaggggctgaacaatctgctggacgaaaatagaatccaggacctcagtctactctaccaattattcagcagggtccgcggtggcgtccaggtattgctgcaacaatggatcgagtatattaaagctttcggctcaaccattgttatcaatcccgaaaaggacaagactatggtccaggaacttctagacttcaaggataaggttgaccatattatcgatatttgcttcctaaagaacgagaagttcataaacgccatgaaagaagcctttgagaccttcatcaacaagaggcctaacaagccggctgaattgatcgcaaaatatgtggatagcaagcttcgggcaggaaataaagaggcaacagatgaagagctagaaaaaatgctggacaaaattatgataatatttcggttcatctatggaaaggatgtcttcgaggcattctataagaaggaccttgcgaaacgtcttctggttgggaaatctgctagcgtggatgctgagaaatccatgctgtccaagctgaagcatgagtgcggggcggccttcacatccaaacttgaggggatgttcaaggatatggagctgtcaaaagatattatgatccaattcaagcagtacatgcagaaccagaacgtcccaggcaacatcgagttaaccgtgaacattctgaccatgggctattggccgacctatgtccccatggaagtccatctgccacctgaaatggtgaagctccaggaaatctttaagaccttctacctggggaagcattctggccgaaaactccaatggcagtcaactctcggccactgtgtgttaaaggccgaattcaaagaaggtaagaaggaactgcaagtgagcctgttccagaccctcgtgcttttaatgtttaacgagggagaggagttcagtctggaagagattaagcaggcaaccggtattgaggacggcgaactcaggcgcacactgcaatccttggcatgcggaaaggcgcgcgtgttggccaagaaccctaagggcaaggatatagaagatggagataaattcatatgtaacgatgacttcaaacataaattgtttcggattaagatcaatcagattcagatgaaggagactgtggaagaacaggcttctacaaccgaacgggtatttcaggataggcagtaccaaattgacgccgccatcgtgcgcattatgaaaatgcgcaagacactgtctcacaatctcttggtcagcgaagtgtataatcaactgaagttccccgtaaagcccgcagacctaaaaaagcgaatcgaaagcctaatcgacagggactatatggagagggataaagagaaccctaaccagtacaattacatagcctag

SEQ ID NO: 184152 - DNA, 2343 bp, synthetic construct
  misc_feature 1..2343: note = Description of Artificial Sequence: Synthetic coding sequence
  source 1..2343: mol_type = other DNA
atggccaccagcaacctgctgaagaacaagggcagcctgcagttcgaagacaagtgggacttcatgaggcctatcgtcctgaagctcctgcgccaggaaagcgtgaccaaacaacagtggtttgacctgttctcagatgtgcacgctgtttgtctgtgggacgacaagggacccgctaaaatacatcaggctctgaaagaggatattttagaattcatcaagcaagcccaagccagagtgctgtctcaccaggacgacaccgccctgttaaaggcttacatcgtagaatggcgaaagttcttcactcagtgtgacatccttccaaagccattttgccagttggagatcacgctgatggggaagcagggaagtaacaaaaaaagcaacgttgaggactccatcgtacgaaaattgatgttagatacatggaatgagtcaattttttctaacatcaaaaataggcttcaggattctgccatgaaactggtgcatgctgagagactgggcgaagcctttgattcgcagctggttattggggttcgggagagctacgtgaacttgtgtagcaatccagaggacaagctgcagatctatcgcgacaattttgaaaaagcatacttagatagcaccgaacggttctaccgcacccaggcacccagttacctccaacagaatggcgtgcagaactacatgaaatatgccgatgctaaactgaaagaggaagagaaaagagccttgcggtatctggagacacgaagagagtgcaactcagttgaggccttaatggagtgctgtgttaacgcacttgtcaccagtttcaaggagactatcctcgccgagtgtcagggtatgattaaaagaaatgaaactgaaaaactccacctgatgttttcactgatggacaaagttcctaatgggatcgagccgatgctaaaagatttggaagagcacatcattagtgccggacttgccgacatggtggcagcagctgaaaccatcacaacagacagcgagaaatacgtagaacagctgcttactctctttaatcgctttagtaagctggtcaaggaggcgtttcaggatgatccccgctttctaactgcgagggacaaagcctacaaggccgtcgttaatgatgcaacgatttttaagctagagctgcccttaaaacagaagggggtcggcctgaagactcagcccgagagcaagtgcccagaattacttgccaactactgcgacatgctgctgcgcaaaacccccctatctaaaaagctgacaagtgaggaaatcgaagcgaagctgaaggaagtgttgttggtgttgaagtacgttcagaacaaagatgtattcatgagataccataaggctcacctcacccgacgactgatcctggatatcagcgcagacagcgagattgaggagaacatggttgagtggctcagggaagtaggaatgcctgcagactacgtgaacaagcttgcccgaatgttccaggatattaaggttagtgaagacttgaatcaggcctttaaagagatgcataaaaacaataagttagcacttccggccgactctgtgaacatcaaaatactaaacgccggcgcttggtcacggagtagtgaaaaggtcttcgtgtcccttcccaccgagcttgaggatctcatccctgaagtggaggagttctataaaaagaatcatagcggcaggaagctgcattggcaccatctgatgtccaacggcatcattactttcaagaatgaagtgggacagtacgacctggaggtgacgaccttccagctcgcagtcttatttgcctggaaccagagaccacgcgaaaagattagcttcgaaaatttgaaactggctacagagctcccagacgctgaattaagaagaaccctctggtcgttggttgcctttccaaagctgaagagacaggtgttactgtacgagcctcaggtaaactcccctaaggactttactgagggaacactcttcagcgtaaaccaggagtttagcctcatcaaaaatgctaaagttcagaaacgaggcaagattaacctcatcggccgactccagcttaccactgaacgcatgcgggaggaggagaatgaaggtattgtgcagctgagaattcttagaacccaggaagcgattatccaaatcatgaagatgaggaaaaagataagtaatgctcagctgcagaccgagctggtggagatactaaagaatatgtttcttccccaaaagaaaatgatcaaagagcagatcgagtggcttattgaacataaatatatcagacgtgatgaatcagatatcaacacctttatctatatggcttag

SEQ ID NO: 184153 - DNA, 2343 bp, synthetic construct
  misc_feature 1..2343: note = Description of Artificial Sequence: Synthetic coding sequence
  source 1..2343: mol_type = other DNA
atggccaccagcaacctgctgaagaacaagggcagcctgcagttcgaagataagtgggattttatgaggcctatagtgctcaagctcttgcgtcaggaaagcgtgacgaagcagcaatggtttgacttattttcagatgtccacgccgtgtgcctttgggatgataaggggcctgcaaagatccaccaggcgctcaaagaagatatcctggagttcattaagcaggcacaggcccgcgttctatctcaccaggatgacaccgccctgttaaaggcctatattgttgagtggagaaaattcttcacccaatgcgacatcctgcccaaacccttttgtcaactcgaaatcaccctgatgggcaaacaggggtctaacaaaaagtctaacgtggaagattccatcgtcaggaagcttatgttggacacatggaacgaatctatattcagcaatatcaagaataggctgcaagatagcgctatgaagttggtccacgccgagcgccttggagaagccttcgacagccagctcgtgatcggggtgcgtgaatcatacgtcaacctctgtagtaatcctgaagacaagctgcagatatatcgggataacttcgaaaaggcctacctggatagcaccgaaagattctacaggactcaagcaccaagctaccttcagcagaacggcgttcagaactacatgaaatatgcagacgccaagcttaaggaagaggagaagcgtgctcttcggtacctcgaaactaggcgcgaatgcaactccgtcgaggcactgatggaatgctgcgtcaatgccctcgtgacttcatttaaggaaacaattctcgccgaatgtcaaggtatgattaaacgtaatgagactgaaaagctccacctcatgtttagtctcatggataaggtccccaacggaatagagcccatgctgaaggacttagaagaacacatcatctcggctggcctggctgacatggtggctgctgctgaaaccatcaccacagacagcgagaagtacgtagagcaactgctcacccttttcaatcggttcagcaaattggtcaaagaagcatttcaggatgatcccaggttcttgaccgcacgggacaaggcgtacaaggccgtcgtgaacgacgcgaccatcttcaagctggaactgccactgaagcagaaaggcgtggggctaaaaacccagcctgagtctaagtgtccagaattactggccaactattgtgatatgctcttgaggaagacacccctctccaaaaaacttacttctgaggagattgaggctaaattgaaggaagtactgttggttctgaaatatgttcaaaataaagacgtgtttatgcgttatcacaaagctcatttaacccgcagacttattcttgatatttctgcagattccgaaatcgaggagaatatggttgagtggctaagagaggtgggcatgcccgctgattacgtgaacaagcttgcgcggatgtttcaggatataaaggtaagtgaggacttgaatcaagcttttaaggagatgcacaaaaacaataagttagcacttcctgcagactccgttaatatcaaaatattgaatgccggagcctggtctaggagttcagagaaggtcttcgtgtcactccctaccgaactcgaggaccttatcccagaagtggaggagttctacaagaaaaaccacagtggacggaaactccactggcatcatctgatgtccaatggaatcattactttcaaaaacgaggtaggacagtatgacctggaagtgactacattccagctggctgttttattcgcgtggaaccaacggccacgcgaaaaaatctccttcgagaatctgaagctggctactgagctgcccgacgccgagctgcggcgcaccttatggagcctcgttgccttccccaagttaaaaagacaagttttactctatgagcctcaggtaaattcgcctaaagactttacggagggtacccttttctctgtgaaccaggagttttcactgattaaaaacgccaaagtgcagaagcgcgggaagataaatctgattgggcgcctgcagcttactacagaacgaatgagagaagaagaaaacgaaggtatcgtgcagctgaggatactgagaacgcaggaggctatcatccaaattatgaagatgcgcaagaagatcagtaatgcacaactccaaaccgagctggtggaaatcttaaaaaacatgtttttgccacaaaaaaagatgatcaaggaacagatagagtggttaatagaacacaagtacatccgacgagatgagtccgatatcaacacttttatctacatggcatag

SEQ ID NO: 184154 - DNA, 5097 bp, synthetic construct
  misc_feature 1..5097: note = Description of Artificial Sequence: Synthetic coding sequence
  source 1..5097: mol_type = other DNA
atggtgggcgagctgcggtaccgggagttccgggtgcccctgggcccaggactgcacgcgtatccagacgagctgatacgccagcgagtgggtcacgacggtcacccggagtatcaaatccgttggctgattttacggagaggtgatgagggcgacggtggatccggacaagtggattgcaaggcggaacacatcctactttggatgtccaaggatgagatctatgccaattgccacaagatgctaggcgaagacggccaggtgataggtccctctcaggagtcagctggagaggtcggtgctctggataagagcgtactggaggagatggaaactgacgtcaaatcgctcattcaaagggctctaagacaactggaggaatgcgtcggcaccatacctccggctcccctgctgcataccgtgcacgtgttgagtgcctatgcgtcaatcgaacccttaacaggagtgtttaaggatccacgagtgcttgatctcctcatgcatatgctgtcgtcacccgactaccagatacgttggagcgcggggcggatgattcaagcgctaagcagccatgacgcagggaccaggacccagatcctcctgtccttaagccagcaggaagcaatcgagaagcatcttgatttcgactctaggtgcgcactgttggccctctttgctcaagcgaccctgagcgagcaccccatgtcattcgagggcatacagctgcctcaggtcccagggcgcgtccttttcagcttggtcaagcgttatttacacgtgacaagcctgttggaccaattgaatgatagcgctgccgagccaggcgctcagaatacctcagcccctgaagagctctcgggggagcgcggtcagctggagctcgagttttcaatggccatggggacgctgatttccgagctcgtgcaggccatgcggtgggatcaggcctcggatcggcctcgttcttctgcccggagtcccggctccatcttccagcctcagctcgctgacgtttccccaggcttgcccgccgctcaggcacagccaagctttcgccggtctcggcgctttcgaccaagaagcgagttcgcttcagggaacacatatgccctttacgtgcgagatacactccagccggggatgcgggtacgcatgctggacgattatgaagagattagtgctggcgacgagggggagtttcgccagtctaacaacggagtgccaccagttcaggtgttctgggagagcactggacgtacatattgggtccactggcatatgctggagattctggggttcgaggaggacatcgaggatatggtcgaggccgacgaatatcaaggggcagtcgcatcaagggtcctcggtcgagcactccctgcctggaggtggcggccaatgacagaactttatgctgtcccatacgtacttccggaggacgaggacacagaggagtgcgagcatcttacgttggccgaatggtgggagctgttgttctttattaaaaagctcgacggtcctgaccaccaagaggtgctccagatcctgcaggagaacctggatggtgagatactcgacgatgaaatcttggccgaactggccgtacctatcgagctcgcccaggacctcctcctgacacttccccagagattgaacgattccgcgctgcgggacttgattaactgtcacgtatacaagaaatatggacccgaggcccttgcaggtaatcaagcctaccctagcctgctcgaagcccaggaagatgttctgctgctagatgctcaggctcaggcgaaggactctgaagacgccgccaaggtagaagccaaagagccgcccagtcaatctcctaatacacctcttcagagactggtggaggggtacgggccggccgggaagatcctgctggacctggaacaagctctcagcagtgagggaacacaggaaaacaaagtgaagccgctcctcctccagctgcaacggcaaccccagcccttcctggcgctgatgcaatccctcgataccccggaaacaaataggacactgcatttaaccgtcctcaggatactcaagcaattggtggacttccccgaggccctgttgctcccctggcatgaggccgtcgatgcatgcatggcttgtctgagatcacccaatactgacagggaggtactgcaagagttgatcttttttctgcaccgactcacaagtgtgagccgagactacgccgtggtgctcaatcagctgggtgctcgcgatgctatttcaaaggccttggaaaaacacctagggaaacttgagttagcccaggaattacgggatatggtgtttaagtgcgaaaagcacgcgcacctgtatcgaaagctgatcacaaatattcttggaggctgcattcagatggtgcttggccagatcgaagaccaccggcgcacacatcagccaatcaacatcccgttcttcgacgtgtttctgagatatctgtgtcagggcagcagtgttgaagtaaaggaagataagtgctgggagaaggtcgaagtctcatctaacccccatcgcgcatccaaactcacagatcacaatcctaaaacatattgggagagtaacggtagtgcaggaagccattacatcactctgcacatgaggaggggtatcctgatccgtcagctgacattattggtggccagtgaggattcttcatatatgccagcccgcgttgtcgtgtgcggaggtgattcgaccagtagcctgcacaccgaactcaacagcgtgaacgtaatgccatctgcttcgcgggttattctgttggagaatctgaccagattctggcctattatccagatccggattaaacgctgtcagcaaggagggattgatactcgcatacgagggctggaaattttaggcccaaaacctaccttctggccggtgtttagagaacagctgtgtagacacacacggcttttttacatggtaagagcccaggcgtggagtcaagacatggctgaggatcgacgctctctcctacacctctcgtctaggctgaatggggccctgagacaggaacagaatttcgcagaccggtttctaccagacgatgaagccgcacaggctctgggcaagacctgttgggaagccctcgtcagccctgtggttcaaaacattacatcccccgacgaagacggcatatcccctctgggctggttgttagatcagtacctggagtgtcaggaagcagtgtttaacccacaatcccgcggtccagcttttttttcaagggtgagaagacttacccacttattggtgcatgtcgaaccctgtgaagcccctccccccgtcgtagcgacccccagaccaaagggaaggaaccggagtcacgattggtcatctttagctacacgagggctgccttcctccattatgcgtaatctgacgaggtgctggcgcgccgttgtggaaaagcaagttaacaactttctcacttcctcctggcgggatgacgattttgtacctcgatattgtgaacacttcaatatcttacagaacagctccagcgagttgtttggcccccgcgcggccttcctgctagctctgcagaatggctgtgccggagctctgttgaagttgccttttctgaaagctgcccatgtatccgagcagttcgcgaggcatattgaccagcagatccaaggaagccggatcggtggtgcccaagaaatggagagacttgcacagttacagcagtgcctgcaggcagtcctcatcttcagtggtctggaaatcgccactacatttgagcattactatcagcactatatggccgatcggctgctcggggtggtaagcagttggctggaaggggcagtcttggagcagattgggccctgctttcccaaccgcctgccccagcagatgctacagagtctgtctactagcaaagagctgcagagacaatttcatgtgtaccagttacagcagctagatcaggaactgctgaagttagaggatacagagaagaagattcaagtgggcctgggcgcgagcggcaaggagcataaatccgagaaagaagaagaagctggagctgccgctgtcgtggatgtggccgagggagaagaagaggaggaggagaatgaggatctttactatgagggggccatgcctgaagtgtccgtgctggtgctgagtcgccattcgtggccggtggccagtatttgtcatacactgaatccacggacgtgcctcccatcctatttacgtggcacgctgaaccgctactccaacttttataataagtcccagtcacatccagcacttgagcgaggcagtcagcggcgcttgcagtggacctggctcggatgggcggagttgcagtttggaaaccagacacttcacgtgagcaccgtacagatgtggcttcttctttaccttaatgacctgaaggcggtgagcgtggaatctctgctggctttttccggtctgtccgctgatatgttgaaccaggccattggcccactgacttccagccggggaccactcgacctgcatgagcagaaagatattcccggcggcgttctgaaaataagagacggttctaaggagcccaggtcacgatgggacatcgttaggctcatccctcctcagacatatctccaagcagagggagaagacgggcagaacctcgagaagagacggaatctattgaactgcctcatcgtccgcatcctgaaggcgcacggcgatgagggcctccacatcgatcagctcgtatgcttggtactggaggcctggcaaaagggcccgtgtccacctcgtggtctcgtcagcagtcttgggaaggggtctgcttgctcttctaccgatgtcctgagctgtattctgcacctgctcggaaagggaactctacggagacacgatgatcggccccaagtcctgtcttacgccgttcctgtgactgttatggaaccccatactgagagcctcaatcccgggtcctcgggtccaaacccccctctgacattccatactctgcagattagatctaggggggtgccatacgcctcatgtaccgctactcagagcttttccacatttaggtag

SEQ ID NO: 184155 - DNA, 5349 bp, synthetic construct
  misc_feature 1..5349: note = Description of Artificial Sequence: Synthetic coding sequence
  source 1..5349: mol_type = other DNA
atgagccggggcttctggctggccgagcccctggccggcaccggcccccacccagccccagtggcggccgacagccgtggttgttcatcagtaccccgtcgacatgccccatctagactgtcagtttctacgccatctagagggcccggggcgaggatggtcggagagctgcgttacagggagttccgcgtgcccctgggacccggtctacatgcctacccagatgagctcatccgacaacgtgtgggacacgatgggcaccccgagtatcagattagatggctaatcttgcgtcggggggacgaaggggatgggggctctggtcaggttgattgtaaggctgaacacatcctgctctggatgtccaaagacgagatttatgcaaactgccataaaatgctgggcgaggacggacaggtcattggcccctctcaagagtctgctggagaggtgggggcgcttgacaagtctgtgctggaagaaatggagacagacgtgaaatctctgattcagcgagccctaaggcagctggaggagtgcgtgggaacaatccctccagccccattattgcacaccgtgcacgtgcttagcgcttatgcctccattgaaccactcactggagtcttcaaagacccacgtgtgctggacctgctgatgcatatgctgagcagtccggactatcagattaggtggagcgcaggtaggatgattcaggccctatcttcacatgacgctggagaagggcaatgtggtgaagaggggaaagctggcgaaggactcggcagactgagagacagccaggacaccgttgctggtgcatctgatttgatcagaaccaggacccagatcctgttgtcccttagccaacaggaggccatcgaaaaacacttagactttgactctcgctgcgccctgctggccctgttcgcgcaggcaaccttaagtgagcaccccatgtcattcgaagggatccagttgcctcaggtgcccggccgtgtactgttcagcttggtaaagcgttaccttcacgtaaccagcctgttggaccagctcaatgactctgccgccgagcccggagctcagaacacttctgcgccagaagagctgagcggagaacggggccagctggaactggaattctctatggccatgggtacactcatatccgagttggtgcaggccatgagatgggaccaggcctccgatagaccccgtagcagtgcccgatccccagggtccatttttcagccacagctcgccgacgtgtcaccgggcttgcctgccgcccaggcccagccttcttttagacgaagccgccgcttcagacctcggtcagagtttgctagcggtaacacttatgccctctacgttcgtgataccctccaacccggaatgagagtccgcatgctggacgattatgaggaaattagcgcaggtgacgaaggagagttcagacaatcaaacaatggggtgccacccgtgcaggtgttttgggaatcaacaggacgaacatactgggtacactggcacatgttggagatcttaggttttgaggaggatatcgaagacatggtcgaagccgacgaataccagggtgcggtagcctcgcgagttcttggaagagccttgcccgcatggaggtggcggccaatgacagagctgtacgccgtgccttatgtacttcctgaggacgaggatacagaggaatgcgaacatttaacactggccgagtggtgggaacttcttttttttataaagaaactggacggccccgaccaccaggaggtcctccagatcctccaggagaacttggacggcgagatcttagacgacgaaatcttagcggaattggcagtgcccatcgaactcgctcaggatctgctcctgacacttccacagcgcctgaacgactcagcactgagagacctcatcaactgtcacgtgtacaagaaatatggacctgaggcactcgctgggaaccaggcttatccaagcctcctggaggcccaagaagacgtgctcctgctagacgctcaagcgcaggccaaggattcagaagacgcggcaaaggtggaggctaaagagcccccatcccagtctccaaacacccctctgcagcgcttggtggagggatacgggccagccggaaagatcctgttagacctggaacaagccctctcttctgaggggacacaggagaacaaagtgaagccactgctgctccaactacagaggcagcctcagccattcctagctctcatgcagagcctggacaccccggaaacaaatcgcactctccacttgaccgttctgaggatcctcaaacagctggtggactttccggaagccctccttctgccttggcacgaggcagtcgacgcctgcatggcatgtttaagaagccccaacacagacagagaagtgctgcaagaacttattttcttcctgcatcgccttactagtgtatcccgggattacgctgtggtgctaaatcaattgggggcaagagacgcaatctccaaagctctcgagaaacacctgggcaaactagagctggcccaggaactgcgggatatggtgtttaagtgtgagaaacatgcgcatctttatcgcaaactcattaccaacatacttggggggtgcattcagatggttctcggtcagatcgaggaccataggcgcacacaccaacccattaatatccccttcttcgatgtgtttctgagatatctttgtcagggaagctcggtggaggtcaaggaggacaagtgctgggagaaggttgaggtgtcctccaatccccatcgggctagcaagctgactgaccacaaccctaagacatactgggagtcaaatggaagcgccgggtcccattatatcactttgcacatgagacggggcatactcatcaggcaacttacactcctggtagctagcgaggactcatcctatatgccggctagggtggtagtttgtggtggagactccacgtctagcctgcatactgaactcaactctgtcaacgttatgccctctgcctctagggtgatactcctcgagaatttgacacggttttggcccattatacagattcgtatcaaacggtgccagcaagggggtatagacactcgcattcgggggctggagatcctgggcccaaaacctacattttggcctgtttttagggaacagttatgtaggcatactcgcctcttctacatggtgagggctcaggcgtggtcacaggacatggctgaggatagacggtcactccttcatctctccagtaggcttaatggcgccttgagacaggagcaaaacttcgcggaccggttccttcccgacgacgaagccgcccaggcactggggaagacctgctgggaggctttggtctctcctgtcgtgcagaatatcaccagtccagacgaggacggaatttcacccttaggatggctgcttgatcaatatctggaatgtcaagaagccgtgtttaacccacagtccaggggccctgccttcttctcacgtgtgcgaaggttaacgcatttgctggtgcatgtggagccctgcgaagctccccccccagtcgtggcaactcctaggccgaagggtcgcaacaggtcccacgactggtcgtctctggcaacacgcggcttacccagctcgattatgcgcaatctcactcgttgctggagagccgtggtggagaagcaagttaataattttctcacgtctagttggcgggacgacgattttgttccgagatattgcgagcattttaatattctgcagaattcatctagcgagttgttcggtccaagagcggcttttttgctggctctccagaatggctgcgctggagcactgctgaagttaccatttcttaaagcggcccacgtgtctgaacaattcgcgcggcatatcgatcagcagatccaaggttcgagaatcggaggagcccaggaaatggaacgactggcacagctgcagcagtgcctccaggctgtcctcattttttccgggctggagattgccacaacatttgagcattactaccagcattacatggcagaccgcctgctcggtgttgtgagctcgtggttagagggcgccgtgctcgaacagattgggccgtgcttcccaaaccgcctccctcagcagatgttacagagcttatccacgtcgaaagagctgcagcggcagtttcatgtgtaccagctgcagcagctggaccaggaattactgaaactggaagataccgaaaagaaaattcaggtaggcctaggcgcatcaggcaaggagcacaagtccgaaaaggaagaggaggccggagccgcagcagtagtggatgtggccgagggggaggaggaagaagaggaaaacgaagatctgtattatgaaggcgccatgcccgaagtttccgtactggtactgtcgagacattcctggcccgtggctagcatttgccacacgctcaaccctcggacatgtttacccagttatttgaggggtacccttaaccgttactctaacttctacaacaagtctcaatcccacccggcactcgagaggggaagtcagcgccgtctgcaatggacctggttgggctgggctgagcttcagttcggaaaccaaactcttcacgtgtctacggtacagatgtggcttctcttatacctgaacgatcttaaggcagtctccgtcgaaagtttactcgcattctctggcctctctgccgatatgttaaatcaggcaattggtcctctgacttctagcaggggtccactggatctgcacgagcagaaagatattcctggaggcgtgctcaaaatcagggacggcagtaaagagccccgctcccgctgggacatagtaaggctgatcccgccgcagacatacttacaagcggaaggagaggacgggcagaacttggagaaaaggcgcaacctgctgaattgcttgatcgtcaggattctcaaggcccatggggatgaaggcctgcacatcgaccagctggtttgcctcgtcctggaagcctggcagaagggaccttgtcctcccaggggccttgtttccagcctggggaaagggagcgcctgctcatctaccgacgtgctgtcatgcatcctgcatttattgggaaaaggcaccctgagacgtcacgatgaccggccccaggttttgtcatatgcagttcccgtgaccgtgatggaaccgcatacagagtccctaaatcccggatcctccgggccgaatccccctctcacctttcacacattgcaaattcggagccgaggcgtgccctacgctagctgcactgcaacccagtcattttctacttttaggtag

SEQ ID NO: 184156 - DNA, 435 bp, synthetic construct
  misc_feature 1..435: note = Description of Artificial Sequence: Synthetic coding sequence
  source 1..435: mol_type = other DNA
atgggcgtgctgcaggtggtgaagcagagcgtgcagatccccgtgttcgtaatgatcagacctcggggcggggatttcctgtatagtgatcgagagatcgaagtgatgaaagcggacataagactggcaaaactttacggggccgacggtctggttttcggcgcgctcacagaggatgggcacatagataaggagctctgcatgagtctgatggccatctgcagaccactccccgtcacgttccaccgcgcctttgacatggtgcacgaccccatggctgccttggaaaccctgctgacactgggcttcgagcgggtccttacgtccggctgtgacagctcagcactcgaaggtctgcctctgattaaacgactaatcgagcaggccaagggtcgtatcgtcgtaatgcctggcggagggataaccgatcgatag

SEQ ID NO: 184157 - DNA, 822 bp, synthetic construct
  misc_feature 1..822: note = Description of Artificial Sequence: Synthetic coding sequence
  source 1..822: mol_type = other DNA
atgaagcggcagggcgccagcagcgagcggaagcgggcccggatcccaagcggcaaagctggagctgccaatggcttcctgatggaggtttgtgtggactctgtggagagcgcggtgaacgccgagagaggcggcgcagatcgcattgagttgtgctcgggcctctcagagggaggaaccactccatccatgggagtcctgcaggtcgtcaagcaatcagtccagattccagtctttgtgatgatccggccgaggggtggcgatttcttatattccgatcgggagatcgaggtcatgaaggccgacatccgcctggctaagctgtatggcgccgatgggcttgttttcggcgccctgactgaggatggccacattgacaaagagctttgtatgtccctgatggctatctgtcggcccctccctgtcacattccaccgagcctttgatatggtgcacgatcctatggctgcactcgaaacactgctgacactgggctttgaacgcgtactcacttctggctgtgattcctctgctctggaggggctaccattgattaagagattgatcgagcaagcaaaagggaggattgtagtgatgccgggaggaggcatcactgaccgcaacctgcagagaatcttggaaggaagcggagctactgagttccactgcagcgcccgctcaacacgagacagcggtatgaagttccggaattcttccgtcgctatgggcgcttccctgtcatgttctgagtacagcttgaaggtgaccgacgtgacaaaggtgcggactcttaatgcaatagcgaagaacatcctagtatag

SEQ ID NO: 184158 - DNA, 1122 bp, synthetic construct
  misc_feature 1..1122: note = Description of Artificial Sequence: Synthetic coding sequence
  source 1..1122: mol_type = other DNA
atgagcctgctgctgctgctgctgctggtgagctactacgtgggcactcttggaacccataccgagataaaaagggtcgcagaggagaaagttacacttccttgtcaccaccaactcggactaccagaaaaggatacgctcgacatcgagtggcttctgacggacaacgaagggaatcagaaagtcgttattacatatagttctcggcacgtgtacaacaacctgacggaagagcagaaaggtcgcgtcgcattcgccagcaattttctggccggcgatgcgagcctgcaaattgaaccactcaaaccaagcgatgagggcaggtacacatgtaaagtgaagaactcagggagatatgtctggtcacatgtgatcctgaaagtcctcgtgcgtccttccaaaccaaagtgtgagctcgaaggcgagctgaccgaaggctccgacttaacactacagtgtgagtcctcttctggcactgagcctattgtgtactactggcagagaattcgtgagaaggagggtgaggatgaacggcttcctccgaagtccaggatcgattataaccatccagggagggtgctgctccagaatctgacaatgagttactccgggctgtaccaatgcactgctggcaacgaagcaggaaaagaatcttgcgtggtccgtgtcactgttcagtacgtgcagagcattggcatggtggcgggcgcagtaaccggcatcgtagccggagccctgctgattttcctgctcgtatggctgctgatcagacgaaaggataaagaacgttacgaggaggaagagagacctaatgagatccgggaagacgctgaagcgccaaaggcacgcctcgtgaagccgtctagcagtagcagcgggagtagatcatcccgcagtgggagctcctccactagatcaacagccaactccgcaagccggagtcagcgaaccctgtcgaccgacgcagctccacagcctgggctggcaacacaggcgtactccctcgtgggccctgaggtgaggggaagcgagcctaagaaggtgcatcatgccaatctaactaaagcggaaaccactccttctatgatccctagccagagtagggcctttcagacagtgtag

SEQ ID NO: 184159 - DNA, 597 bp, synthetic construct
  misc_feature 1..597: note = Description of Artificial Sequence: Synthetic coding sequence
  source 1..597: mol_type = other DNA
atgcaccaccggaacgacagccagcggctgggcaaggccggctgccctccagagccatcactgcagatggccaatactaatttcctgtcaaccctgagtcccgagcattgccggcccctagcaggcgagtgtatgaacaaactcaaatgcggggcagcagaagcagagattatgaaccttcctgaaagagtgggcactttcagtgccatccccgctctcggtggtatttcacttccccctggagtcatcgtgatgacagctctccactctcctgccgctgcctctgccgctgtcacagatagcgcatttcagatcgcgaatctggcggattgccctcaaaatcacagcagtagttcatcctctagctcaggcggagctggaggagccaaccctgccaagaagaaacgtaaacgatgcggcgtctgcgtcccttgcaaaaggttgatcaattgtggggtttgttcttcgtgtcgcaatcggaagaccggacaccagatttgtaagttccgaaaatgcgaagagctgaaaaagaagcctggtaccagtctggagcggacgcccgtcccatcagccgaggcatttcggtggttcttctag

SEQ ID NO: 184160 - DNA, 597 bp, synthetic construct
  misc_feature 1..597: note = Description of Artificial Sequence: Synthetic coding sequence
  source 1..597: mol_type = other DNA
atgcaccaccggaacgacagccagcggctgggcaaggccggctgccctccagaaccctccctccagatggcaaatactaattttctgtccacgctatcaccagagcactgcaggccgctggcgggggagtgtatgaacaagctgaaatgcggggctgccgaggccgaaatcatgaacctgccagaaagggtggggacctttagtgcaattcccgctctgggcggaatttctctcccaccaggagtcatcgtaatgaccgcccttcacagcccggcagcagctagcgccgctgtaacagactcagccttccagattgctaatctcgccgattgtcctcagaaccattctagtagcagttcttcatcctctgggggagctggtggcgcaaatcccgctaagaagaaacggaagagatgtggagtctgcgtcccctgcaagagacttatcaattgcggagtgtgctccagttgccggaataggaaaacagggcaccagatctgcaaatttagaaagtgtgaagagctcaagaaaaagcccggcacaagtctcgaacgcacacccgtgccgagcgccgaggctttcagatggtttttctag

SEQ ID NO: 184161 - DNA, 969 bp, synthetic construct
  misc_feature 1..969: note = Description of Artificial Sequence: Synthetic coding sequence
  source 1..969: mol_type = other DNA
atgagcagcctgggcggcggcagccaggacgccggcggcagcagctccagcagcactaatggaagcggaggatctggaagcagcggacccaaggctggcgccgccgacaagtctgccgtggttgccgcggcggcaccggcctctgtggctgacgacacaccgcccccagaaaggagaaataagtctggcatcatcagcgagcccctgaacaagtcgctcagaaggtcccgcccgctcagccattattcatcattcggttctagcggcgggtctggaggcggtagcatgatgggcggtgagtctgcagataaagcgacagctgccgccgccgcagcctctctgctggccaatggacatgacctcgccgccgcgatggccgtggataaaagcaaccccaccagtaaacacaaaagtggcgccgtggctagtttactctctaaggccgagagagccaccgagttagccgccgaaggtcagctgacgcttcaacagtttgctcagagcactgagatgctgaaacgagtcgtgcaagaacacctgccactgatgagcgaggcaggtgcaggtcttccagacatggaagctgtcgctggcgcagaggctctgaatggacagtccgattttccatacttaggcgcctttcccatcaatcctggcctgtttataatgaccccggcgggagtcttcttagcagagagcgctttacacatggctggcctcgctgaatatccgatgcagggggagctggcatcggccatttctagtgggaagaagaaacgcaaaaggtgtggcatgtgcgcaccctgtagaaggcgtataaattgtgaacagtgttctagctgccgaaatcgtaagacggggcaccaaatctgtaagttcagaaaatgcgaggaactgaagaagaagcccagcgccgcactggaaaaggtgatgttgcctacgggcgccgcattcagatggtttcagtag

SEQ ID NO: 184162 - DNA, 210 bp, synthetic construct
  misc_feature 1..210: note = Description of Artificial Sequence: Synthetic coding sequence
  source 1..210: mol_type = other DNA
atgagcagcctgggcggcggcagccaggacgccggcggcagcagcagctcctccaccaacggttcgggaggatccgggtccagtggtccaaaagccggggcagcagacaaaagtgcggtggttgcagctgccgcccctgccagtgttgctgatgacacacccccccccgagagacgcaacaaaagcggcataatttccgaacctctctag

SEQ ID NO: 184163 - DNA, 243 bp, synthetic construct
  misc_feature 1..243: note = Description of Artificial Sequence: Synthetic coding sequence
  source 1..243: mol_type = other DNA
atgagcagcctgggcggcggcagccaggacgccggcggcagcagcagttcctcaaccaatggttcaggcggctctgggtcttctggtcccaaggctggcgctgcagacaaaagcgcagtggtggccgccgcagcccctgcttctgtggccgatgacacacccccacccgagcgccggaataaatcagggatcatctccgagcctctgaacaagagcttgcgtcgtagccgcccactgtcctag

SEQ ID NO: 184164 - DNA, 546 bp, synthetic construct
  misc_feature 1..546: note = Description of Artificial Sequence: Synthetic coding sequence
  source 1..546: mol_type = other DNA
atgagcagcctgggcggcggcagccaggacgccggcggcagcagctcttcaagcacaaatggttccggaggtagcggatcctcgggacctaaggctggtgccgcagacaagtccgcagtggtggccgccgccgcccctgcctccgttgcagatgatacaccaccgcctgaacggcgaaacaagtcaggaatcatcagcgagcccctcaacaaatccttgcggcggagcaggccacttagccattatagctcttttggttctagcggggggtcaggtgggggatctatgatgggcggcgagtccgctgacaaagccacagcagccgccgcggctgcttccctgctggcaaatggtcatgatcttgccgccgcaatggcggtggacaaaagcaatccgacctccaaacacaagagtggagccgtggcatcgctgttgagtaaggccgaaagggccactgaactcgcggcagaaggacagttaaccttacaacagtttgctcagagcactgagatgcttaaacgggttgtccaggaacatctgccgtag

SEQ ID NO: 184165 - DNA, 252 bp, synthetic construct
  misc_feature 1..252: note = Description of Artificial Sequence: Synthetic coding sequence
  source 1..252: mol_type = other DNA
atgagcagcctgggcggcggcagccaggacgccggcggcagcagctccagctccacaaacggatccggaggctccggcagctccgggccgaaggctggcgctgccgacaaatcagcagtcgtggcagcagcagcaccggcctccgtggctgacgacacacctcctcctgaaagacgcaataagtcagggataatctccgaaccattaaacaagtcactgcgtcgaagccgcccgctgtcccactatagttag

SEQ ID NO: 184166 - DNA, 486 bp, synthetic construct
  misc_feature 1..486: note = Description of Artificial Sequence: Synthetic coding sequence
  source 1..486: mol_type = other DNA
atgagcagcctgggcggcggcagccaggacgccggcggcagcagcagctcttctacaaacgggtccggtgggagcggcagtagcggacccaaagctggtgctgccgataagtctgcagtggtggccgcggctgctcccgcaagcgtcgcagatgatactcctccaccagagaggcgcaacaaatcgggaatcatttctgaaccactcaacaagtcactgagacggagtaggcctctgagtcactacagcagttttggctcgagcgggggaagcggtggaggaagcatgatggggggcgagtctgccgataaagcaacagcagctgcggctgcggccagtctgctggctaacggacacgatcttgccgccgctatggctgtggataagtccaaccccaccagcaagcataagtccggcgccgtcgcttctttactttccaaggccgaaagggccaccgaactggccgccgagggtcagctaacatag

SEQ ID NO: 184167 - DNA, 309 bp, synthetic construct
  misc_feature 1..309: note = Description of Artificial Sequence: Synthetic coding sequence
  source 1..309: mol_type = other DNA
atgagcagcctgggcggcggcagccaggacgccggcggcagcagctcaagcagcactaatggctccggcggaagcgggtctagtggacccaaagctggagcggcggacaagagtgcagtggttgctgcagccgcccctgcatcagtcgccgacgacactcctccaccagaacgacgcaacaaatcaggcatcatttccgagcctttaaataaaagcctgcgcaggagcaggcctctcagccactattcgagttttgggtcatcagggggtagtggaggtgggtctatgatgggtggggagtctgcatag

SEQ ID NO: 184168 - DNA, 36 bp, synthetic construct; identical to SEQ ID NO: 77974
  misc_feature 1..36: note = Description of Artificial Sequence: Synthetic coding sequence
  source 1..36: mol_type = other DNA

SEQ ID NO: 184169 - DNA, 297 bp, synthetic construct
  misc_feature 1..297: note = Description of Artificial Sequence: Synthetic coding sequence
  source 1..297: mol_type = other DNA
atgagcagcctgggcggcggcagccaggacgccggcggcagcagctcctccagtacaaacggtagtggcggttccgggagctccggcccaaaagccggcgccgcagataagagtgccgtcgttgcggccgcggcaccggcgtccgtcgccgacgatacgcccccaccggagcgtaggaataaatccgggattatttccgaaccactcaataagtctctccgtaggtccaggcccctgtcccactatagctcctttggttcaagtggaggttcaggcgggggctctatgatgggatag

SEQ ID NO: 184170 - DNA, 969 bp, synthetic construct
  misc_feature 1..969: note = Description of Artificial Sequence: Synthetic coding sequence
  source 1..969: mol_type = other DNA
atgagcagcctgggcggcggcagccaggacgccggcggcagcagctcctcttcgacgaacgggtccggcggaagcggatctagcggacctaaggccggagctgctgacaagtccgcagtcgtcgccgccgcagctccagcctctgtggcagacgatacacccccccccgagaggcgcaataagagtggcattatatctgagccccttaataaatccctgcggagaagtcggcccttgtcccactactcctcttttggatcctccggcggtagtggtggcggcagcatgatggggggcgaaagtgccgataaggcaactgccgcggccgctgctgccagcctcttggcaaacgggcacgatttggcggcagccatggctgttgacaaatcaaatccaactagcaaacacaagtccggtgctgtagcttccctcttaagcaaggctgagagagcgacagaactggctgcagagggacaacttaccttgcagcagttcgcccagtccaccgagatgcttaagagggtggtacaggaacaccttcctcttatgagtgaagcgggtgcaggattacccgacatggaagccgtggccggagctgaggccctgaacggtcaaagcgacttcccgtacctgggagcatttcctatcaacccgggactgtttatcatgaccccagccggcgtttttctagccgaatccgcgcttcatatggctgggcttgcggaataccccatgcagggggaactcgcctccgcgatatcttccggcaaaaagaaacgtaaacgttgtggaatgtgcgccccttgtcgccgacgcatcaactgtgagcagtgttcgtcttgtaggaatcggaaaactggacaccaaatctgcaaattccgtaaatgtgaggaattaaagaaaaagccgtcagccgcactggagaaggtcatgctcccgaccggtgcagcattccgatggtttcagtag

SEQ ID NO: 184171 - DNA, 594 bp, synthetic construct
  misc_feature 1..594: note = Description of Artificial Sequence: Synthetic coding sequence
  source 1..594: mol_type = other DNA
atgagcagcctgggcggcggcagccaggacgccggcggcagcagctcctcaagtaccaatgggtccggagggagcggctctagtggaccaaaggccggcgcagccgacaagtccgccgtggtggcagcagctgctcctgcatccgtcgcggacgatacgccgcccccagaacgtaggaacaaaagcggcataatttcagagccattaaacaagagcctccggcgatctcggccgcttagtcattatagctccttcggcagttcaggaggcagcggaggaggctccatgatggggggagaatctgctgacaaggcaaccgccgcggctgcagctgcttctctactcgccaacggacatgacctggcggctgccatggctgtggacaagtcaaatcctacaagtaaacacaagtccggagccgtcgcatccctcctgtctaaagcagaacgggcgactgagctcgccgcagaggggcaactcacacttcagcagttcgcacaatccacagaaatgctgaagcgcgtagtgcaggaacacttaccccttatgagcgaggcgggagcaggactgccagatatggaggcggttgcttag

SEQ ID NO: 184172 - DNA, 27 bp, synthetic construct
  misc_feature 1..27: note = Description of Artificial Sequence: Synthetic coding sequence
  source 1..27: mol_type = other DNA
atgagcagcctgggcggcggcagctag

SEQ ID NO: 184173 - DNA, 222 bp, synthetic construct
  misc_feature 1..222: note = Description of Artificial Sequence: Synthetic coding sequence
  source 1..222: mol_type = other DNA
atgagcagcctgggcggcggcagccaggacgccggcggcagcagcagctcatctaccaatgggagtgggggctccggatctagcgggccgaaagctggcgctgccgacaagtccgccgtggttgccgccgctgccccagccagtgtggccgacgacacccctccccccgagagaaggaataagtccgggatcattagcgagcctctaaataaaagcttatag

SEQ ID NO: 184174 - DNA, 414 bp, synthetic construct
  misc_feature 1..414: note = Description of Artificial Sequence: Synthetic coding sequence
  source 1..414: mol_type = other DNA
atgagcagcctgggcggcggcagccaggacgccggcggcagcagctcatcatcaaccaacggttcggggggatctggctcaagcggccccaaggccggggcggctgataaatccgctgtggtagccgccgccgcaccagctagcgtggctgatgatacccctcccccagagcgccgaaacaagagcggtatcatcagcgagccactgaataaatctctgagaagaagccgccccctgagtcactactcatcattcggatcttccggtggaagcggcggcggaagtatgatgggcggagaaagcgcggacaaggccaccgccgccgcggcagccgctagtctcttagcaaacggccacgatttggcagcggcgatggccgtcgataaatccaacccaaccagtaaacataaatag

SEQ ID NO: 184175 - DNA, 2073 bp, synthetic construct
  misc_feature 1..2073: note = Description of Artificial Sequence: Synthetic coding sequence
  source 1..2073: mol_type = other DNA
atgaagctgagcatgaagaacaacatcatcaacacccagcagagctttgttactatgccaaatgttatcgtgcccgacatcgagaaggagatccgacgcatggagaacggcgcctgttcctcgttttccgaagacgacgacagcgctagcacaagcgaagaaagtgagaacgaaaacccccacgccaggggctctttcagctacaagagcttgcggaagggggggccttcacaacgcgagcaatacctgccaggggccatcgcactgttcaacgtaaacaattcttccaacaaggaccaggaacctgaggagaaaaaaaaaaaaaaaaaagaaaaaaaaagcaagagcgacgacaagaatgaaaataagaacgaccccgaaaagaaaaagaagaaaaaggataaagagaagaaaaagaaggaagagaaaagcaaggacaagaaagaggaggagaaaaaggaagtcgtcgtaatcgacccatcgggcaatacctactacaattggctgttttgcatcaccctacctgttatgtataactggactatggtgattgccagggcctgttttgacgagttacagagcgattaccttgaatactggctaatcctggattatgtgtctgatatcgtatatctgattgacatgttcgttcgcaccagaacgggttatctggaacaaggactcctagtcaaggaggaactaaagctcatcaacaagtataaatctaacctgcagttcaagcttgatgtcctgtcactaatccccactgaccttctgtatttcaagctcgggtggaactacccggagatacggttgaaccgattgctacgtttctctagaatgttcgaattcttccagcggactgagacccgtactaactaccctaatatttttagaatcagcaaccttgtaatgtacattgtgattatcattcactggaacgcttgcgtgttttacagcattagcaaagccattgggttcggtaatgatacgtgggtgtatcccgatatcaacgatccagaatttgggcgcctggcccgtaagtatgtgtattccctgtactggtcaacgttgaccctgactacaataggggaaactccgcccccagtaagagactcagagtacgtgtttgtagtcgtcgacttcctgattggggtgttaatttttgcaacaatcgtgggcaacattggaagcatgatctcaaacatgaatgccgctcgcgcagaatttcaagcccgaattgacgccatcaagcaatatatgcattttcgcaatgtgagcaaggacatggaaaaacgcgtgatcaagtggtttgactatctctggactaataaaaaaactgttgatgaaaaggaagtgctgaagtatctaccagataagttgcgggcagagatcgccataaacgtgcatctggacacgctcaagaaagtgcgcatctttgcagattgcgaggccggcttgttggtagagctggtcctgaagctgcagcctcaagtgtatagccctggcgattacatctgtaagaaaggagacataggacgcgagatgtatatcatcaaggaaggtaagttggccgtggttgccgacgatggggtgacacagttcgtggtcctttctgatggcagctacttcggtgaaataagcatacttaatatcaaaggttcaaaagccgggaatcgcagaaccgctaacatcaagagcatcggctactccgatttgttttgtctgtccaaagatgaccttatggaggctttaacggagtacccagatgccaagaccatgctggaggagaaggggaaacaaatactcatgaaggatggtttactggacctcaacattgccaacgcaggcagtgatcctaaggatcttgaggaaaaagtgacccgcatggaaggatctgtcgatctgctccagactcgcttcgcacgcatcctggcggaatatgaatcaatgcagcagaaactgaaacagagactgactaaggtagagaaatttcttaagccactcatcgacacagagttcagctccatcgagggacctggagccgagtccggccccattgattccacctag

SEQ ID NO: 184176 - DNA, 2280 bp, synthetic construct
  misc_feature 1..2280: note = Description of Artificial Sequence: Synthetic coding sequence
  source 1..2280: mol_type = other DNA
atggagagccggagcagcccccggctggagtgcagcggcgccatctctgcccactgctctcttcacttgcccgattcctctgacttccagctcatttttgtgtttctggttgagatggggttccatcacgtggggcaggctggattagagttgctgatcagttccgacctgcctacatctgcttcccaaagcgccggcatcaccgacatgaaactgtccatgaaaaataacattattaacacccagcaaagcttcgtgaccatgccaaatgtgatcgtgcccgacatagagaaagaaattcggaggatggagaatggagcctgttcttctttctcggaggacgatgatagcgcctccacctccgaggagtcagagaatgagaatccacacgcccgtggatcattcagttacaaatccctgcgaaagggtgggccttcccagcgggaacagtatcttcccggagcaatagccctttttaatgtgaacaactccagcaataaggatcaagagcctgaagagaagaaaaagaaaaagaaggagaaaaaaagcaagtctgatgataagaacgagaacaaaaacgatcctgagaagaaaaagaaaaagaaggataaagagaaaaagaaaaaagaagagaagagcaaagacaaaaaagaggaagaaaagaaagaagtcgttgtgattgacccaagcggtaacacatattacaattggcttttctgtataaccttgccagtgatgtacaattggacaatggtgattgccagggcttgtttcgatgagctccaaagcgattatctggaatactggttgatcttggactatgtctccgatatcgtgtacctgattgatatgtttgtcaggacgcggaccgggtacctggagcaggggctactcgtgaaggaagagttaaagctgataaataagtacaagtctaatctgcaatttaagctggatgtgctgtcactgattcctactgacctgctctatttcaagctcggatggaactaccctgaaattaggttaaatcgtttactgaggttttctaggatgtttgaattcttccagcggaccgaaacgcgaacaaactaccccaacatattccgcatcagcaacctggttatgtacatcgtgatcattattcactggaacgcctgcgtattctactccatttctaaggccattgggtttgggaacgatacatgggtgtaccccgacataaatgaccctgaatttggacgcctagctaggaagtatgtctactcactgtactggtctaccttgacacttacaacaataggagaaaccccaccacccgtccgtgacagcgagtacgtgttcgtggtcgtggatttcctgataggggtgcttattttcgccactatagtaggtaacatcggatctatgatttcaaatatgaatgccgcaagggcagagttccaggctcgaattgatgccatcaagcagtacatgcactttaggaacgtgtcaaaagatatggaaaagcgagtgataaaatggttcgattatctctggacaaataagaagaccgttgatgaaaaagaagtgttgaagtatcttcctgataagcttcgggctgagatcgccatcaatgttcacctggacactctgaagaaggtcagaatttttgccgactgcgaggcaggactcctcgtggagttagtactgaagctgcagccacaagtgtactcacctggtgactacatttgcaaaaagggggacattggaagagagatgtacattataaaggaaggtaaactcgctgtagtggccgatgacggtgtaactcagttcgttgtgcttagtgacggctcatattttggagaaatcagcatcctaaacatcaagggcagcaaagctggcaaccggcgcactgcaaatattaaatccattgggtattccgatttgttttgcctaagcaaggatgatctcatggaagccttaactgaatatcctgacgctaagacaatgctggaggaaaaaggcaagcagatcctcatgaaggacgggctattagatctgaatatcgcaaacgcgggtagtgatccaaaagacctcgaggaaaaagtaacccgtatggaaggcagcgtggatctcctacagaccaggtttgcgcgaattctcgccgaatacgaatccatgcagcagaagttaaaacaacgtctgacgaaggttgaaaagtttctcaaacccttaatcgataccgagttttccagtatagaagggccaggtgctgaatccggcccaatcgattcaacctag

SEQ ID NO: 184177 - DNA, 2073 bp, synthetic construct
  misc_feature 1..2073: note = Description of Artificial Sequence: Synthetic coding sequence
  source 1..2073: mol_type = other DNA
atgaagctgagcatgaagaacaacatcatcaacacccagcagagcttcgtgacaatgccgaacgtgatagttcccgacatcgagaaggagattcgccgaatggaaaacggggcttgcagctcattctccgaagacgacgattccgcttcaacaagtgaagagagtgaaaatgaaaacccccatgccaggggatcatttagctataagtcactgagaaagggagggccaagccagagggagcagtacctgccaggggcgatcgcccttttcaacgtcaataatagtagcaataaggatcaagaaccggaagaaaaaaagaaaaagaagaaggagaagaagtctaaatcggacgataaaaatgaaaataagaacgaccccgagaaaaagaaaaagaaaaaggacaaggaaaagaaaaaaaaggaagaaaagtcaaaggacaagaaggaagaggaaaaaaaggaagtcgtggtgatagacccatcgggcaacacctactacaattggttattctgcataaccctgcccgtcatgtacaactggacaatggtcatcgcaagagcatgtttcgatgaactgcagtccgattatctggagtactggctcatcctagattacgtctccgatatcgtttatctgattgacatgttcgtgcggaccagaacaggctacctggaacaaggcttgctcgttaaagaggagcttaaattgatcaataaatataaatccaacctgcagtttaaactcgacgtcttaagccttatcccaacggacctgctgtacttcaaactgggctggaattacccagaaattcgtctgaatcggctcctacggttcagtagaatgttcgagtttttccaacggacggagacccgcactaattatcctaacatcttcagaatttccaatctggtgatgtatatcgtcattatcatacactggaacgcctgcgtgttctattctatttccaaggcgatcggcttcggcaatgacacctgggtttacccagacattaatgaccctgagtttggccggcttgctagaaagtacgtatactccttgtattggagcactcttaccctgacgaccattggagagaccccccctcccgtcagggattccgagtacgtttttgtcgttgtcgacttcctcatcggagttctgatcttcgctacaattgttggaaacatcggatccatgatctccaatatgaacgccgcgcgagccgaatttcaggcccgcatcgatgccatcaaacaatatatgcattttagaaatgttagtaaggatatggagaagcgggtcatcaagtggttcgactatctgtggactaataaaaagaccgtcgacgaaaaagaggtcctgaagtatctgcctgataaattacgggccgagatagcaatcaatgtacacctcgacacactgaaaaaagtccgcatctttgcagattgtgaagctggcctcctcgtggagctggttctgaaactgcagcctcaggtctactccccaggggactacatttgtaaaaagggggacattggacgcgagatgtatatcattaaagagggcaaactcgccgttgtcgcggacgacggcgtgactcagtttgtcgtcctgtcggacggcagctattttggagaaatttccattttaaatataaaagggtctaaggccggaaaccgcagaacggcgaatatcaaatctatcggatattctgatctgttctgcctgagtaaggatgacctcatggaagcactgaccgagtatcccgacgctaaaacgatgctcgaagagaagggtaaacagattctgatgaaggatggtctgttagacctgaacattgcgaatgccggttcagaccccaaggacttggaggaaaaagtgacacggatggaaggttctgtggatctcctgcagaccagattcgcccggatcttggccgagtacgaatccatgcagcagaagcttaagcaaagactgacgaaggtcgaaaagtttcttaaacctttaatcgatacagagttctccagtatcgaaggtccaggcgcagagtcaggccccatagactctacctag

SEQ ID NO: 184178 - DNA, 387 bp, synthetic construct
  misc_feature 1..387: note = Description of Artificial Sequence: Synthetic coding sequence
  source 1..387: mol_type = other DNA
atgaagctgagcatgaagaacaacatcatcaacacccagcagagctttgtaaccatgccaaacgtcatcgtgcccgacattgaaaaagaaattcggcgtatggaaaacggcgcctgctctagtttcagcgaggatgacgacagtgcctccaccagcgaggagagtgaaaatgagaatccgcatgcacgcggatctttttcatacaagagtctcagaaagggaggccccagccaacgagaacagtacctgccaggggctatcgcccttttcaatgtcaacaattcctcgaataaggaccaggaacctgaagagaagaagaaaaagaaaaaggagaagaagtctaagtctgatgacaagaacgagaataaaaacgatccagagaagtag

SEQ ID NO: 184179 - DNA, 300 bp, synthetic construct
  misc_feature 1..300: note = Description of Artificial Sequence: Synthetic coding sequence
  source 1..300: mol_type = other DNA
atgaagctgagcatgaagaacaacatcatcaacacccagcagagcttcgtcaccatgcccaacgtgatcgtgccggacattgaaaaagaaatccggaggatggaaaatggagcctgtagctctttctctgaggatgacgattcagcatctaccagcgaagaaagcgagaatgaaaaccctcacgcaagagggagtttttcttataagtcccttcgcaaggggggaccttcccagcgggaacagtatctacccggagctatcgccctttttaacgtgaataattcatcaaacaaggattag

SEQ ID NO: 184180 - DNA, 2073 bp, synthetic construct
  misc_feature 1..2073: note = Description of Artificial Sequence: Synthetic coding sequence
  source 1..2073: mol_type = other DNA
atgaagctgagcatgaagaacaacatcatcaacacccagcagagctttgttacaatgcccaatgtgatagtacctgacattgaaaaggaaatacgccggatggaaaacggcgcatgctcttcattcagtgaggatgacgactccgcctcgacctctgaggaaagcgagaacgagaatccccacgcccgcgggagtttctcatataagagtctgagaaagggggggccaagccagagagaacagtatttgcctggggcgatcgccctcttcaatgttaataattcttcgaataaggatcaggagcccgaagaaaagaaaaagaagaaaaaggaaaagaagtccaaaagcgatgataaaaatgaaaacaagaacgatccagaaaagaagaaaaaaaaaaaagataaggagaagaagaagaaggaggagaaaagtaaagacaagaaggaagaagaaaaaaaagaggtggttgttatcgatccctcaggcaacacctattataattggctgttctgtattacactccctgtcatgtataactggaccatggtaattgccagggcttgcttcgacgagctgcaatctgactacttagagtactggctgatcctggactacgtgtccgacatcgtctatctaattgacatgtttgtgcgtacgcggaccggatatcttgaacaaggcctgctagtgaaggaggagctcaaattgattaacaaatacaagtctaatttacaattcaagctggacgtactttcactgatccctaccgatctactctactttaaactgggatggaattaccccgagatacggctgaatcggctcttgcgattttccagaatgttcgagttcttccagcgcactgagaccaggacaaactacccgaacatcttcaggatatccaatcttgtaatgtacattgtgatcatcatacactggaacgcctgtgtgttttactccatcagtaaagccattgggtttggaaatgacacttgggtgtaccccgacataaacgatccagagttcggcaggctggcccgaaagtacgtgtacagcctgtactggtccacactgacccttacaacgatcggcgagaccccccctccggttcgggacagcgagtacgttttcgtggtggtggactttctcatcggcgtcttgatttttgcaacgatcgttgggaatatcggatccatgatctccaatatgaacgccgctagagcagaatttcaggctcgcatcgatgccatcaagcagtatatgcatttcaggaatgtgagcaaagatatggaaaaaagggtgataaaatggtttgattatctttggacaaataaaaaaacagtggatgagaaggaggtactgaagtacctgcctgacaaattgagggcggaaatcgctatcaacgtacatctggacaccctcaaaaaagtgagaatcttcgccgattgcgaggctggactgctcgtcgagctggtgctcaagttacagccacaagtttacagcccaggggactatatctgcaaaaagggagatatcgggagagagatgtacatcataaaagagggaaaactcgccgttgtggctgatgacggggtgacgcagtttgtggtgctgtctgatggcagttactttggcgagatctctatcctgaatatcaaggggtccaaggccggcaacagacgtactgctaatatcaaaagcattggttatagtgacctcttttgtctttctaaggacgacctgatggaggccctgacggaatacccagatgccaagacgatgttggaggaaaagggcaagcagatactaatgaaggacggacttctcgatttaaacatcgccaatgcaggcagcgatccaaaggacctcgaagagaaggtgaccaggatggagggatcggttgatcttctacagacacggttcgcgcgaatcctggcggaatacgaatccatgcagcaaaaactgaagcagcgccttacaaaggtcgagaaatttttgaagcctcttatagatactgagttttccagcatcgaaggacctggcgccgaaagcggccccatcgattccacatag

SEQ ID NO: 184181 - DNA, 300 bp, synthetic construct
  misc_feature 1..300: note = Description of Artificial Sequence: Synthetic coding sequence
  source 1..300: mol_type = other DNA
atgaagctgagcatgaagaacaacatcatcaacacccagcagagctttgtgacgatgcccaatgttattgtccccgacatcgaaaaggaaattagaaggatggagaatggggcttgcagctcgttctccgaggatgacgactctgcatctacatccgaggagtcagagaacgaaaatccacacgcacggggaagtttctcgtataagagtctacgaaagggaggtcccagccaacgcgagcaatatcttcccggggcaattgcactgttcaacgtcaataattctagcaataaggattag

SEQ ID NO: 184182 - DNA, 2073 bp, synthetic construct
  misc_feature 1..2073: note = Description of Artificial Sequence: Synthetic coding sequence
  source 1..2073: mol_type = other DNA
atgaagctgagcatgaagaacaacatcatcaacacccagcagagctttgtgacaatgccaaatgtgatcgtaccagacattgaaaaggagataagacggatggagaatggcgcttgcagtagctttagcgaagacgacgatagtgcttctacttccgaagaatctgaaaacgagaatccacacgcccgtggctcatttagctataaaagcctgcgcaaaggagggccatcccagagggaacagtatctccctggcgcaatagcactcttcaacgtgaataattctagcaataaggaccaggaacccgaagagaagaagaagaagaagaaggaaaaaaagtcaaaatcagatgataaaaatgagaacaagaatgacccagaaaaaaagaagaaaaagaaggacaaggagaagaagaaaaaggaggagaaaagtaaagacaaaaaggaggaggagaagaaagaggtcgtggtgattgaccccagcggcaatacttactacaactggcttttctgcataaccttgcctgtgatgtataactggaccatggttatagccagagcgtgttttgatgagttacagtcagactaccttgaatattggctgatcctcgattacgtgtccgacatcgtgtacctaattgacatgttcgtcagaacccggactggttacctagagcagggcctgctggtgaaagaagagctaaaactgattaataaatacaagagcaacttacagtttaagctagacgtgctgagcctgattcccaccgatctactgtacttcaagctgggctggaattaccccgagatcaggctcaacaggctcctccgattcagccggatgtttgagttttttcagcgcaccgaaactcgcacaaattatcccaatatcttccgaattagcaatttggtgatgtatatcgtgattattatccactggaatgcttgtgtgttttacagcatctccaaggccatagggttcgggaacgacacttgggtgtaccccgatataaacgaccccgagtttggcagactggctcggaaatatgtgtatagcttgtattggagcacgctcacactgacgacgattggggaaactccaccacctgtccgagatagcgagtacgtcttcgtcgtggttgattttctaataggtgtcctcatttttgcaactattgtcgggaatatcggatccatgatcagcaatatgaacgcggcccgtgcggagttccaggcacgcatcgatgcgatcaaacagtatatgcattttaggaacgtttcaaaggacatggagaagagggtgattaagtggttcgactacctgtggaccaacaagaaaactgtcgatgagaaggaagttctcaagtacttgccagataagcttcgtgcggagatcgcaattaacgtccaccttgacactctgaagaaagtgcggattttcgccgattgcgaggccggcctgctggtggaactcgtactgaaacttcaacctcaggtgtattctcccggcgattatatttgcaaaaagggggacatcggccgagaaatgtacattattaaggaaggaaagctagcggttgtggccgatgacggagtcacacagtttgttgtcttgtcagatggttcctattttggcgagatatcaatcctcaacatcaaaggtagcaaggccggaaaccgacgaacagctaacatcaagtcaatcgggtattcagatctattctgtctcagtaaggatgacctaatggaggcactgacagaatatcccgatgctaagacgatgctggaagagaagggcaagcagatccttatgaaggacggactgctggacctaaatatcgcgaacgccggcagcgaccctaaggacctcgaagagaaggtgacgagaatggaaggatcagtggatctgctgcagacgcggttcgccaggatactggcagagtacgagagcatgcaacaaaagctgaaacagcggctgacgaaagtggagaagttccttaagcccctcattgacacagaattctcttctattgaagggcctggcgctgaatctggccccattgactctacttag

SEQ ID NO: 184183 - DNA, 1995 bp, synthetic construct
  misc_feature 1..1995: note = Description of Artificial Sequence: Synthetic coding sequence
  source 1..1995: mol_type = other DNA
atgaccgagaagaccaacggcgtgaagagcagccccgccaacaaccataatcatcatgcaccccccgcgatcaaggcaaacgggaaagatgatcaccggacatcttcgagaccgcattccgctgctgatgatgacacatcttctgagttgcaaagacttgctgatgtagatgcgccccaacagggccgctcggggtttcgccggatagttcgcctagtgggcataattagagagtgggccaacaagaactttcgcgaggaggaaccccgccccgatagctttttagagaggtttagggggcccgaactacagactgtgacaacccaggagggggacggaaagggggacaaggacggggaggataagggaaccaaaaaaaaatttgaattatttgtactggatccggcgggggattggtactactgttggctgttcgtgatcgctatgcccgttctttacaattggtgcctgcttgttgcccgggcctgtttctccgacctgcagaaggggtactacctcgtgtggctggtcctagactacgtgagcgatgtggtgtacatcgccgacctcttcatccgcctccggaccggcttcttagagcagggattattagtgaaggatacaaaaaagttaagagataactatatacatactcttcagttcaaacttgatgttgcatctattattcctacggatctgatctatttcgccgttgacatccactcaccagaagttcggtttaatcgcctgctgcacttcgcgcggatgtttgaatttttcgaccgcactgagactaggaccaattaccccaatatattcagaatatcaaatttggtgctgtacattctggtgatcatacactggaacgcttgcatctattacgccatctctaagtcaatcggttttggtgtggacacctgggtgtatccaaacatcacagatcccgaatacggctacctagctagggagtatatatactgcctctattggagcactctgacactgacaaccattggggagactcccccccccgtgaaggatgaagagtacttatttgttatctttgattttctgataggcgtgctgattttcgccactatcgtgggcaacgtcggttcaatgattagcaacatgaatgcgaccagggcagaatttcaagccaagatcgacgccgtcaagcactacatgcagtttcggaaggtgtcgaaagggatggaggctaaggttatacgatggtttgattacttatggaccaataagaaaacagtcgatgaacgggaaatcttgaaaaacttgccggccaaactgcgcgccgaaattgctattaatgtacatctgtctacgcttaaaaaggtgaggatctttcatgactgcgaggcaggccttctcgtggaactggtactgaaactgagaccacaggtcttcagccctggcgactatatatgtcgcaagggggacatcggcaaggagatgtatattattaaagagggaaagctcgcagttgtggccgacgacggggtaactcagtacgcactcttatccgccgggtcttgttttggtgagatctccatcctgaacattaaaggatccaaaatggggaacagacgcactgccaatatcaggagcctgggctattctgatctgttttgtctttcaaaggacgacctgatggaggccgtaacagaatatccagatgctaagaaggtattagaggagcggggcagagagattctgatgaaagagggcctgctggacgagaatgaggtggccaccagcatggaggtggacgtgcaggagaaactagggcagttggaaactaacatggagacattgtatacaagatttggccgcttactcgctgaatataccggggcccagcagaaactgaaacagcggatcacagtgttggagacaaaaatgaaacagaacaatgaagacgattacttaagcgacggcatgaactctcctgaattggccgccgcagatgaaccatag

SEQ ID NO: 184184 - DNA, 2085 bp, synthetic construct
  misc_feature 1..2085: note = Description of Artificial Sequence: Synthetic coding sequence
  source 1..2085: mol_type = other DNA
atggccaagatcaacacccagtacagccaccccagccggacccacctcaaggttaaaacgtccgatcgggatctcaacagagcggaaaatggtctctcgagagctcactcttcatcagaggagaccagttctgtgctgcagcccggcatcgccatggaaacccgaggtttggcagacagtggtcagggtagctttactggccagggcatagccaggctgtcacgcctgatctttctgctgagaagatgggccgcacgccacgtacaccatcaagatcaggggcctgactccttccctgaccgcttccgcggcgcagaactcaaagaagtgagctcacaggaatccaacgcccaggcaaatgtggggtcacaggagcctgccgatagagggcggagtgcttggcctttggccaaatgcaacacgaacacatcaaacaacacagaagaagaaaaaaaaactaagaaaaaagatgcaatagtggtggatccatcaagtaacttgtactaccggtggttgacagccatcgctctgcctgtgttctacaactggtacttgctcatctgccgggcttgtttcgacgagttacagagtgaatacctcatgctatggctggtcctggattactctgcagatgtactgtacgtacttgatgtgttagtccgtgccagaactgggttcctggagcaggggcttatggtctctgacactaataggttgtggcagcattataaaacgactacccaatttaagctcgacgtactgtcccttgtgccaacagatctggcttatttaaaggtgggtacaaactatccggaagttcgcttcaataggctcttgaagttttcccgactatttgagttctttgaccggaccgaaacccgcactaactatcccaacatgttcagaatcggtaacctcgtactatacatcctgattattatccactggaacgcctgcatttactttgccatttctaaatttatagggttcggaacagacagttgggtttacccgaacattagcatccctgaacacggacggctgagcagaaagtacatctactccttgtattggtccactctgacattgactactattggcgagacccccccacctgtcaaggacgaagagtatctgtttgtggtggtagacttcctggtgggggtgctgatcttcgccaccattgtgggcaatgtagggagcatgatttctaacatgaacgccagccgcgccgaatttcaggcaaagattgattctatcaagcagtatatgcaatttcgaaaagtgaccaaggatctagaaaccagggtcatccgctggtttgactacctctgggcaaataaaaaaaccgtcgacgagaaggaggtgctgaaatccttgcccgataagctgaaagccgaaatcgccattaacgtgcacctggatacactgaagaaagtgcgtattttccaagactgtgaggcaggactattggttgagctcgtcttgaagctaaggcctaccgtgtttagtccaggagactatatctgtaagaaaggcgatatcggcaaggagatgtatatcattaacgagggcaagttggcagtagtggccgatgacggtgtgactcaattcgtggtgctatctgacggttcatattttggagaaatcagcatcctgaatatcaaaggctcaaagtctgggaaccgccgtactgcaaatatccgaagtatcggctattcagacctgttttgcttgtccaaagatgacctgatggaggctctgacagagtaccctgaggccaagaaggctcttgaggaaaagggtcgccagatccttatgaaggataacctgatcgacgaagaactggcaagggccggcgctgacccgaaggacttagaagagaaagtcgagcagttggggagtagcctggacactcttcagacccggtttgcaaggctccttgccgagtacaatgctacccagatgaagatgaagcaacgcctcagccagctggagagtcaggtgaagggtggtggcgacaaacccctggcggatggagaagtcccaggcgatgctacaaagacagaagataaacaacagtag

SEQ ID NO: 184185 - DNA, 2085 bp, synthetic construct
  misc_feature 1..2085: note = Description of Artificial Sequence: Synthetic coding sequence
  source 1..2085: mol_type = other DNA
atggccaagatcaacacccagtacagccaccccagccggacccacctgaaggtaaaaacttctgacagagacctgaacagggcggaaaatggactgagcagagcccactctagcagcgaggaaacctcctccgtgcttcaacccggaattgctatggagacccgcggcctcgcggactcaggacagggatcattcacagggcagggaattgcgaggctgtctcgtctgatattcctgttgcggcggtgggccgctcgccacgtccaccaccaggatcagggacccgatagttttcccgatcggttcaggggcgccgaattaaaggaggtctcctctcaagagtccaatgcccaggcaaacgttgggtcccaagaacccgctgaccgtgggcgatccgcttggcctctcgctaagtgcaataccaacacttctaacaacacagaggaggagaaaaagaccaaaaagaaggacgctatcgtggtcgacccgagctccaatttatactatagatggctcactgcaatagccttacctgttttttataattggtatcttctaatatgtcgcgcatgcttcgatgaactgcaatctgaatacctcatgttatggctggtcctggattattcagctgatgtgctttatgtcctcgacgtgctggtcagggctcggactgggttcctggaacaaggactgatggtgtcagacaccaatagactatggcaacattacaagacaacaacccagtttaagctggacgttttgagccttgttcccaccgatctagcatacttaaaagtggggacaaattaccctgaggtgcggtttaaccgcctgctgaaattctcaagattatttgaattctttgacaggaccgaaactagaaccaactatccaaacatgttccgaatcggaaatctggtgctgtacatcctgatcattatacattggaatgcttgtatatattttgccatctcgaagttcataggctttggcacagactcttgggtgtatccaaacatttcaattccagagcacggcaggttgtcgaggaaatacatttattcactgtactggtcaaccctcaccctgacaactatcggagagaccccacctcctgttaaggacgaggagtacttatttgtcgtcgtcgacttcctggttggcgtcttgattttcgcaactatcgtgggcaatgtggggtcgatgattagcaatatgaacgctagccgagcagagtttcaagcaaagatcgatagtataaaacagtatatgcagtttcggaaggtgacaaaggacctggaaaccagggttatccgatggtttgactacctatgggctaataaaaagaccgtcgacgagaaagaggtactaaaatctctaccagataaattaaaggccgagatagcgataaacgttcatctggacacccttaaaaaggtccggatctttcaagactgcgaagcaggcctgttagttgaactggtgctcaaacttaggcccacagtttttagccccggagactatatttgcaaaaagggagacatcggcaaggaaatgtatatcataaatgagggcaaactggctgtggtggcagacgatggagtgacgcaattcgtggtcctgagtgacggttcctattttggtgaaatatccattctaaacattaaagggtccaagtctggcaatcgtcgtacagccaacatacgcagtattgggtactccgatcttttttgcctaagcaaggatgacctgatggaagccctgactgaataccccgaggccaaaaaagctttagaggaaaaaggccgccaaatcctcatgaaggataatctgatagacgaggaactggcaagggcaggtgcagacccgaaggatctggaagaaaaagtggagcagctcggttcctcccttgacactctgcagacaagattcgcccgtttgcttgctgaatacaatgccacacagatgaagatgaaacagcgcctcagtcagctggaatcccaggtgaaagggggaggcgacaaacccctggccgatggtgaggtgccaggagacgcaacaaaaactgaggacaaacaacagtag

SEQ ID NO: 184186 - DNA, 2031 bp, synthetic construct
  misc_feature 1..2031: note = Description of Artificial Sequence: Synthetic coding sequence
  source 1..2031: mol_type = other DNA
atggccaagatcaacacccagtacagccaccccagccggacccacctgaaagtcaaaacaagcgacagggatctgaaccgggcagaaaatggcctgtcccgcgctcactcttcttccgaagaaacctcgtctgttttgcagcccggcatagccatggaaaccagaggccttgctgattcagggcagggatcctttaccggccagggcattgcaagactgtcccgactgattttcctgctgcgaaggtgggccgctagacacgtccaccaccaggatcagggccctgactccttccctgaccggtttcgcggagccgagctgaaagaggtctcatcccaggaatccaatgcacaagctaatgtcggatcgcaggagcctgccgatcgtggcagaagaaagaaaacgaaaaagaaagacgctattgtcgtggatccgagtagtaacctttactaccgctggttaactgcaattgctctgcccgtgttttacaattggtacctgctcatctgtagggcatgcttcgacgagcttcagagtgaatatctgatgctgtggctagtgcttgattactcggcggatgttctctatgtgctggacgtgctggtgcgggctaggacgggctttctcgaacagggcctgatggttagtgatacaaatagactctggcaacattacaagaccacaactcaattcaagctggatgttttgagcctggtgccaaccgacctcgcgtatttgaaagtaggaaccaattatcccgaggtccgctttaataggctgctaaaattttcccgcttgttcgaatttttcgatcgtacagagacgcggactaactaccccaatatgttcagaatagggaacttggtcctgtacatcttaatcattatccactggaatgcttgcatttacttcgccataagtaaatttatcgggtttggtaccgactcttgggtttacccaaacataagcatcccagaacacgggaggttgtccagaaagtacatctacagcttatattggtctacactcacactaaccaccattggggagaccccccctccggttaaagacgaagaatacctgtttgtcgtcgtggattttttggtcggagtgttgatctttgcaacgatcgtcggcaacgtaggttcgatgatttcgaatatgaacgcatctcgagcagagttccaagccaaaatcgatagcataaaacaatacatgcagtttagaaaagtaaccaaggacctggagacgcgagtcatccgttggtttgactacttgtgggccaacaagaagactgtagatgagaaagaggtcctgaagtctctccctgataaactgaaagcagaaatcgcaatcaacgtccacttagacacgttgaaaaaagtgcgtatattccaggattgcgaggctggactactggttgagctcgtgctgaagctgcggcctactgtctttagccctggagactacatctgtaagaagggcgatatcggcaaggaaatgtacattattaatgagggtaagctggccgtcgtggctgatgacggcgtgacgcaattcgtggtactgtcagacggaagttattttggcgaaatatctatcttgaatataaagggctctaaatctggcaaccgcagaactgccaacatcaggagcataggctacagcgacctattctgcctgtcgaaagacgaccttatggaggctcttactgagtacccggaggccaagaaggcccttgaagagaaaggaaggcagatcctgatgaaagacaatctcatcgacgaggagctggcccgggctggggccgatcctaaggatttagaagaaaaagttgagcagctggggtcttccttggacacactgcagacgcggttcgcccggttgctggcggaatacaatgccacccagatgaaaatgaaacagcggctctcgcagctagaaagccaggtgaagggcggtggagacaagcccctggccgatggtgaggttcccggcgatgccaccaagacagaggacaagcaacagtag

SEQ ID NO: 184187 - DNA, 3756 bp, synthetic construct
  misc_feature 1..3756: note = Description of Artificial Sequence: Synthetic coding sequence
  source 1..3756: mol_type = other DNA
atgctgggctgggtgcagcgggtgctgccccagccccccggcaccccaagaaaaacgaagatgcaagaagaggaagaagtcgaaccggagcccgagatggaagctgaagtggagcccgaacccaaccctgaagaggccgaaaccgagtcagaatcaatgcccccagaggaatccttcaaggaggaagaagtagccgtggccgaccctagcccccaggaaaccaaggaggctgccctgacatctactatatctctacgggcccaaggggccgagatttccgagatgaacagcccctcgcggagagtgctgacttggctgatgaagggcgtggagaaagtgattcctcaacctgtccactctatcactgaagacccggcccagattttgggacatggaagcaccggcgacaccggctgtacagatgagccaaatgaggctttagaggcccaggacactaggccgggcctcaggctgctgttgtggctagaacaaaatctggagcgggtattgccccagcccccgaaaagctctgaggtttggagggacgaaccggccgtggccacaggggctgcttctgatccagccccaccagggaggcctcaggagatgggccctaagctccaagcaagagagacccccagcctgcctacgcctatcccgctgcagcccaaggaagaaccaaaggaagccccagctccagagccgcaaccaggctcgcaagctcagacctcctcgctaccaccaactcgagaccccgccaggctggttgcttgggtcttgcatcggctcgagatggcgttgcctcaacccgtactgcatggcaagatcggcgaacaggaacctgactcaccaggaatctgtgacgttcagactattagcatactgcctggcgggcaggtcgagccggaccttgtgctcgaggaggtggagccaccttgggaagatgcacatcaggacgtctccaccagtcctcagggtacagaggtggttccggcttatgaagaggagaataaagctgtagagaagatgccgcgtgagctttcgaggattgaggaggagaaggaagacgaagaagaggaggaagaagaagaagaggaagaggaggaagaagaggtgactgaagtactgctcgattcttgtgtagttagtcaggtcggtgtcgggcagtctgaagaggatggcacacgcccccagtcaaccagtgaccagaaattgtgggaggaagtgggggaggaggccaagaaggaagcagaggagaaggccaaagaggaagccgaagaggtggcagaagaggaagccgagaaggaaccacaggactgggccgagacgaaagaagagcccgaggccgaggccgaggccgcctctagtggtgtgcccgcaaccaagcagcaccctgaggtgcaggtggaggacactgacgccgacagctgtcctctgatggcagaagagaaccccccttccaccgtgcttccccccccttctcccgcaaaaagtgatacactcatcgtcccttcgtccgcgtccggaacacatcggaagaagctgccgagtgaagacgacgaagcagaagagcttaaagccctgtccccagccgagagccctgtggtggcttggtccgacccaacgacccctaaggatactgatggccaagaccgtgccgccagcactgcaagcactaacagtgcaatcataaatgaccgtctgcaggagcttgtgaaactctttaaggaacgaactgaaaaggtaaaggaaaagctgattgacccggacgtaacaagtgatgaagagagtcccaagccttctcccgccaaaaaagcccctgagccggccccagatacaaaacctgcagaggccgagccagtggaagaagagcactactgcgacatgctgtgctgtaaattcaaacaccgcccctggaagaaatatcaattccctcaatcaattgatcctcttacgaacttgatgtacgtgctttggctgtttttcgtagttatggcttggaactggaattgttggctgatcccagttcgttgggctttcccgtaccagacacccgataatatccatcattggctccttatggactacctgtgcgacctgatctacttcttggacatcaccgtttttcagactaggttgcagttcgtaaggggcggagacattatcacggataagaaggacatgcggaacaattatctgaaaagcaggcgctttaaaatggaccttctttccctgcttccactggacttcctctacctaaaggtgggggtgaacccccttctccggctgcctcgctgcttaaagtacatggctttcttcgagttcaatagccgtctagaatctatcctgtccaaggcctatgtctatcgagtcattagaactactgcctaccttctgtattcgctgcaccttaactcttgcttatattattgggcttcagcttatcagggacttggctctacacactgggtctatgatggagtgggcaatagctacattcgctgttattacttcgcagtcaaaactctgatcacaattggaggactgcccgaccccaaaacactctttgaaatagtctttcagctgctcaattatttcaccggggtattcgctttctctgtgatgataggtcaaatgagagacgttgttggggccgccacagctgggcaaacctattacaggagctgtatggactctacagtgaaatatatgaacttctataagatccccaagtctgtccaaaatcgcgtgaagacatggtacgaatacacctggcactcacagggcatgttggatgaaagtgagctgatggtccaactccccgataaaatgcgcttggacttggccattgacgtcaattataatattgtgtcaaaggtggctctgtttcagggctgcgaccggcagatgatcttcgacatgcttaagaggttgcgtagcgtggtttacttgcccaatgactacgtgtgtaaaaagggtgaaataggaagagaaatgtacatcatccaggctggccaggtgcaagttctgggcggtcctgatggaaagagcgtcctagttacactcaaggccggcagcgtgttcggagagatctctttgcttgcagtcggcggcggaaaccgacgcactgctaatgtggtggcccacgggttcacaaacctttttatactcgacaagaaagatctgaacgaaatacttgtgcactatccagaaagccagaaacttctccgaaagaaggcgcggcgcatgctccggtctaataataagcctaaggaggagaagtctgtcctcatccttccgcctagggctggaacgcccaagctctttaacgcagccctggccatgacaggcaagatgggtggtaaaggcgccaaaggcggaaaattggctcatctgagagcccgactgaaggaactagccgctctggaggcagccgccaaacagcaggagctggtggagcaagccaaatcatctcaggatgtgaaaggggaggagggttccgccgcacccgatcagcacacacatcctaaggaagctgcaaccgacccgccagcaccccggaccccccctgagcctcccggttccccaccttcttcccctcctcctgcgtctttggggaggcccgagggagaagaggaggggcccgccgagcctgaggagcattccgtgcggatctgtatgagtccgggcccagagcctggagagcagattcttagcgtcaaaatgcctgaggagcgggaagagaaggcagagtag

SEQ ID NO: 184188 - DNA, 900 bp, synthetic construct
  misc_feature 1..900: note = Description of Artificial Sequence: Synthetic coding sequence
  source 1..900: mol_type = other DNA
atgctgggctgggtgcagcgggtgctgccccagccccccggcacccccagaaaaactaagatgcaagaggaggaggaagttgaacctgagcccgagatggaggctgaggtggaacctgaaccaaacccggaggaagccgaaactgaaagtgagagcatgccacccgaagaaagctttaaagaggaggaggtcgcggtggccgatccctctccgcaagaaactaaagaagccgcactcacttctaccatttctctccgggctcagggagccgaaataagtgagatgaactccccctcccgccgcgtgcttacgtggctaatgaaaggagtagaaaaggttatcccccagcccgtgcactcaatcaccgaagaccccgcccagattctgggtcacggaagcacaggagatacaggctgcacagatgaacctaatgaggcattagaagcccaggatactaggccaggtttacgcctcctcttatggctggagcaaaacttggagagagtgctgccccagccgccaaagtccagtgaggtttggcgcgacgagcctgcagtggccacgggcgcagccagcgacccggctcctcctggcaggcctcaggagatgggacctaaactccaggctcgggagacacctagtctgccaacccctatccctttacaaccaaaggaagagcctaaggaggcaccggccccagagccccaacctgggagtcaggctcagaccagctccctcccacctacaagagatccggccagattggtggcctgggtactccaccgtctcgagatggcactgccccagccggtcctccacggaaagattggcgagcaagaacccgacagccccggtatatgtgatgtgcaaaccagagtgatgggggcaggaggcctgtag

SEQ ID NO: 184189 - DNA, 2430 bp, synthetic construct
  misc_feature 1..2430: note = Description of Artificial Sequence: Synthetic coding sequence
  source 1..2430: mol_type = other DNA
atgttcaagagcctgaccaaggtgaacaaggtgaagcccatcggcgagaacaacgaaaatgagcagtcatccagaaggaatgaagagggctcccatccttctaaccaatcccaacagactaccgcgcaggaggagaataaaggagaggaaaaaagtctgaaaacgaaaagcactccggtcactagcgaggagccgcacactaacatccaggataagctcagtaagaaaaactcaagcggagatctcaccactaatcccgatccacagaacgccgcagagcctaccgggactgtgccagaacagaaggagatggaccctggaaaggaaggcccgaacagcccacaaaacaaaccccccgccgcccccgttatcaatgagtatgccgacgcccagctccacaatctagtaaaacggatgaggcagagaaccgccctatacaaaaagaaactggtggaaggcgatctgtccagtcctgaggcttcgccgcagactgctaagccgacggccgttccccccgttaaagagtcggatgacaaacctactgaacactattacaggctcttgtggtttaaagtaaagaagatgccactcaccgagtaccttaagaggataaagctgcctaattctatcgacagctacaccgataggctgtatctgctgtggcttctcctggtgactctggcctacaactggaactgttgctttattccattgcgtcttgtgtttccttaccagacagctgataatatacactactggttgatcgctgatatcatctgtgatattatttatttatacgacatgctgtttattcagccacgcctgcagttcgttcggggaggggatatcatagtggacagtaacgagctaagaaagcattatcgcaccagcactaagtttcaactggacgtggcgagtattattccctttgatatctgttatctcttctttgggttcaaccctatgttcagagctaatcgcatgctgaagtacacttctttttttgaatttaatcatcatctggagtccataatggacaaggcctacatctaccgtgtcataaggaccaccgggtatcttctgtttatcctacacattaatgcatgcgtctactactgggcctcgaattatgaagggatcgggacaactagatgggtgtatgatggagaaggcaacgaatacttacggtgttactattgggcagtcagaaccctcatcactatcggcggcctaccggaacctcaaaccctgtttgaaatcgttttccaactcctcaatttcttcagtggggtcttcgtgttttccagcttaatcggccagatgcgagatgtgattggggcggccactgcgaatcagaattattttagggcgtgtatggatgacacgattgcctatatgaacaactatagtataccgaagctggttcagaagagggtccgcacatggtatgagtatacctgggactcacaacgtatgttggatgagagcgacctactgaaaacactgcccaccaccgtccagctggcattggcaatcgatgtgaatttttctatcatcagtaaagtggatctgtttaaaggatgcgatactcagatgatatatgacatgttgctgcggctgaaaagcgtcctttatctgccaggggattttgtgtgtaagaagggagaaatcgggaaggaaatgtatatcatcaaacatggcgaggttcaagtacttggcggtcccgacggcactaaagtgttggtcacactgaaagcaggtagcgtcttcggcgaaatctcgttgctggctgcggggggcggaaatcgacggactgccaatgtagttgctcacggatttgccaacctcctaaccctagacaagaaaacgctacaagaaatactcgtgcattatcccgatagcgagaggatcctgatgaagaaagcacgggttcttttaaagcagaaggccaaaaccgccgaggcaacccccccgcgtaaggacctagcactcctgtttccacccaaggaggaaacacctaagctctttaaaacgctgctcgggggcaccggcaaggccagtctggcaagactcttgaagttgaagagagaacaagcggcccaaaagaaagagaactccgagggcggagaagaagagggaaaagagaatgaggataagcagaaagaaaacgaagataagcagaaagagaatgaggacaagggcaaggaaaatgaggacaaggataaaggtcgggaaccagaagagaagccactagacagaccagagtgtactgctagcccgatcgcagtggaggaagagccacacagcgtgcggcggacagtcctgccccggggtaccagtaggcagtcactgatcatctccatggctccttccgccgaggggggggaagaagtgctgaccatagaggtgaaggagaaagcaaagcagtag

SEQ ID NO: 184190 - DNA, 4188 bp, synthetic construct
  misc_feature 1..4188: note = Description of Artificial Sequence: Synthetic coding sequence
  source 1..4188: mol_type = other DNA
atgctgctgcccctgcccccccagagcagcaagcccgtgcccaagaagtcacagagtagcaaaatcgtgccctcccatcatgatcctagcgagaagaccggtgaaaattgccagaccaaaatatctccatcatctctccaagaatcaccttctagcctgcagggagctctgaaaaaaagaagcgcctttgaggatctcactaatgcgagtcagtgtcagcctgtacaacctaaaaaagaggccaacaaggagtttgtgaaggtcgttagtaagaaaatcaaccgtaacacacacgcgctcggattagctaaaaaaaacaaaaggaatctgaagtggcataagctggaggtgacaccagtcgtggcctccacaactgttgtgccaaatattatggagaagcctcttattctggacattagtaccacctctaaaacacccaatacagaagaggcaagcctttttaggaagccactggtcttgaaagaagagcccacaatcgaagatgaaacactaattaataaatcactgtcccttaaaaaatgtagcaaccatgaggaagtgtccttattggaaaaattacaacctctgcaggaagaaagcgactccgatgacgccttcgtaatcgaacctatgaccttcaaaaaaactcataaaacggaggaggcggcgatcactaaaaaaaccttgtctttgaagaaaaagatgtgcgcgagccaacgcaagcaatcatgccaggaagaaagcctagccgtccaggacgtgaacatggaagaggactctttctttatggagagcatgtcgtttaagaaaaagcctaagaccgaggaatccattccaacccataaattgagctccctcaaaaaaaaatgtaccatctacgggaagatttgccattttcgaaagcctcccgtgttacaaaccaccatttgtggtgctatgtcctccattaaaaagccaaccacagagaaagagacgttattccaggagctgagcgtgttgcaggagaagcataccactgagcatgaaatgtctattcttaaaaaatccctagcccttcaaaagacaaactttaaggaggactcactcgtgaaggagagtctggcctttaaaaaaaagccgagcaccgaggaagcaatcatgatgccggtgatactgaaggaacagtgtatgacagaagggaaacgatctagactcaaacccctggtactgcaggaaatcacctcaggggagaaatcactgataatgaaaccactcagtattaaggaaaaacccagtacagaaaaggaatcattctcacaggagccctctgctctgcagaagaaacacacaacccaagaggaggtgagtattctgaaggagccatcatccctgcttaaatcccctaccgaggaatcacccttcgacgaagctctggcattcacaaagaagtgtacaatagaggaggcccctccaactaaaaaaccattgatccttaaacggaagcacgcgactcaaggaactatgtcccacctgaagaaaccccttattctgcaaactacatctggggaaaaaagcctcatcaaggaacccctgccttttaaggaggaaaaggtcagtctcaagaagaaatgcactacacaggagatgatgtccatctgccctgaattgctggactttcaagatatgattggcgaggataaaaactccttttttatggagcccatgtcttttagaaagaaccctaccactgaagaaaccgtactgactaagaccagtctatcccttcaagaaaaaaagatcacgcagggtaaaatgtcgcacctgaaaaagcctctcgtgctacagaaaatcactagcgaggaagaatctttctacaagaaattgttgccatttaaaatgaaatccactaccgaagaaaagtttttgtcacaggagcctagtgccctgaaagagaaacacaccactctgcaggaggtgtccctgtccaaagaatccctggccattcaggagaaagcgacaacagaggaagagttctcccaggagctgttcagcctccatgtgaagcataccaataaatctggaagcctcttccaagaagcgctagtcctgcaagagaagactgatgcagaggaggacagcttaaaaaaccttcttgctctgcaggagaagtcaacgatggaggaagagtctctaatcaacaagctcctcgccttaaaggaggagctcagcgcagaagcagcgactaatattcagacacaactctcccttaagaagaaaagcacctcacacggaaaagtattcttcctgaaaaaacaactagcactgaatgaaacaatcaacgaggaggagttcctgaacaagcagccccttgccctggaggggtacccttcaatagccgaaggtgaaacactgttcaaaaagttgttagccatgcaagaggaaccttcaattgagaaagaagctgtgctgaaggaaccgactattgatactgaagcacactttaaagagcctctggcgctgcaggaggagccatctaccgaaaaggaagccgttctgaaggagcccagcgtggatactgaagctcactttaaggagactctagcgctgcaggagaagccctcgattgagcaggaagcgctattcaagcgccattctgctctctgggaaaagccttccaccgaaaaggaaactatctttaaggagtcattggatttgcaggaaaagcccagtattaaaaaagagaccctgctgaaaaagccactggccttaaaaatgtcaactattaatgaggcagtacttttcgaggacatgatcgcactgaacgagaaacctacaacagggaaagagctgagctttaaagagccactcgccctgcaagagagcccaacgtataaagaggatacatttctgaaaactctgctagtcccccaagtgggtactagcccaaatgttagctctacagcccccgagagcataacctcaaagagcagcatcgccaccatgacaagcgtgggcaaatctggtaccatcaacgaagcattcctcttcgaggacatgattaccctcaatgaaaagccgaccactggaaaggagttgtcatttaaagaaccacttgctctgcaggagagtcccacatgtaaagaagataccttcctggagacattcttgattccccaaattgggacttctccttacgtgtttagcacgaccccagaaagcataacagagaagtcctccattgccacaatgacctctgttggtaagtcgcgaaccaccaccgaatcctcagcctgcgaaagcgcatctgacaagcccgtgagccctcaagccaaaggaactcctaaagaaataacaccaagggaggatatagatgaagattctagtgacccatctttcaaccctatgtacgctaaggaaattttctcttacatgaaggagcgcgaagagcaatttatattgaccgattatatgaaccgccagattgagatcaccagcgacatgcgcgcaatcctggtggattggctagtggaggtacaggtgagtttcgaaatgactcatgaaaccctctatctagccgtcaaattagttgacctttacctcatgaaggccgtgtgcaagaaagacaaactacaactgctgggcgccaccgcgttcatgatcgctgcaaagttcgaggagcataactctccccgggtggatgatttcgtgtatatctgtgatgataattatcaaagatctgaagttctgtccatggagatcaatattctgaatgtgctaaaatgcgacattaatattcccatcgcctatcacttcctgcgcaggtatgcccggtgcatccacacgaacatgaagaccctcactctgagtagatacatctgcgagatgacactccaggagtatcactacgtccaagagaaagcatccaaactggcagccgctagcttgcttctcgccttatatatgaaaaaactgggttactgggttcccttcctagagcactattctgggtacagcatatcggagctccatcccctggtgcggcagctgaataaattattgaccttctcaagttatgattcccttaaggctgtgtactataaatattcgcatccagtgtttttcgaggtggccaaaattcctgcacttgacatgctcaaattagaagagatcctcaattgcgactgcgaagcccagggcctagtgttatag

SEQ ID NO: 184191 - DNA, 876 bp, synthetic construct
  misc_feature 1..876: note = Description of Artificial Sequence: Synthetic coding sequence
  source 1..876: mol_type = other DNA
atgctgctgcccctgcccccccagagcagcaagcccgtgcccaagaagtcccaaagcagcaaaatagtcccttctcaccatgatcccagcgagaagaccggggagaactgtcagaccaagattagcccctcttcactccaggaatctccaagttctctgcaaggagcactcaagaagagaagcgcattcgaagacctcaccaatgtttccttcgaaatgactcatgagaccctttacttagccgttaaacttgttgacctttacctgatgaaagccgtgtgtaagaaagacaagctccagctgctgggggcaactgcgttcatgatcgccgctaagtttgaagagcacaactcccctagagtggacgacttcgtctacatctgcgacgataactatcagagaagcgaagtgctgtctatggagatcaacatcctgaacgtgctaaaatgcgacatcaatattcccatagcctaccacttcctccggcggtacgcgcgttgcattcacaccaatatgaagacgctgaccctctcgaggtacatctgcgaaatgaccctgcaagagtatcattacgtgcaggaaaaggcatccaagttggcggcagcgtctctgttgctggcactttacatgaagaagctcggctattgggtcccttttcttgagcattacagcggctactctatctctgagctgcaccccttggtgcggcagttaaacaaactgctgaccttctcaagctacgatagcctgaaggccgtgtattataagtatagtcaccccgttttcttcgaggtggcaaagatcccagctctggacatgctcaagttagaggagattctcaactgcgactgcgaggctcaaggactggtgctgtag

SEQ ID NO: 184192 - DNA, 876 bp, synthetic construct
  misc_feature 1..876: note = Description of Artificial Sequence: Synthetic coding sequence
  source 1..876: mol_type = other DNA
atgctgctgcccctgcccccccagagcagcaagcccgtgcccaagaagtcccagtcctcaaagattgtgccctcccaccacgacccttcggagaaaactggtgagaactgccagaccaagatctctccaagcagtttacaggagtctccgtccagccttcaaggcgctttgaaaaagcgatccgccttcgaagatctgactaatgtaagttttgaaatgacacacgagactctatatctggccgtgaaacttgttgatctctacctcatgaaagccgtatgtaaaaaggataagttgcagctgctgggtgcaaccgcattcatgatcgctgccaagttcgaggagcataacagtccccgagtggatgacttcgtgtatatctgtgacgataactatcagcggtctgaggtgctgagcatggagataaatattctcaatgtgcttaagtgtgacattaacatcccgatcgcataccattttctgcgccgctatgccaggtgtattcacactaacatgaagaccttaactttgagcaggtacatctgcgagatgactctccaggaataccattacgtccaggaaaaagcgagcaaactagcggcagcctcccttttactggcattgtacatgaaaaaactcgggtattgggtcccattcctagagcattacagtggctattcaatttccgagttgcatcccctggtccgacagttgaataagctgttgaccttttcctcttacgattcactcaaggccgtttattacaaatacagccaccctgtgtttttcgaagttgctaagatacctgctctcgatatgctcaagctcgaagaaatcctcaattgcgattgtgaggcccagggactggttttgtag

SEQ ID NO: 184193 - DNA, 4188 bp, synthetic construct
  misc_feature 1..4188: note = Description of Artificial Sequence: Synthetic coding sequence
  source 1..4188: mol_type = other DNA
atgctgctgcccctgcccccccagagcagcaagcccgtgcccaagaagagccagtcatctaagatagttccttcacatcacgatccgtctgagaaaacaggagagaactgccagacaaagatttcaccttctagcttgcaagaaagcccaagcagcctgcagggagcccttaagaaacggtcagccttcgaagatctcaccaacgctagtcagtgccagcctgtgcagccaaaaaaggaggcaaacaaggaattcgtgaaggttgtctctaaaaagattaacaggaacacacatgctcttggcctagccaaaaagaacaagagaaatctgaaatggcacaaactagaggtaacccctgtggtggcttccacaaccgtcgtgcctaacattatggagaaacccctcatactggatatttccactacttctaaaaccccaaacacagaagaggcgtccctgtttcggaaacctctggttcttaaggaagagcccaccatcgaggatgagactcttattaacaagtctctgtccctgaagaaatgctctaaccacgaagaggtttctctgctggagaaactgcagccattacaggaagagagcgactcagatgatgcgttcgtgatcgagcctatgacattcaaaaaaacccataaaaccgaggaagccgcaattactaaaaaaactctgtcactgaagaaaaagatgtgcgcaagccagcgaaaacagtcatgccaggaagagagcctggctgtgcaggatgtgaacatggaggaggatagtttctttatggagtctatgagcttcaagaaaaagccaaagaccgaagaaagtatcccaacacataagctgagttccctgaagaaaaagtgcactatatatggcaagatttgccatttccggaagccccctgttctgcaaacaacaatctgtggagccatgtcctctatcaaaaaaccaactacagaaaaagaaactttgttccaggagctgtctgtactccaagaaaaacacactactgaacacgagatgtctatactgaagaagtctctggcactccaaaagacaaatttcaaggaggatagtttggtgaaagagtccttggcttttaaaaagaagccttcgaccgaggaagcgattatgatgccagtgattctgaaggagcaatgtatgaccgagggtaagcggtcacgcttgaagcctctcgtgcttcaggaaataacatccggagaaaaatctttaataatgaaacccctatccattaaagagaagccctcaaccgagaaggagagcttttctcaggaaccatccgcgttgcagaagaagcatacgacgcaggaggaagtctctatcctgaaagagccaagctcacttcttaagagtcctactgaggaatcccccttcgatgaagccttggccttcactaagaaatgtactatcgaggaagccccccccaccaagaaaccgcttattctgaagcggaaacacgccactcaaggaaccatgtcgcacctcaagaaaccattaatcttgcagaccacttccggggagaaaagccttattaaggagcctctcccttttaaggaggaaaaagtgagcttgaaaaaaaagtgcacaacgcaagagatgatgtcaatttgcccagaactactcgacttccaggatatgataggagaggacaagaacagtttctttatggagccaatgagtttcaggaagaacccaacaacagaagagacagtactcacgaagaccagtttgagcctgcaggagaagaaaattactcagggaaagatgagccaccttaagaaacccctcgttctgcagaaaatcacaagcgaggaggaaagcttttataagaagctgttaccgtttaagatgaagtctactacggaggaaaagttccttagccaggagccatcagcattgaaggagaaacataccactctccaggaggtgtcactctccaaggaatctttggcgattcaggagaaagcgaccaccgaggaggagttttcacaggagctcttttctcttcatgtgaaacacacaaacaagtcgggatctctttttcaggaagccctggttctgcaggaaaaaacggatgctgaggaggatagcttgaaaaacctgcttgcgctccaggaaaaatcaacaatggaagaggaatccttgatcaacaagctcttggctctgaaggaggaactcagtgctgaagctgcgactaacattcagacccagctcagccttaagaagaagagcacctcacatgggaaggtgtttttcctaaaaaagcaactagccttaaacgagaccatcaatgaggaagaattcctcaataaacagcctttggcactcgaagggtatccttccatcgctgagggggaaactctgtttaaaaaactgttggcaatgcaggaggaaccatccatcgaaaaagaagcggttcttaaggaacctacaatcgatacagaggcacatttcaaggaacccctggccctacaggaagagccatctacggagaaggaagccgtgctgaaggagcccagcgtggataccgaggcccactttaaggagacgctggcccttcaagagaagccctccatcgaacaggaagccctgttcaagcgacattcagccctctgggagaagccctccacagagaaagagactatattcaaggagtcactggatctccaagaaaagcccagcataaaaaaagagactctccttaagaaacccctggccctgaagatgagcacaattaacgaggcagtcctgttcgaagatatgatcgcccttaacgaaaaacctacgacggggaaggaactgagcttcaaagagccattagcccttcaggagtccccaacatacaaggaagataccttcctgaagacactgttagttccccaagtgggtacctccccaaacgtgtcctctacagcacccgagagcattacttctaaaagcagtatcgctactatgacatccgtgggcaagtcaggcacaataaacgaagcattcctgtttgaagatatgatcaccctgaacgagaaacccacaacaggcaaggagctttcttttaaagaacccttggcactccaggagtcccccacgtgcaaagaggacacgttcctcgagacttttctgataccacaaataggcacctctccgtacgtgttttctacaactcctgaatccattaccgaaaaatcatccatcgcgacaatgacgtcagtcgggaagtctcgcactacaaccgaatcttctgcatgcgagtctgcctcagacaaaccagtgagcccacaggccaagggcacacccaaggagatcactccccgcgaggacatcgacgaggatagcagcgacccatcatttaacccaatgtatgccaaagagattttttcttatatgaaggaacgggaggagcagttcatcctcaccgactatatgaacagacagattgaaatcacaagcgatatgcgggccattctggtagactggctagtggaagtccaggttagctttgagatgactcacgagaccctgtatctggccgttaaactggtagacctctacctcatgaaagcagtctgcaagaaagataagcttcaattattaggagccacagcatttatgatagcagcaaaattcgaggagcataattcgcctcgtgtcgatgatttcgtatacatctgcgacgacaactaccagaggtccgaggtgctttctatggagatcaacattctaaatgtcctgaagtgcgacattaacatcccaatcgcctaccactttctgcggcggtatgcgcggtgtatccacacaaacatgaagactttgactctgagccgctacatatgcgaaatgacactccaggagtaccactatgtccaggagaaggcgagtaagctagcagcggcttctttgctattagccctttatatgaaaaagcttggctactgggtgccttttctagagcattatagtgggtacagcattagtgagctgcaccctcttgttcggcaacttaataagctgctcacattctcctcttatgacagcttaaaggccgtctactataaatattcacaccctgtattcttcgaagtcgccaaaatcccagctctggacatgcttaaactggaggagatccttaactgcgattgcgaagctcaggggcttgtcctctag

SEQ ID NO: 184194 - DNA, 336 bp, synthetic construct
  misc_feature 1..336: note = Description of Artificial Sequence: Synthetic coding sequence
  source 1..336: mol_type = other DNA
atgctgctgcccctgcccccccagagcagcaagcccgtgcccaagaagagccaaagctccaagatcgtgccatcccaccatgacccgagcgagaagaccggtgaaaattgtcagactaaaattagccctagctccttgcaggagagtcctagcagtctccaaggcgcacttaagaagcggtcagcctttgaagatcttaccaatgccagtcaatgtcagccagtgcaaccgaagaaggaagcaaacaaagaattcgtcaaggtagtttcgaagaagatcaataggaacacccatgctcttgggctggcaaagaaaaacaagaggaatcttaaatag

SEQ ID NO: 184195 - DNA, 1083 bp, synthetic construct
  misc_feature 1..1083: note = Description of Artificial Sequence: Synthetic coding sequence
  source 1..1083: mol_type = other DNA
atggccagcgccaccgcccccgccgccgccgtgcccaccctggccagtccattggagcagctccggcacctggctgaagagcttagactgctgctgccccgggttagggttggtgaagcccaagaaactacggaggagttcaacagagagatgttttggcgacgcctgaacgaggccgcggtgacggtgtctcgtgaagcaaccacgcttacaatcgtattcagccaactgccgctccctagtccccaggagactcagaagttttgtgaacaagtccatgctgctatcaaagcctttatcgccgtgtactatctccttcccaaagatcaaggcatcaccctgcgtaaattggtccgcggtgccacactggacatagtggatggtatggcccagctgatggaagtgttgagcgttactcctacccagagccccgaaaacaatgacctgatcagctacaactccgtttgggtggcctgccaacaaatgccccagattccaagagacaataaagcggccgccctcctgatgctgacaaaaaatgtggatttcgttaaagacgcgcatgaggagatggagcaggcagtcgaagagtgtgatccctatagcggtcttctcaacgataccgaagagaataattctgataaccacaaccatgaagacgacgtgttaggattcccttccaaccaggacttgtattggagcgaggatgaccaggaactgattatcccttgcttggcactcgtacgcgcctccaaagcctgcctgaaaaaaattcgtatgctcgtcgccgagaacggaaaaaaagatcaggtggctcagcttgatgatattgtcgacatttcggatgaaatctcaccaagcgtcgatgacctggctctgagcatctatccaccaatgtgccatttgactgtcagaatcaactccgctaaactcgtgtctgtcctcaagaaagccttagagatcaccaaggcaagtcacgtcacacctcagccggaagactcgtggatcccccttctgatcaatgctatcgaccactgtatgaaccgcatcaaggaactgacgcagtcggagttggaactttag

SEQ ID NO: 184196 - DNA, 600 bp, synthetic construct
  misc_feature 1..600: note = Description of Artificial Sequence: Synthetic coding sequence
  source 1..600: mol_type = other DNA
atgccccagatcccccgggacaacaaggccgccgccctgctgatgctgacgaagaatgtggacttcgtcaaggatgcacacgaagagatggagcaggcggtagaggaatgcgatccgtattctggcttactgaatgacaccgaggaaaacaactccgataatcataaccacgaagacgatgtcctggggttcccatctaatcaggatttatactggtcagaggacgaccaggaactgattattccctgcctcgccttggtgcgcgcaagtaaggcttgtctcaagaagattcgcatgcttgtcgccgagaacggcaagaaggaccaagttgcccagctggacgatatcgtggacatcagcgacgagatctccccaagtgtcgatgacctagcgctgtctatctatccccccatgtgtcacctcacggtgcgtataaacagcgctaagctggtgagcgtcctgaagaaagccctggagatcacgaaagcatcccacgttaccccccaaccagaggactcctggatccctttgttaatcaacgccattgaccactgtatgaataggattaaagaattgacacagagtgaactcgaactatag

SEQ ID NO: 184197 - DNA, 699 bp, synthetic construct
  misc_feature 1..699: note = Description of Artificial Sequence: Synthetic coding sequence
  source 1..699: mol_type = other DNA
atggcccagctgatggaggtgctgagcgtgacccccacccagagccctgagaacaatgacctgatttcatataacagcgtttgggtggcttgtcaacaaatgccacagatcccccgagacaacaaggctgctgccctcctcatgctgaccaaaaatgttgattttgttaaagatgcccacgaagagatggagcaggctgtcgaggaatgtgatccgtattcaggtctgctgaacgacactgaggagaacaactccgataatcacaaccacgaagatgatgtcttaggctttccctctaatcaagacctttactggtccgaagacgatcaggagctgatcatcccgtgcctagcactcgtgagggcgtccaaagcgtgtttgaaaaagattcgtatgctggtggcggaaaatggaaaaaaagaccaggtcgcccagctggatgacatcgtggatatctctgacgagatctcaccttctgttgatgacctggctctctctatttacccccccatgtgccacctcacagtccgaatcaacagcgccaaactcgtttccgtcctgaagaaggcgctggaaataaccaaggccagccacgtgacgccccagccggaggacagttggatcccgctgcttataaatgctattgatcactgtatgaataggatcaaggagctgacccagtctgaactggaactttag

SEQ ID NO: 184198 - DNA, 3936 bp, synthetic construct
  misc_feature 1..3936: note = Description of Artificial Sequence: Synthetic coding sequence
  source 1..3936: mol_type = other DNA
atgagcctgctgcagagcgccctggacttcctggccggccccggctcattgggaggagcttccggccgggaccagtctgactttgtgggccagaccgtggaacttggtgagctgaggctgcgtgtgcggagagtcttggccgaaggcggttttgcttttgtgtacgaagcccaagatgtgggttcagggcgagaatacgctctgaaacggctgctgtctaatgaggaagagaaaaacagggccatcatccaggaagtgtgttttatgaaaaaactgtcagggcatcctaacatagtgcaattctgcagcgccgcgtctatcgggaaagaagaatccgacacaggtcaggcagaattcctgctacttaccgagctctgcaaaggccagctagtagaattcctcaagaagatggaatctagggggccgctttcctgtgatacagtactgaagatattttatcagacttgccgagcggtccagcatatgcacaggcagaagccgccaataatccacagagacctgaaggtcgagaacctgttgttaagtaatcaaggaacaatcaagctgtgcgactttggcagcgccaccaccatcagtcactatccagattactcttggtccgcccaacgacgggccttagtggaggaagagataacaaggaacaccactcccatgtacaggaccccagagataatcgacctatacagtaatttccccatcggcgagaaacaggatatctgggccctcggttgcatattgtacttgctttgcttccgtcaacacccgtttgaggacggtgcaaaattacgtatcgtcaacggtaaatatagcattccgcctcacgacacacaatacaccgtgtttcactcgttgataagagcgatgctgcaggtgaaccctgaagaacgactgagtatcgccgaagttgttcaccaattacaggaaatcgccgctgcccggaacgtgaatcccaagtctccaattacagagctgctggagcaaaatggaggttatggttctgcaaccctgagtaggggcccacctccaccggttggcccggccggcagtggctattctggcggactcgcgttggctgaatacgatcagccatacggaggatttttggacatactgcgcggcgggactgagcgcctgtttactaacctcaaggataccagctccaaagtaattcagtccgttgctaactacgctaaaggtgatctggatatcagttacatcacttctagaatcgcggtgatgtccttccccgccgagggtgtagaaagcgctctgaaaaataacatcgaagatgtgagattatttctggatagcaagcatcccggacactacgccgtttataatctgagtccaagaacataccggcccagtcggttccacaacagagtttccgaatgtggctgggcagctcggcgcgccccccatctgcacaccctttacaatatctgtcgaaacatgcatgcatggctgcgccaggaccacaaaaacgtgtgcgtggtgcattgcatggacggcagggcggcaagcgccgtggccgtgtgttcctttctgtgtttctgtaggttgttttcaaccgctgaagctgccgtgtacatgttttccatgaaaaggtgtccaccaggcatctggccatctcataagcgttacatagagtatatgtgcgacatggtggcagaagaacccatcacccctcattcaaagcccatcctggtcagagcagtggttatgacccccgtgccactgttttctaagcagcgtagcgggtgtcggccattttgcgaggtgtacgtaggtgatgagcgggtagcctctacctcacaggaatacgataagatgagagactttaagatagaggatggaaaggccgtgatccccctgggagtgaccgtgcagggcgatgtgctgatcgttatctaccatgcccgttccacactgggcgggcgactgcaggccaaaatggcttcaatgaaaatgttccagatccagtttcataccggattcgtgccaagaaacgccaccaccgttaaattcgcgaaatacgacctagacgcctgcgacatccaggaaaaatatcctgacctgtttcaggtaaatctcgaagtggaagttgaaccccgggataggccatctcgggaggctcctccgtgggagaactcctctatgcgtggccttaaccctaaaattcttttctcttcccgagaggaacagcaggatattctaagcaaatttgggaagccggaattgccccgccagcccgggtctacggctcagtacgatgcaggcgccggttccccggaagccgagcccaccgattctgacagtccaccttcttcttctgcagatgccagccgatttttgcatactctggattggcaggaagagaaggaggccgaaactggcgccgagaacgctagcagtaaagagtcggaatcagcccttatggaagacagggacgaatctgaagtgtctgatgagggtggttcgcccatcagttcagaaggacaggagccaagggctgaccccgaaccccctggtctcgcagccggcttggtccagcaggatctggtgttcgaagtcgaaacaccagctgtgctcccggaacccgtcccacaagaggacggggttgacctgctgggtttacactctgaggtgggggctggacctgccgtgccacctcaggcttgcaaggcgcctagcagtaatacagatctgctgtcttgcctcctgggccctcccgaagccgcctcacagggaccccctgaagatctgcttagcgaggacccgctgcttttggccagtcccgccccccccttatccgtccagagtaccccccgggggggaccacctgccgcggccgaccccttcggacccctactgcccagtagcggaaataacagtcagccttgcagcaatcccgacctcttcggggaatttttgaactctgattccgtgacagtgcctccctcctttccgtctgcgcatagcgctccccctccctcctgtagtgcagacttcttgcacctcggcgacctgcccggggaacccagcaaaatgacggcatctagcagcaacccagacctgctaggcggttgggcagcttggaccgaaactgccgcatccgccgtcgccccaacccctgcaacggagggccctctattttctcctgggggacaaccagccccttgcggctcacaggcctcatggaccaagtctcagaacccagatccttttgcagatcttggggatctctcctctggcctccagggctctccggccggattcccacctggaggcttcatcccaaaaaccgccactacacctaagggatcctcgagttggcagacttcccggcctccggcccaaggagctagttggcccccccaggccaaaccgcctcccaaggcgtgcactcaacctcgaccaaactatgcatccaacttttctgtgatcggcgcgcgggaggaacggggcgtgagagctccctccttcgcccagaagccaaaagtctccgagaacgactttgaggacctcctctctaaccagggattctcttccagatctgacaagaagggccccaagacaatcgcggagatgagaaagcaggatttagccaaggacaccgaccctcttaagctcaaactgctggactggattgagggaaaagagcggaacatcagagctctcctgagtacccttcacacagtgttgtgggatggagagtctagatggactccggtgggaatggctgatttggtggctccagagcaggtgaagaagcactaccggagagccgtcctggctgtgcatcccgacaaagccgccggacagccatacgaacagcatgctaagatgatctttatggagctcaacgacgcctggtcagagtttgagaatcaaggcagccgtcctctcttttag

SEQ ID NO: 184199 - DNA, 1764 bp, synthetic construct
  misc_feature 1..1764: note = Description of Artificial Sequence: Synthetic coding sequence
  source 1..1764: mol_type = other DNA
atgagcctgctgcagagcgccctggacttcctggccggccccggctcactgggcggagcctccgggcgggatcagtcagactttgtggggcaaacagtagagcttggcgaacttaggctgagggtccggagggtgctcgccgagggaggtttcgcctttgtctacgaggcccaggacgtgggaagtggaagggaatatgccctgaaacgcttgcttagcaatgaggaagaaaagaatcgagccatcatccaagaagtgtgtttcatgaagaaattatctggacaccctaacatcgtacagttctgttctgccgcaagtatagggaaggaggaatctgacaccggccaggccgagtttctccttctgaccgagcctcctgggctggcggcaggcctggtacagcaggacctcgtctttgaagtggaaacccctgcggtactgcccgaaccagtcccccaggaagacggagtggatctcttgggtctgcactccgaagtcggagctggccctgccgtccctccccaggcgtgcaaggctccaagctctaacactgatctccttagttgcctgctcggcccccctgaggctgctagccaggggccccccgaggacctcctgtcagaggaccccctcctgctcgcctcacctgcccctccgttgtcagtgcaaagtacacctagaggcggtcctcccgccgcggcggatccttttgggcctctcctgccttcttccggaaacaatagtcagccatgttcaaatccagatctgtttggggaattcctgaactctgattcggtgacggtcccaccatcttttccatctgcccactccgcccccccccccagctgtagtgctgacttcctgcacttgggagatctgcctggtgagcccagtaagatgacagcctccagcagcaacccagatttactgggtggatgggcagcctggaccgaaacagccgccagcgctgtcgccccaacaccggcgactgaaggacctttgtttagtccaggcggccagccagccccttgcggatctcaagcctcttggacaaaatcccagaacccggacccgttcgcagatctgggcgacctgtctagtgggctgcagggatcccccgccggctttcccccaggcggcttcatccccaaaacagcaacaacccccaaaggaagttcttcttggcagacgtctagacctccagcacagggcgcgtcctggccaccacaggcgaagcccccaccaaaggcgtgcacacagcctaggcccaattacgcctccaacttttctgttatcggcgcacgtgaagagaggggggttagggcccccagtttcgcacagaaacctaaagtaagcgaaaacgactttgaggatctgttgtccaaccaagggtttagctcacggagtgacaaaaaaggacccaagaccatcgcagagatgcgcaaacaagatctggctaaggatacagatcctttgaaacttaagctgttagattggatagagggcaaggaacggaatatccgagcactgctttctactctgcataccgtgctgtgggatggtgaatctagatggacacccgtgggaatggctgatttagtggcacctgagcaggtgaaaaagcattaccggcgagccgtgcttgccgtgcatccggataaagccgcaggccaaccatacgagcagcatgctaaaatgattttcatggagttgaacgacgcatggagcgaatttgaaaaccaggggtctaggcccttgttttag

SEQ ID NO: 184200 - DNA, 2238 bp, synthetic construct
  misc_feature 1..2238: note = Description of Artificial Sequence: Synthetic coding sequence
  source 1..2238: mol_type = other DNA
atgcccttccccgtgaccacccagggcagccagcagacccagcccccacagaaacactatggaatcactagcccgattagcctcgcggcccctaaggaaaccgactgcgtgttgacacaaaaactcattgaaaccctcaagccatttggtgtgtttgaggaggaggaggaattacaacggcgcatattaattctgggcaaactgaacaacttggtgaaagaatggatccgggagattagcgagtccaaaaatctgccccagtcagttatagagaacgtgggcggcaaaatcttcacattcggaagttaccgcctgggagtgcacacgaaaggagctgatatcgacgcactgtgcgtggcccctcgacacgttgaccgatccgacttctttacatctttttatgataaacttaagcttcaggaggaggtgaaagacctgcgagcagtggaggaggcatttgtaccagtgatcaagttgtgctttgacggtattgagatcgacattcttttcgcgagactagcgctgcagaccatacctgaggacttggatctgagggacgactcacttctgaaaaacctcgacattcgatgtatccgatccctaaatggctgtcgtgttactgatgaaatattacatctggtgcccaatatagacaactttcggctgactctgcgcgcgattaagctgtgggccaaaaggcacaacatctatagcaacatactggggtttttaggtggcgttagttgggccatgctggtggccagaacatgtcaactctaccccaacgcaatcgccagtacgctagtacacaagttttttctggtattcagcaagtgggagtggcctaatcccgtgttgctcaagcagccagaggagtgtaacttgaatctgcccgtgtgggatcccagggtgaacccctccgatcgctaccatctgatgccaattattactccagcttacccccaacagaatagcacctacaacgtatccgtctcaacacgaatggtcatggtagaggagttcaagcaggggctggcaattactgacgagatcctgctgagcaaggcagagtggagtaaattgtttgaggccccaaactttttccaaaagtataagcactatatcgtccttctagcttctgcacctactgagaagcagcggctggaatgggtggggctagtcgaatccaagatcaggatactggtgggttctctcgaaaaaaatgaattcattaccctcgcccacgtgaatccacagtcctttccagctcccaaggaaaacccagataaagaggagttcaggaccatgtgggtgattggtctcgtgtttaagaaaactgagaactccgagaatctctccgtagacttaacttacgacattcaatcatttaccgacaccgtgtaccgccaagcgatcaatagtaaaatgttcgaggtggacatgaaaattgctgcaatgcatgtcaagaggaagcagcttcatcaactcctcccaaatcatgttctgcagaagaagaagaagcactctacagaaggagtcaaactgactgcactcaatgactcttctcttgatttatctatggatagcgacaactccatgagtgtgccaagtccgacatccgccacaaaaacctctcccctgaattcgagcggctcttcccagggtaggaattctcccgcccccgcagtaacagccgcctccgtgaccaatattcaagccaccgaagtgtcagtaccccaggtgaattcgtcggaaagctccgggggcacatcatcagagtctataccccaaacagcaactcagcccgccatctccccaccaccaaaacccacagtgtcacgagtggtgtcttccacgagactggtcaatccacctcccaggtcaagcggtaatgcagccacatcggggaacgccgccactaagattcctacgcccattgtgggggtcaagagaacttcatccccccataaagaagagtcccccaagaaaaccaaaaccgaagaagatgagactagcgaggatgcaaattgccttgcgctgagcgggcatgataagacagaggccaaagaacaattggatacagagacatcaactactcagtctgaaacgatacagaccgctgctagccttctggcctcacaaaaaacctccagtacagatctctcagatattccagctctgccagcgaatcctataccagtgataaaaaatagcattaaacttaggttaaaccgctag

SEQ ID NO: 184201 - DNA, 1080 bp, synthetic construct
  misc_feature 1..1080: note = Description of Artificial Sequence: Synthetic coding sequence
  source 1..1080: mol_type = other DNA
atgaaggagaacaaggagaacagcagccccagcgtgaccagcgccaacctggaccacaccaagccttgctggtattgggacaaaaaggacctagcccatacacccagtcaattggaaggccttgatcctgccactgaggccaggtaccggcgcgaaggagcccgatttatttttgacgttggaactcggctagggcttcactatgataccctcgctactggcattatctacttccatcggttctatatgttccactcattcaagcaatttcctaggtatgtaaccggagcatgctgtctttttctcgctggcaaagtggaagagacgcccaagaagtgcaaagacatcattaagacagcccggagcttgctgaacgatgtccagttcggccagtttggcgatgaccccaaagaggaggtgatggtcctcgagaggatcttgttacaaaccattaaattcgatttgcaagttgagcatccatatcaattcctgctgaagtacgccaagcagctcaaaggcgataagaataagatccagaaactcgtgcaaatggcatggactttcgtaaatgatcgaacttcactgtgtactacccttagtctccagtgggaacctgagattattgctgtcgctgtaatgtacctcgcgggacgactctgcaagttcgagatccaggagtggacttctaaacctatgtatagaagatggtgggagcagttcgtacaggatgtgccagtggatgtgctggaggatatctgtcaccagattctcgatctgtactcccagggcaaacagcagatgcctcaccacactccgcaccagttacagcaaccgccctcccttcagccaaccccgcaggtaccacaggtgcagcagtcccagccatcccagtcgtctgagccctctcagccccaacagaaggacccgcagcaaccagctcagcagcagcagcccgctcagcagcctaagaaaccctcaccgcagcccagctcaccacgacaggtgaaacgtgcagtagttgttagccctaaggaggaaaacaaggcagcagggaaggccagccttaagcacacgtggtag

SEQ ID NO: 184202 - DNA, 1743 bp, synthetic construct
  misc_feature 1..1743: note = Description of Artificial Sequence: Synthetic coding sequence
  source 1..1743: mol_type = other DNA
atgaaggagaacaaggagaacagcagccccagcgtgaccagcgccaacctggatcacacgaaaccttgctggtactgggataagaaagatctcgcccacaccccctctcagttggaaggcctggatcccgctactgaggcgaggtacaggagggaaggggccaggtttattttcgacgtaggaacgaggctcggactccactacgacacgctggcaacaggcattatttacttccatcgcttttatatgttccatagtttcaagcagtttccacgctacgtgactggcgcttgttgcctgttcttagcaggcaaggttgaagagactcccaaaaaatgcaaggatattattaaaaccgcccgaagcttgttgaatgatgtgcagttcggacagttcggcgacgaccctaaggaggaagttatggtcctcgagcggattctacttcagacaataaagttcgatctgcaggttgaacacccttaccagtttctgctgaagtatgcaaaacaacttaagggcgataagaacaaaattcagaaacttgttcagatggcctggacttttgttaacgatagtttgtgcaccaccttgtctctacagtgggaacccgaaatcatagccgtcgcagttatgtaccttgccggacgcctgtgcaagtttgaaattcaggaatggacaagcaaacccatgtaccgaagatggtgggagcaatttgtccaggacgtccccgtggatgtgctggaggatatatgtcatcagattctagatctttattctcagggaaagcagcagatgcctcaccacacaccccaccaacttcagcagcctccatctctccagcccaccccgcaagtgccgcaggttcagcagtcacaaccaagtcagagctccgaaccatcacagcctcagcagaaggacccccagcagcccgcacagcagcaacagcccgcacagcaaccaaagaagccttccccacagccttccagccccaggcaggttaagcgcgctgttgtggtgtcaccaaaggaggagaataaggctgcggaaccaccacctcctaaaatcccaaaaattgagactacccatccaccactgcctccggcgcacccaccccctgaccggaaacctcccctagccgccgccctaggcgaagctgagcccccgggacctgttgacgccacagatttaccaaaggtacagataccacccccagctcaccccgcaccagtgcatcaacctcccccattgccgcatcgccccccacccccaccacccagcagctatatgacagggatgtcaacgacgtctagctatatgtctggggagggctaccagagcctacagtctatgatgaagactgaaggcccctcctacggcgcccttccgcctgcctatggccccccagctcatttaccctaccacccccacgtatatccacctaatccacctcctccgcccgttccacccccccccgccagctttcccccacccgctattcccccaccaacacccgggtatcccccccctccacccacttacaaccctaatttcccacctccccctcctcgactgcctcccacacacgccgtgcccccgcatcctccccctgggttagggctgcccccagcaagctacccccccccagccgtgcccccgggcggtcagccacctgttcccccgccgatcccaccgccaggcatgcccccggtgggcggactagggcgcgccgcatggatgaggtag

SEQ ID NO: 184203 - DNA, 1803 bp, synthetic construct
  misc_feature 1..1803: note = Description of Artificial Sequence: Synthetic coding sequence
  source 1..1803: mol_type = other DNA
atgaaggagaacaaggagaacagcagccccagcgtgaccagcgccaacctagaccataccaagccttgctggtactgggacaagaaagacctggcgcacactcccagtcagctggaagggttggacccagcgaccgaggctaggtatcgcagggaaggcgctaggttcatattcgatgtgggcacccgtctgggcctccattatgataccctcgccacaggaattatttatttccatagattttacatgtttcactctttcaaacaattccctagatacgtgacaggggcttgttgcctttttcttgcaggcaaggtcgaagagaccccaaaaaaatgtaaggacataattaagaccgcgcggtctctgctgaacgatgtgcagttcggccagttcggggacgatcctaaggaagaggttatggtcctggagaggattctgctccagacgattaaattcgacttgcaggtggagcacccctaccagttcctgttaaaatatgctaaacagctcaaaggagataagaacaaaatacagaagctcgtccaaatggcttggacttttgtaaacgattccctttgtacaaccctcagccttcagtgggagccagagatcatcgccgtggccgtgatgtacctagccggtcgtctgtgtaagtttgaaatccaggagtggactagtaaaccaatgtacagacggtggtgggagcagtttgtccaggatgtacccgtggatgtgttggaggacatctgtcatcagattctggacctgtactctcagggtaaacagcagatgccacaccacaccccccaccaacttcagcaacctcccagtcttcagcctacacctcaggtgccccaggtacagcaatcccagccgtctcaatcaagtgagcccagccaacctcagcagaaggatccccagcagcccgcgcagcagcagcaacccgcgcaacagcctaagaagccctcccctcagccctcttctccccgccaagttaaacgtgccgttgtgtctggcctcaagcaggcactggggagagccggattcccaggtggcggaaacaccacggttgtgagtcctaaagaagagaataaggcagcagagcctccgcccccgaagataccgaagatcgaaactacccatccccccctgccccccgcacatccgcccccagatcggaagccaccgcttgctgcggcactcggcgaggcagaaccccccggacccgttgacgccactgacctcccaaaggtccaaatcccccctcctgcccacccggctcctgtgcatcagccgccacccctcccacacaggccacctcctcctcctccatctagctatatgaccggaatgtctactacctcaagctatatgagcggtgaaggctatcagtccctgcaaagcatgatgaaaaccgaaggcccgtcctatggcgcgttaccgccagcctatgggcctcccgcccacctcccttaccatcctcatgtttacccacccaaccccccaccaccacccgtgcctcctcctcccgcctcttttcctcctcctgctatcccacctccaacacccggatacccccccccaccccctacttacaatcccaattttccaccccctccaccccggctgccaccaacccacgccgtcccaccccaccctccccctggactgggactccccccagccagttatccaccgcctgcggtgccacccgggggtcagccccctgtgcccccgcccatccctcctcccgggatgccgcccgttggaggtctgggacgtgccgcctggatgcggtag

SEQ ID NO: 184204 - DNA, 333 bp, synthetic construct
  misc_feature 1..333: note = Description of Artificial Sequence: Synthetic coding sequence
  source 1..333: mol_type = other DNA
atgaaggagaacaaggagaacagcagccccagcgtgaccagcgccaaccttgatcacactaagccctgttggtactgggataagaaggacttggctcacacaccttcccaactagaggggttggaccctgccacggaggcaaggtaccggagggagggcgctagattcatctttgacgtagggacgcgattaggcctccactatgataccctcgcaactggcatcatttattttcatcggttttacatgtttcactcattcaaacaatttcctcgctacgtcaccggagcctgctgtttgtttttggcgggcaaggttgaggagaccccatag

SEQ ID NO: 184205 - DNA, 684 bp, synthetic construct
  misc_feature 1..684: note = Description of Artificial Sequence: Synthetic coding sequence
  source 1..684: mol_type = other DNA
atgaaggagaacaaggagaacagcagccccagcgtgaccagcgccaacttggatcacaccaaaccttgctggtactgggacaagaaagatctggcccacactcccagccagctagagggactcgatcctgccactgaagccagatatagaagagaaggcgccaggtttatttttgacgtgggtaccaggctgggactgcattacgacacattggcgactggcatcatttatttccaccgcttttacatgttccactcattcaaacagtttccccgatatgtaacaggggcatgttgtctttttctggcagggaaagtggaggagactccaaaaaaatgcaaggatataataaagaccgccagatctctgctgaatgatgttcagtttggacagttcggggatgatccgaaggaagaggtcatggtcctggaacgaatcttgctccagacaatcaaattcgatcttcaagttgagcacccgtaccaattcttattgaagtacgcgaaacaactgaagggcgacaagaataaaatccagaaacttgtgcagatggcctggacctttgttaatgatagtctgtgcacaacattatcacttcaatgggagcccgaaataatagccgtcgccgtgatgtatctggccggtcgactgtgtaaattcgagattcaggagtggacctcctag

SEQ ID NO: 184206 - DNA, 519 bp, synthetic construct
  misc_feature 1..519: note = Description of Artificial Sequence: Synthetic coding sequence
  source 1..519: mol_type = other DNA
atggccagcggcccccacagcaccgccaccgccgccgccgccgccagttctgccgctcctagtgccgggggctcctcatctggtaccacgaccactaccaccacaaccactggcggcattctgattggagataggctgtatagcgaggtttctttgacaatcgatcactccctgatacccgaagagaggctgagcccaaccccctctatgcaggatggtcttgacctgcctagcgagacggacctaagaatcctaggctgcgaactaatccaggctgccggcatccttctgagattgcctcaggtggctatggctaccggacaggtgctgttccacaggtttttttatagcaagtccttcgtgaagcattctttcgaaatcgtggctatggcctgtatcaacctcgcgtccaaaatcgaggaggcaccccgcaggatcagagatgtaatcaacgtcttccaccaccttaggcagcttcgaggaaaaagcgatcaacttcaccttccaaaacccggatag

SEQ ID NO: 184207 - DNA, 1581 bp, synthetic construct
  misc_feature 1..1581: note = Description of Artificial Sequence: Synthetic coding sequence
  source 1..1581: mol_type = other DNA
atggccagcggcccccacagcaccgccaccgccgccgccgccgccagtagcgctgccccaagcgccggggggagcagttccgggaccaccactaccactacaaccacaactggggggattcttataggggatagactgtattctgaggtgtccctgaccatagatcatagtctgatccccgaagagcgtctctcccctactccctctatgcaggatggcctcgatctcccctccgagaccgatctccgcattctgggatgtgagctgattcaggcagctggaattcttctgcggctaccccaagtagccatggcaacgggccaggtcttatttcacaggtttttttactcaaagagcttcgtgaagcactccttcgaaatcgtggcaatggcttgcataaatcttgccagtaaaatagaagaggcccctcggaggatcagggatgtaatcaacgtatttcaccacctcaggcagctacgcggaaagcggacaccatcccctttgatcctagaccaaaactacatcaatactaagaatcaggtgatcaaagcagaacggagggtgcttaaggaactcggcttctgtgtacatgtaaaacaccctcacaaaatcatcgtgatgtacttgcaggtcctggaatgtgaacgtaatcagacactggtgcaaacggcctggaattacatgaatgacagcttgaggaccaacgtttttgtcaggtttcagcccgagactattgcctgcgcctgcatctaccttgccgcaagagccctacagatcccacttcctacaaggcctcactggttcctacttttcggcaccaccgaagaggaaatccaagagatttgcatcgaaactctgcggttatacacgaggaaaaagccgaactacgagctgcttgagaaagaagtggagaagcgaaaagttgccctccaggaggccaagcttaaagccaagggacttaatccagacgggactcctgccttaagcacgctagggggtttttctcctgcttcaaaaccttctagtccacgggaagttaaggccgaggagaagagccctatttctatcaacgttaagactgtgaagaaggagcctgaagaccgccaacaggcctcgaaatccccatataatggggtgagaaaagatagtaagcggtcccggaatagcaggtcggcaagtcgctcccggtcccgaacccgtagtcggagtcggtctcacacaccaagaaggcattacaacaatcgccggtcgcggtctggaacctactcctcccgctctcgatcccgatcccgctctcacagcgaatcaccacgccggcatcataaccatggttccccccatctgaaagctaaacacactcgcgatgatctgaagagctcaaatcggcacggtcacaagcgtaagaagtctcgtagccgatctcagagcaaaagccgtgaccatagtgatgccgcaaagaaacatcggcacgagaggggccatcatcgagatagacgagaacgttccagatctttcgagcggtcacacaagtccaagcaccacggagggtctcggagcggccacggtagacatagacgttag

SEQ ID NO: 184208 - DNA, 1563 bp, synthetic construct
  misc_feature 1..1563: note = Description of Artificial Sequence: Synthetic coding sequence
  source 1..1563: mol_type = other DNA
atggccgccgccgccgccgccgccggcgccgccggcagcgccgcccccgcggctgccgccggcgctccagggtccgggggcgctccgtctggatcgcaaggcgtcctgatcggggatcgattgtactccggagtgctgatcacccttgagaattgcctgctgcctgacgataagctgcgcttcaccccttctatgtcgagtggcctcgacactgataccgaaacagacctgcgggttgtcggttgcgaattgattcaggcggcaggaatcctcctgcgtctaccacaggtggcaatggcaacaggccaggtgttgttccagaggtttttttacaccaagtcattcgttaaacactctatggagcatgtcagcatggcatgtgttcatttggccagtaaaatagaggaggcgccacgcagaatccgggacgtaatcaacgtttttcaccgtctgcgccagttacgggacaagaagaagcctgtgccactcctactggaccaggactatgtgaacctgaaaaatcagattatcaaggccgaaagaagagtattaaaagaactggggttctgcgtgcacgtaaagcaccctcacaagattattgtgatgtacctccaagtgctggagtgcgagaggaaccaacacctcgtacagacaagctggaactatatgaatgattctctgcgcacggatgtatttgtccgatttcagccggaatccattgcttgtgcatgcatctatttagctgcgcgtactctcgaaattcctctgccgaacagacctcactggttcctgctgtttggcgccacggaggaagaaatccaagaaatttgtctgaagatactgcaactctatgcccggaagaaagtggatctcacccacctcgagggcgaagtggagaagaggaaacatgcgatagaggaggcgaaagcacaggctagaggtttgttgcctggcggaacacaggttctcgacggaacctccgggttctcccccgcacccaaactggtggaatcccccaaggaggggaaggggtctaagccgtcccctcttagtgtgaaaaatacgaaacgacggctggaaggcgcaaaaaaagccaaagccgatagcccggtcaatgggctgcccaaggggcgggagtctcgctcaagatcccgttctagagaacagagttacagcagatctccatcgagatctgcctcccccaaacggcggaaaagcgattctggcagcacttcgggaggcagcaagtcccaatcacgttcccgcagtagaagcgactccccgcctcgccaggccccccgctcagcaccttataagggcagtgaaattcgtggttcccgaaaatctaaagattgtaagtacccccagaagccgcacaagtcccgttctcggtcgagctcaagatctcgttcaaggagtcgcgagcgcgccgacaatcccgggaagtacaaaaaaaaaagccattattaccgcgaccagaggcgcgagagatccaggagctacgagaggacagggagacgctacgagcgtgaccatccgggacactctagacacaggcggtag

SEQ ID NO: 184209 - DNA, 681 bp, synthetic construct
  misc_feature 1..681: note = Description of Artificial Sequence: Synthetic coding sequence
  source 1..681: mol_type = other DNA
atggccgccgccgccgccgccgccggcgccgccggcagcgccgccccagcagctgctgcaggtgcacccggaagcgggggcgcacctagcgggagccaaggggttttaatcggagaccgactctacagtggtgtgcttatcacattggagaactgcctgctgccagatgataagcttcggttcaccccctccatgtcctcgggtctagacacagacaccgagaccgaccttagagtggttggctgcgagctcattcaagccgctgggattctgcttcgactgccgcaggtagctatggcgactggacaggtgctgtttcaacgcttcttctacacaaagtcattcgttaagcattctatggagcacgtgtctatggcgtgtgtacacctagcatccaaaatcgaggaggctcctcgtcgcattcgggatgttattaacgtctttcaccgcttgaggcagctgcgagacaaaaaaaagccggtgccgctcttacttgatcaggactatgtgaatctgaaaaaccagattatcaaagctgaaaggagggtgttaaaagagttgggcttttgcgtacacgtcaaacaccctcataagataatcgtgatgtatctacaggtgcttgaatgcgagaggaatcaacacctcgtccagacatcatgggtggcctccgaaggcaagtag

SEQ ID NO: 184210 - DNA, 1044 bp, synthetic construct
  misc_feature 1..1044: note = Description of Artificial Sequence: Synthetic coding sequence
  source 1..1044: mol_type = other DNA
atgaacgacagcctgcggaccgacgtgttcgtgcggttccagcccgaaagcattgcgtgcgcttgtatctatctggcagccagaactttggaaatcccactgccgaatcgcccccactggttcctgctgttcggggccactgaagaagaaattcaggaaatctgtctgaagattctgcagctttatgcccggaagaaggtggaccttacacaccttgagggggaggtcgagaagcgcaagcatgctattgaggaaggcccgagtccgggtccagtggcctggggccacacaggcgctgggtggtacctcggggtgctgtcctgtccccaagcaggctgctgggattacagccttgaatgtagcggggctatctgggaccactgtaagttgcgccttcctgatagcggcgactcctgtgcctcagccagccaggtggctggtatcgcaggagcacaccatcacgcacaatctcttgctgttttgccagtggagagtccaaaggaaggcaaggggtctaagccatcacccctctccgtgaagaataccaagcgccgtctagaaggagccaagaaagccaaggcagattccccagttaatgggttaccgaagggccgggagagccgtagtcgaagcagatcacgtgagcagtcatattcccgctccccatcaaggtctgcatcacctaagcggcggaagtccgacagtggttcaacgtctggggggtccaaaagccagagtaggagtcgatcacgaagcgattcacctccacgccaggcgcctcgcagcgctccctataaggggagcgaaatccgcgggagccgtaagtcaaaggattgcaagtatccccagaagccccacaagagccgctcaaggagtagcagccgctctcgttcacggtctagggagcgcgcagataatcctggaaagtataagaaaaaatcacattattaccgggaccagagaagggagaggagtcggagctacgagcggacggggcgccgatacgagcgtgatcatcccggacatagcagacaccggagatag

SEQ ID NO: 184211 - DNA, 2856 bp, synthetic construct
  misc_feature 1..2856: note = Description of Artificial Sequence: Synthetic coding sequence
  source 1..2856: mol_type = other DNA
atggccgccgccgccgccgccgccgccgccgtgggcgtgcggctgagggactgctgctctcgcggtgcagtgctgctattattcttctctcttagcccaagaccaccagctgccgccgcctggctccttgggttgcgtccagaggacacagctggcgggagggtaagtttagaggggggcaccctgcgggctgccgagggtacctccttcctgctgagagtctactttcagcctggtccccctgcaacagccgctcctgttcctagtccaacattgaacagcggagaaaacggaactggtgactgggcccctcgtctggtgttcatcgaagagccccccggcggaggaggggtagcaccatccgcagtgcccactaggccgcccggacctcaaagatgccgtgaacaatcagactgggccagtgatgttgaggtcctcggtcctctgcgtccaggtggagtggccggctccgcactggtgcaggttcgtgtcagggagctgagaaagggggaggccgagagggggggggccggagggggcggaaagctgttctccctgtgtgcttgggatggacgggcctggcaccaccacggcgcggctggcgggtttttactgagggtgcgtcccagattgtatggaccaggcggagatttgctcccccctgcctggctcagggccctgggggcgcttcttttgctggctctatcagctctgtttagtggactgcgcttaagcttattgtcccttgacccagtggagttacgggtgctgaggaactctggttctgcagcggaacaggaacaggctcgtcgcgtgcaggctgtgcgtgggcgaggtacccacttactgtgtacactgctgcttggccaggccggcgcaaacgcagctttggcgggctggctgtacaccagcttaccacccggctttggcggcacgggtgaagactacagcgaggagggaatccatttcccatggctgccagctctggtgtgtaccggtgctgtgttcctcggcgcagagatctgtccatattcagtttgcagccgccacggcctggccattgcatcacactctgtgtgtttaaccagactactgatggccgctgccttcccagtctgctaccctctgggcaggctgctggactgggctttgaggcaagagattagcactttctacacccgagagaaacttttagaaaccctcagggccgccgacccctattcagatctcgtcaaggaggagctcaatataattcagggcgcgcttgagctccggacgaaggtggtggaggaggtacttacaccattgggggattgctttatgctaagaagcgatgccgtgctcgatttcgcaacagtgtcagagatcctgcgatcaggatatacccgaattccggtttatgaaggcgatcagagacataatatcgttgatattctgtttgtcaaagatctggcttttgttgaccctgacgactgtacccctctgctcacagtgacgcggttttacaaccgaccccttcactgtgtcttcaacgatactagactagacaccgttttagaggagttcaaaaagggcaagagccacctggcgatagtacagcgggtcaataatgaaggagagggagaccccttttacgaggtcatgggcatcgtgactttagaggacataatcgaggaaattatcaagtccgaaatactggacgaaacagatctctacacagataatagaaagaaacagcgcgtcccacagagagagagaaaacggcatgacttttccttgtttaaactttctgatacggagatgcgcgtgaagatttccccccaactgctcctcgcaacacacaggtttatggctaccgaggtcgaaccctttaaatccttataccttagtgaaaagatcttgcttaggcttctcaaacaccctaatgttatccaggaattgaagttcgatgaaaaaaacaaaaaagctccagagcactacctttatcaaaggaataggcctgtggactacttcgttctcttgctgcagggaaaggtggaggtggaagtcgggaaggaaggcctcagatttgagaatggagccttcacctattatggtgttcctgccatcatgaccaccgcgtgcagcgataatgacgtaaggaaggtgggctctctggccgggagttcggtattcctgaaccggagtccttcgagatgcagcggcctaaacagaagcgagtcccccaatagggagcgaagcgactttggtggaagtaacacacagctgtattcatcctcgaataacctctacatgccggactattcagtacatattctgtctgatgtgcagtttgtgaagattacaaggcagcagtatcagaatgctttaactgcttgccatatggattccagcccacagtcccctgacatggaagcgttcactgacggtgattccactaaggcgcctacaacacggggcacaccccagacaccaaaagatgatccagcaattaccctgctcaataacagaaatagtttaccatgtagcagatcggatggtttgagatcaccttcagaggtggtgtatctgaggatggaggaactggcttttacacaggaggaaatgacggatttcgaggaacatagtacacagcagctgacactgtccccagctgctgttccaaccagagccgctagcgacagtgagtgctgcaatattaacctggacacagagacatctccctgctccagcgacttcgaagaaaatgtggggaagaaacttctgcgtaccctgtccggccaaaaacgaaagcgatcaccagaaggtgaacgcacgagcgaggacaattctaatctgacaccactaataacgtag

SEQ ID NO: 184212 - DNA, 2493 bp, synthetic construct
  misc_feature 1..2493: note = Description of Artificial Sequence: Synthetic coding sequence
  source 1..2493: mol_type = other DNA
atggccgccgccgccgccgccgccgccgccgtgggcgtgcggctgcgagattgctgttctcggggagccgtgcttctgctcttttttagtctgtccccgcgtcctcccgcagccgccgcctggttactaggcttacgccccgaagacacagccgggggccgcgtctcactcgagggaggaacacttcgagccgccgagggaactagtttcttactgagagtctactttcagcccggaccaccgagatgtagagaacagagcgattgggcctcagacgtagaggtattgggaccacttcgccccgggggagttgcaggttcagcactcgtgcagctgttctctctctgcgcatgggatggcagagcctggcaccaccatggggccgctggcggttttcttctgcgcgtgaggccacgattgtacggtccggggggcgaccttctgccacccgcttggctccgggctttgggagcactcctgcttctcgccctgtctgccttgtttagcggtttaaggctgtctctgctgagcctagatcccgtagagctccgcgttctgcgaaattccggaagcgcggctgagcaggagcaggctagaagagtccaggctgtcagggggcgaggcacgcacttactctgcacacttctcctgggccaggctggggccaatgctgcactagcaggctggctgtacacaagccttcctccagggttcggcggcacgggtgaagattactcagaggaaggcattcactttccttggttgcccgcattggtgtgtaccggcgctgtcttcctgggcgctgagatatgcccttactccgtgtgttcgagacacggcttggccatcgccagccactcggtgtgcctcacccgcctcttaatggctgcggcctttcccgtgtgttatcctttggggcggctgttagattgggcactccggcaggagataagcaccttctacactagggaaaaattactagagaccctgcgcgcagcagacccatattccgatctggttaaagaggaactgaatatcattcagggcgcactggagctgcgcaccaaggtagtcgaggaagtgttgaccccacttggggactgctttatgttgcggtcagatgccgtactggacttcgcaacagtgtcggaaatcctgcgctccgggtatacaaggattcctgtctacgaaggcgatcagagacataatatcgtggacattctcttcgtaaaagatctggccttcgtagaccctgatgactgcacgccactactcacggtcacccggttctataaccggccactgcattgcgtgtttaacgatactaggttagacaccgtgcttgaagagttcaaaaaaggaaagagccacctggcgatcgtccagcgagtcaacaacgagggcgagggcgatcccttctacgaagttatggggattgtcactctggaggatatcatcgaagaaatcattaaaagcgagatattggatgaaacggacctctataccgacaacaggaaaaagcagcgggtgcctcagagggagagaaaaaggcatgatttttccctttttaaactgagcgacaccgagatgcgtgtaaagatctctcctcagctgttgttagcaacccatcgcttcatggctactgaagtagagccctttaaatcactgtacctctcagagaagatcttgctaagactcttgaagcatccgaatgtcatacaggagttgaaatttgatgagaagaataagaaggcccccgagcattacctgtatcagagaaacagacctgtggactactttgtgctcctgctccaggggaaggtggaagttgaggtgggtaaagaggggttgagattcgaaaacggtgccttcacgtattacggagtgccggccatcatgactaccgcctgttctgacaatgatgtgagaaaggtaggttcactcgccggctccagtgtgttcctgaataggtcccctagccgctgttctggactgaatcggagtgaaagccctaatagagaaaggtccgatttcggggggagcaatacacaattatacagtagttctaataacctctacatgcctgactactccgtccacattctttccgacgtacagttcgtaaagatcaccaggcagcagtatcaaaatgcactgacagcatgccacatggatagcagcccccagtctccagacatggaggcattcaccgacggagattctaccaaagcccccacgacccgggggaccccccaaacacccaaggacgaccctgccatcacactgctcaacaatcggaacagcttgccctccagcgactccgaatgctgcaatattaacctcgatacggaaacttccccctgtagcagcgatttcgaagagaacgtaggtaagaaactgctgcgaaccctaagcggtcagaagcgcaagcgcagcccggagggagaacgcacatcagaggataatagtaaccttacaccattgatcacttag

SEQ ID NO: 184213 - DNA, 1824 bp, synthetic construct
  misc_feature 1..1824: note = Description of Artificial Sequence: Synthetic coding sequence
  source 1..1824: mol_type = other DNA
atggccgccgccttccccgtgtgctaccccctgggccggctgctggattgggccctgcggcaggagatatctactttctacacacgggagaagctgctagagactttgcgcgctgccgatccctattccgacctcgtcaaagaagagctgaatatcattcagggggcactggagctgcgcaccaaggttgttgaggaagttctgactcctctgggagattgtttcatgctccggtccgatgccgtgctggactttgccacagtctctgagatccttagaagcggatatactcgtatcccagtttatgagggggaccagcgacacaacattgtggacatactttttgtcaaggacctcgcctttgtggaccctgatgattgtacccccctcctgactgtgacccggttttacaataggcctttacattgtgtgttcaacgacacccgtctcgataccgtgttggaagagttcaagaaagggaagtcccatctggcgattgttcagcgtgtcaacaatgagggggaaggcgatcctttttacgaggttatggggatcgtgacactcgaggacatcatcgaggagataatcaagtccgagatcctggatgaaacagatctctacactgataacagaaagaagcaaagagtgccacaacgcgagcgaaagagacatgatttcagcctttttaaactgtccgacactgagatgagggttaaaatatccccacagctcttactggccacgcatagatttatggctaccgaagtcgagcccttcaagagcctctacttgtcagagaagattctgctgaggttgctgaagcaccctaatgtcattcaggagctgaagttcgatgaaaagaataaaaaagctccggagcactatctgtaccagcgcaaccgccccgtagattacttcgtactcctcctccaggggaaagtggaggtcgaagtggggaaggagggcctgagatttgaaaacggggcgtttacctattacggcgtgccagcgataatgactacagcctgctcggacaacgacgttcgcaaggtcgggagcctagccggcagttctgtttttttacccgtctctgttagtaggacattcgctgtgagtaggggtgacagtcttgccggatcacccgtgaacaggagtccttcccggtgctctggcctgaaccgaagcgagagccctaatagagagaggtccgacttcggtggctccaatacacaactgtacagttcttctaacaacctgtacatgccagactacagtgttcacatcctttcagacgtgcagtttgtgaagatcaccaggcagcagtatcagaacgcactgaccgcctgccacatggacagttcccctcaaagcccagacatggaggcgttcacagacggtgattccacaaaggctccaaccacccgcgggactccacagacgcccaaggacgaccctgccataacactcctgaacaaccggaactccctcccctgcagccgctccgacggattgcggtccccttccgaggtggtataccttcggatggaagaactggcctttacacaggaggaaatgacggactttgaagagcactctactcagcagctcaccctgtccccagccgccgtgcccacacgggccgcatccgactccgagtgctgcaacattaatttggacaccgagactagcccctgctcctcagactttgaggagaacgttggtaagaagttgctgcgtacgctcagcggtcaaaaaaggaagaggtcgccagagggcgaacgaacatctgaagacaatagtaatctgactcccctgatcacatag

SEQ ID NO: 184214 - DNA, 2643 bp, synthetic construct
  misc_feature 1..2643: note = Description of Artificial Sequence: Synthetic coding sequence
  source 1..2643: mol_type = other DNA
atggccgccgccgccgccgccgccgccgccgtgggcgtgcggctgagggactgctgctcaaggggagctgtcctgctactcttcttttcattgagccctcgacccccagccgccgccgcatggctgctggggttacggcctgaggatacagccggaggacgggtgagcctggagggagggaccctgcgggccgccgaaggcacctccttcctattgcgagtctacttccagccaggccccccccggtgtagggagcagagtgattgggcatctgacgtggaagtattagggcctttacggccaggcggtgtcgccgggagtgccctcgtgcagctcttctctctctgtgcttgggatggccgcgcttggcaccatcacggtgcagccggcggctttctcctgagggtgagaccacgcctgtatggccctggcggcgacctgcttcctcctgcttggttgcgcgcgcttggcgctttgttattgctggccctgagtgcgctatttagcggccttcggttgtcactgctctcccttgaccctgttgaactcagagtgctcaggaacagcgggagcgctgcagagcaggaacaagctcgccgtgtgcaagcggtcagagggagaggaacacatttgctgtgcactttgctgctgggccaggctggcgcaaacgccgccttagccggatggctctacacatcactgcctcccggatttgggggcacaggagaggattattccgaggagggaatccattttccatggttgcctgccctggtttgtactggggctgtcttcctgggcgctgagatttgcccctatagcgtctgtagccggcacgggcttgcaatcgcatctcactccgtgtgcctgacgcgcttactgatggcggcagccttcccagtgtgttaccccttgggccggttacttgactgggccctcaggcaggaaatctcgacgttctacacaagagaaaaactccttgagacccttcgggccgcagatccttatagcgatctcgtgaaggaggaactgaatatcatccagggggcgctggagctgcggaccaaggttgtcgaggaggtcctaacacctctcggagattgctttatgctcagatctgacgccgttttggactttgccacagtgagcgaaatcctgcgcagcgggtacacccggatccctgtatacgaaggggatcagcgacataacatcgtcgatatcctcttcgtgaaagacctggcattcgttgacccggatgattgcactcctctcctgaccgttacacggttctacaacaggcctcttcactgtgtgttcaatgatacaagactggacacagtgctggaagaattcaagaagggtaaatctcacctagccattgtgcagagagtaaacaacgagggggagggtgacccattctacgaagtcatgggtatagtcaccctggaagatataattgaggagatcatcaaatctgagatattggatgagactgacctgtacacagacaatagaaaaaagcaaagggtccctcagagagagcgaaagcgccatgatttcagtctgttcaagttgtccgataccgaaatgagagtcaagattagcccacagctgttgttagcaactcacagatttatggctactgaggtggagcccttcaagtctctatacctttcagaaaagatcctgctgcggctgttgaagcacccaaatgttattcaggaactgaagttcgatgagaaaaataaaaaggcgcctgaacattatttatatcagcggaaccgccctgtggattacttcgtgctcctgctgcagggaaaagtggaggtggaggtgggcaaggagggactgcgatttgagaacggagcttttacatattacggcgtcccggctattatgaccactgcctgttcagacaacgacgtgcggaaagtcggctctctggcgggtagtagtgtgttcctgaaccgcagccctagcaggtgcagtggcctgaatcgctcagagtccccaaaccgtgaacgttctgatttcggcggctccaacacacaattgtactctagctctaataatctgtacatgccggactatagcgtccacattctttctgacgtgcaattcgtgaagatcacgagacagcagtatcagaatgccctgaccgcctgccatatggacagtagccctcagagcccagatatggaagcttttaccgacggcgattcaactaaggcaccaaccacccgagggaccccgcaaacccctaaagatgatcctgcgattacacttctgaataatagaaattctctcccatgcagccgaagtgatggcttacggtcccccagcgaggtggtatatcttagaatggaagaactggccttcacacaggaggagatgacggactttgaagagcacagcactcagcagttgacactgtctcccgcggctgttccaacaagggccgccagcgacagtgagtgctgtaatattaatctggacactgaaacgtccccctgtagctccgatttcgaagagaacgtcgggaagaagctgctccgcacactgtcgggccagaagaggaagagatcgcctgaaggagagagaacatccgaggataacagtaacctcaccccgttgatcacctag

SEQ ID NO: 184215 - DNA, 1215 bp, synthetic construct
  misc_feature 1..1215: note = Description of Artificial Sequence: Synthetic coding sequence
  source 1..1215: mol_type = other DNA
atgggcatcgtgaccctggaggacatcatcgaggagatcatcaagagcgaaatactcgacgaaaccgatctgtatacggacaataggaagaaacagcgcgtgcctcaacgggagcggaagcgccacgacttcagcctgtttaaactgagcgatactgagatgagggtcaagatttctccgcaactcctgctggctacccatagatttatggctacagaggtggaacccttcaagagtctgtacctcagcgagaaaatcctgctgcgcttgctcaaacaccccaatgtgattcaggaactgaagttcgacgagaagaacaagaaagcgcctgagcactatttgtaccagcggaataggcctgtcgattactttgttctgctgttgcaagggaaggtggaggtggaagttggaaaagaggggctgagattcgagaacggggccttcacctattacggtgtgcccgccattatgacgaccgcctgcagtgacaacgacgtgaggaaggttggctccttagcgggcagctcggtgtttctgaacaggtcacctagtaggtgcagtgggcttaaccggtcggaaagtccaaatagagaacggagtgattttggaggcagtaatacacagttatatagctccagtaacaatttatacatgcccgattacagcgttcatattctctcagacgttcagttcgttaaaataaccaggcagcagtaccagaatgctctgactgcctgtcatatggatagctcccctcagtccccagacatggaagctttcactgacggcgatagcacgaaggctcctactactaggggcaccccacagacccctaaagacgatccggctattactctcttgaataatcgcaatagcctgccttgctcccgtagtgatggtttacgctccccaagcgaagttgtgtacctgcggatggaggagctggcgttcacacaggaagagatgactgatttcgaggaacatagcacccaacagttgaccctctcccccgctgccgtaccaactcgtgccgcgtccgatagcgaatgctgcaatataaatctcgacacggagacttctccctgctcctccgactttgaagagaatgtgggcaaaaaacttctgcgcactctctctgggcagaaacgtaagcgcagccctgagggtgaaagaacaagcgaggataattcaaaccttactcccttaataacttag

SEQ ID NO: 184216 - DNA, 2562 bp, synthetic construct
  misc_feature 1..2562: note = Description of Artificial Sequence: Synthetic coding sequence
  source 1..2562: mol_type = other DNA
atgatcggctgcggcgcctgcgagcccaaggtgaagatggccggcggccaagcagccgccgccctgcccacttggaagatggcggcacgtcggagtctatccgcccgaggaagaggcatccttcaggctgcagccggccggcttcttccgttgctcttactctcgtgttgctgcggagccggcgggtgtgcagccgtaggagagaatgaggagacagtgataatagggctccgtctcgaagataccaatgacgtaagcttcatggaagggggggcactgcgtgtgagtgagcgtactagggtgaagctcagagtctatggacagaacatcaataacgaaacatggtccagaattgcttttactgagcacgagaggcgcaggcactctcctggcgagagaggattggggggacccgcaccacccgagccagattcgggccctcaacggtgtggtataaggaccagtgacataatcatactgccacacatcattctgaacagacgcacatccggcataatagagatcgagatcaagccgttacgaaagatggagaagtccaagagctactacctgtgtacatcgctctccacaccagctctgggggctggcggctctggctctacgggaggggccgtgggcggtaagggggggtctggggtcgccggcttaccccctcccccctgggctgagaccacctggatatatcacgacggtgaggacaccaaaatgattgttggggaagagaagaaatttctgttaccattttggctccaggttatcttcatctctctcttgctgtgcctgtctgggatgttctctggactgaacctcgggctgatggcactcgaccctatggagcttcggatcgtacagaactgcgggaccgagaaagagaagaattatgccaagcgcatcgagccggtacgccgtcaggggaattatctgctgtgcagcttacttttggggaatgtgctggtaaataccacattgaccattctgctggatgacatcgccggatctgggcttgtggccgtggttgtgtctacaataggtatcgtgatatttggagagattgtgccacaggcaatttgttccaggcatgggctcgcagtgggcgcaaataccatcttcctgaccaaatttttcatgatgatgacatttccagccagctaccccgtcagtaaactcctggactgtgtactcgggcaggaaatcggaactgtctacaatagggaaaagctgctggagatgctgagagtgaccgacccctataacgacttggttaaggaagagctcaacatcattcagggggcattggaactccgcaccaaaacagtcgaggacgtgatgacaccactaagggattgcttcatgattaccggggaggcaatccttgatttcaatactatgagtgagattatggagtctgggtacactagaattccagtcttcgaaggcgagcggagcaacatcgtggacctgttgttcgtaaaggacttggcttttgtggacccagatgactgtacccctctaaagacaataacaaagttttataatcatcccctgcattttgtgttcaatgacaccaagctagacgcgatgttggaggaatttaaaaaaggcaaaagccacctcgctatcgtccagagggtgaacaacgagggggaaggggatcctttttatgaagtgctggggattgtaacattagaggacgtgatcgaagagatcatcaaatcagaaatcctcgatgaaactgacctgtacaccgacaacaggaccaagaagaaggttgcccaccgagagagaaagcaggattttagcgccttcaagcagaccgactccgagatgaaagtgaaaatcagcccccaactattattagccatgcaccgcttcttggcaacagaggttgaggctttttcccctagccagatgtctgagaaaattctgctgcggcttctgaagcaccccaatgtgatccaggaactgaagtatgatgagaaaaacaagaaagcgcctgagtactatctgtaccaaaggaacaaacctgtggactacttcgtactgatactccagggcaaggttgaggttgaagcaggaaaagagggtatgaaatttgaagccagtgctttctcatattacggtgtgatggctttgacggctagccccggcgaaaacaagtctccccctagaccttgtggactcaatcattccgactctctttccaggtccgatcgcatagacgccgtgacgcccacgctcggatctagcaacaaccagttgaactcatctctgttgcaggtttatatccctgactatagcgtgcgggccctatccgacctgcagttcgtcaagatcagccgccagcagtaccaaaacgcactgatggcctcgaggatggacaaaacaccacaaagcagcgactctgaaaacactaagatagagctgaccctgacggaactgcatgacgggctgccagacgagacagcaaacctgctgaacgagcagaattgcgtcactcattcaaaggcgaaccattctcttcataatgaaggggcaatttag

SEQ ID NO: 184217 - DNA, 1659 bp, synthetic construct
  misc_feature 1..1659: note = Description of Artificial Sequence: Synthetic coding sequence
  source 1..1659: mol_type = other DNA
atgatcggctgcggcgcctgcgagcccaaggtgaagatggccggcggacaggccgcagctgccctacccacctggaaaatggccgctaggagaagtctctcggccagaggaaggggcattctgcaagcagcagcaggcaggcttcttccactgctgctgctcagctgctgctgcggagcaggtggctgcgccgccgtgggcgaaaacgaggaaaccgtcatcatcggacttagattggaagacacgaatgacgtgagtttcatggagggaggggctctgcgggtctcagaacgcacccgtgtgaagctgagggtgtatggccaaaacataaataacgaaacttggtcacgcatcgctttcaccgagcatgagcggcgacgtcactctcctggggagagagggctggggggacctgccccccctgaacccgacagcggacctcagcggtgcggaattaggacaagcgacataatcattctccctcatatcatcctgaaccgccgaacctcggggataatagaaatagaaattaaaccgctcaggaaaatggagaagagcaaatcttactacctgtgtacttccctgtcgacccctgccctcggtgctggcggctctgggagcacgggtggggccgttggaggaaaaggaggatcgggggttgctgggctacctcctcctccgtgggcggagacaacttggatctatcatgatggcgaagatacgaagatgatcgtgggcgaagagaagaaattcttgttgcccttttggctccaggtgatttttatctctctgctgctgtgcctgtcaggcatgttttccggcctaaacctcggcctgatggccctcgacccaatggaacttagaatcgtgcagaattgcggaacagagaaggaaaagaactacgcaaagaggatagagcctgtcaggcgccagggaaattatctcttgtgtagcctcctgctcggcaacgtcctggtaaacaccactctaaccattctgctggatgacatcgcaggctccggcctagttgctgtcgtggtcagtactataggcatcgtaattttcggggaaatcgtgccacaggccatctgctccaggcacggcctggctgtgggtgccaacacaatctttctaacaaagttttttatgatgatgacctttccagccagctaccctgttagtaagttactggactgtgtgctcggccaggagattggaacggtgtataaccgcgagaagttgctggaaatgcttcgggtgaccgatccttataatgacctggtaaaggaagagcttaatattattcagggtgcccttgaactgcgaacgaaaacggtggaggatgttatgacccccttgagagattgtttcatgattacgggcgaggccattttggattttaataccatgtctgagatcatggagtccggctacacaagaatcccggttttcgaaggtgagcgttcaaacatcgttgatcttctttttgttaaagacctcgcatttgtagaccctgatgattgcacacccctaaaaacaatcacaaagttttacaaccaccccttacacttcgtctttaacgatacaaaactggacgctatgttggaggagttcaagaaagagcatactaacaagaagcctaagagctaccagcactag

SEQ ID NO: 184218 - DNA, 2628 bp, synthetic construct
  misc_feature 1..2628: note = Description of Artificial Sequence: Synthetic coding sequence
  source 1..2628: mol_type = other DNA
atgatcggctgcggcgcctgcgagcccaaggtgaagatggccggcggacaggctgccgccgcactgcccacttggaagatggccgcgcgccgtagcttatccgcccgcggaagaggaatcctgcaggccgccgcaggccggctccttcctctgctcttgttgtcctgctgctgcggcgcgggagggtgtgctgctgtcggtgagaatgaagagaccgtgatcattggtctaaggttggaagacacaaatgacgtgagttttatggaggggggagcacttcgcgtgtcagaacgcaccagggtgaaactcagggtttacggacaaaatatcaataatgaaacctggtcacggattgcattcaccgaacatgagaggagaaggcacagtccaggcgaaagagggctggggggccccgccccgccagagcccgacagcgggccccaacggtgcggtatacgaactagcgatattataatccttccacacatcatcctgaaccgccggacatccggaattattgagattgagattaagcctttgagaaagatggaaaagagcaagagctattacctgtgtacctctttgtcaacccctgctttgggagcagggggctcgggctcaaccgggggcgcagtgggtggcaagggtggatccggtgtggctgggctacctccaccaccctgggctgaaactacctggatctaccatgacggagaggacaccaagatgatagttggggaagaaaagaagtttctgctgccgttttggcttcaggttattttcatatccctactactttgcctttcagggatgttcagtggactaaatcttggcctgatggccctggatcccatggaactgcggatcgtacagaactgtggcacagaaaaagagaaaaactatgcaaagagaatagaacctgtgagacgccaagggaattatctcctctgtagcctgctgttggggaatgtcctggtcaacacgacgctgacaatactgttggatgatattgcaggctctggcttagtggcagttgtcgtgtctactataggcatagtgattttcggcgagattgtgccccaagccatctgctcacgccacggtcttgccgtgggagctaataccatctttctcaccaagttctttatgatgatgaccttcccggcgtcttacccggtatcgaaattacttgactgtgtgctggggcaagagatcggcacagtttataacagagaaaagttgctggagatgttgcgcgtgacagacccctacaacgacctggtgaaggaggagcttaacataatccagggcgcccttgagctgcggactaaaaccgtcgaagatgtgatgacccccttgcgtgattgttttatgataaccggtgaggctatcctcgattttaatacaatgtctgagatcatggagtcaggttacactcgcatccccgtgttcgagggcgaacggtctaatatcgtggatctcctgttcgtgaaagatctggcattcgtagatccagatgactgtactcccttaaaaactatcaccaagttctacaaccacccactgcatttcgtgtttaacgatacaaagcttgatgctatgctcgaagaattcaaaaaggggaagtcccacttggccatcgtgcaaagagtgaacaacgagggcgagggcgacccattttatgaagtgttgggaatcgtaaccctcgaggacgtgatcgaggaaattatcaaatctgaaattctggacgaaactgatctgtatacagataaccggacaaagaaaaaagtggcacatcgtgagagaaaacaggatttctccgcttttaagcaaaccgattctgagatgaaggtcaaaataagcccccagctcttgctggccatgcaccgctttctggcgactgaagtggaagctttctccccctcccaaatgagtgaaaaaatcctgctgcgtcttctcaagcatcctaatgtaatccaggaactcaagtatgacgaaaaaaataaaaaggcgccagaatattatctataccagaggaataagcccgtagactatttcgtcctcatcctccagggaaaggtcgaagtggaagcaggaaaggagggtatgaaattcgaggccagcgcttttagttattacggcgtaatggctctcactgcttcgcccgttcccctttccctgtctaggaccttcgtggttagcagaacagagctcttagcagctggctctccaggtgagaacaagtcacccccacgcccatgtggcctgaaccactctgacagcctgtcccgatcagatcggattgatgctgttactcctacgctggggtccagcaataatcagctcaacagtagccttctgcaggtctatattccagattacagcgtgcgggccctgtctgatctgcagtttgtgaagatcagtcgacaacaataccagaatgcactcatggcatcccggatggacaaaactcctcaatcttctgatagcgagaacactaaaatcgaattgacattaactgagcttcatgacgggctgcccgatgagactgcaaacctcctgaacgaacaaaactgtgtcacccactcaaaagcaaaccactccctgcacaatgagggagccatttag

SEQ ID NO: 184219 - DNA, 2565 bp, synthetic construct
  misc_feature 1..2565: note = Description of Artificial Sequence: Synthetic coding sequence
  source 1..2565: mol_type = other DNA
atgatcggctgcggcgcctgcgagcccaaggtgaagatggccggcggccaggccgctgccgccctccctacctggaaaatggcagccagacgctccctcagtgcacgagggcgggggatcctgcaggccgccgccgggagacttctccccctgctgctgctctcctgttgttgtggcgctggaggatgcgccgccgtcggggaaaacgaggaaaccgtgattattgggctcaggctggaagacacaaacgacgtgtcattcatggagggaggagccctgcgggtgtcagagagaactcgagtcaaattacgggtgtacggccagaatatcaacaacgaaacgtggagtcgaatcgcgtttacagagcacgagcgacgtcgccactcgccaggggagcgcgggcttggggggccagctcccccagagccggactccggtccgcagagatgcggcatacgaacatctgacataataatccttcctcacatcatcctgaataggcggactagtggaatcatcgagattgagatcaaacccctcagaaaaatggagaagtcaaaatcctattatctgtgtaccagtctcagcacgcctgccctgggcgccggcggatccgggagcaccggcggcgccgttggcggtaaggggggaagcggggtcgccggcctgcccccaccaccatgggccgaaactacgtggatataccacgacggtgaagataccaaaatgattgtgggagaagagaagaaatttttgctaccattttggctgcaagtgatatttataagcctgcttctgtgcttgtctgggatgttttctggactgaatcttggcttgatggccttggacccaatggagctgagaatagtacagaattgtggcaccgaaaaagagaagaattacgcgaagcggatagaaccagtcaggcgacagggaaactatctactttgtagcctgctgctcggcaacgtactggtcaatacaaccctcaccatcttgttggacgacatcgcaggcagcggcctcgtcgctgtggttgttagcacaatcggcatcgtcatttttggcgaaatagtcccccaggccatctgctccaggcatgggctagcagtgggagctaacaccattttcctgacgaagtttttcatgatgatgaccttccccgcgagctatccagtaagtaagttgctggactgtgtgttaggccaagagatagggacagtctacaatcgcgagaagttactggaaatgctgcgggtgactgacccttataacgacctggtgaaggaggagctgaatatcatacagggagctctcgagctgaggacaaagaccgtcgaagacgtcatgaccccattgcgggattgtttcatgattactggcgaggctatactggactttaatacaatgtctgaaatcatggagagcggctacaccagaatacctgtattcgagggagagcgctctaacatcgtggacctgctttttgtcaaggatcttgcatttgtggatccagacgattgtacccccctcaaaacaatcaccaagttctataaccaccctcttcatttcgtttttaatgatactaaactggatgcaatgctggaagaattcaaaaaaggcaaaagtcaccttgcaattgtgcaacgggtgaacaatgaaggtgagggcgaccctttctatgaggttctgggaatagtcacactggaggacgtaatagaggagataattaagtccgaaattctggatgaaacagacctgtatacagataatcggacaaagaaaaaagttgctcaccgtgagagaaagcaggacttcagcgctttcaagcaaacagatagcgagatgaaagtcaagatctcccctcagcttctgctggctatgcatctggtgtttatctccatcgaagttgaggcctttagtcccagtcagatgtcggaaaaaatcctcttgcgcctgctgaaacatccgaatgtgattcaggagctaaagtacgatgagaagaacaagaaggcacctgagtactatttgtatcagcgcaataaacctgtggattatttcgttctaatactccagggtaaggttgaggtcgaggccggtaaggaaggcatgaagtttgaggccagcgcgttctcctattacggagtgatggcactgactgcctctcccggtgaaaacaagagccccccccggccatgtggcctcaaccattccgattcgctgagcagatccgataggatagatgcggtgactcctaccctgggaagcagcaacaatcagttaaattcttctctgctgcaggtgtacatcccagactatagtgtccgcgctctgtccgacctccaattcgtaaaaatctcccgacaacagtaccaaaatgcccttatggcttcaagaatggataaaactcctcagagttctgacagtgaaaatacaaaaatcgagctgacacttaccgagttgcacgatggattacctgatgaaacagcaaatctgctgaatgagcagaactgtgtgactcattccaaggcaaatcactcactacacaacgagggggccatctag

SEQ ID NO: 184220 - DNA, 2631 bp, synthetic construct
  misc_feature 1..2631: note = Description of Artificial Sequence: Synthetic coding sequence
  source 1..2631: mol_type = other DNA
atgatcggctgcggcgcctgcgagcccaaggtgaagatggccggcgggcaagctgcggctgccctgccaacctggaaaatggcagctcgtagatctctttcagctcgcggccgagggattctgcaagcggctgcaggacggctgttgcctcttctcctgctgagttgttgctgtggtgctggggggtgcgctgctgtcggcgagaatgaagagaccgtgattatcggcctccgtctggaagacaccaacgacgtcagcttcatggaaggcggagcccttcgtgtgtccgagcggacaagagtaaagctaagggtgtacggacagaacatcaataacgaaacgtggtctaggatcgccttcactgaacacgagagaagaagacattcccctggcgaacggggactggggggacccgcccctcccgagccagatagcggtccacaaaggtgtgggataaggacgtccgacataattatcctgccacatatcattctcaataggcgaaccagtggaatcattgaaattgaaattaaacccttgcgtaagatggaaaagtcgaagagctattacttgtgcacctccttaagcacccccgccctgggcgccggcgggagtggttctaccggaggagccgtggggggaaagggcgggtcgggcgttgctgggctgcccccacctccctgggcggaaaccacctggatataccatgacggagaggacacaaagatgattgtcggcgaggaaaagaaattcctcctcccattttggctgcaggtgattttcatctccttgctgctttgtctgagcggaatgtttagcgggctgaacctgggcttgatggctctggatcctatggagctccggatagtccagaactgtgggacggaaaaagaaaagaactatgctaagcgtattgagcctgttagaagacaggggaactatttgctgtgtagcctcctgctcggaaacgtcctggtgaacacaactctgactatcctcctggatgacattgcgggtagcgggctggtggccgttgttgtctccaccatcggaattgtgatcttcggagaaattgtgcctcaggctatctgcagtcgccatggccttgcggtcggcgcaaataccattttcctgactaaattcttcatgatgatgacattcccagcttcataccctgtgagcaagctgctcgactgcgtcctgggtcaggaaatcggcaccgtgtacaaccgagaaaaactgttggagatgcttagagtgaccgatccatataatgacctagtgaaggaagagctgaatatcatccagggcgccttagaactgaggaccaagaccgtggaggatgttatgaccccactcagagattgcttcatgatcacgggtgaagccatattggactttaacaccatgtcggagataatggaatccggatacacaagaataccagtctttgaaggggagcgctctaatatcgtggatctgctgtttgtaaaggatctcgcatttgtcgacccagatgactgcacgccgcttaaaacaatcacaaaattctataatcacccactacactttgtctttaatgacaccaaactcgacgctatgctggaagagttcaagaaaggcaagagccaccttgctatcgtgcagcgcgtaaacaatgagggagaaggcgaccccttttacgaggtgttaggcattgtcacccttgaggatgtgattgaggaaatcatcaagtccgagattctggacgagacagacctgtatacagataaccgaactaagaaaaaagtggcacaccgcgagaggaagcaagattttagtgcatttaagcagactgactctgaaatgaaagtaaagatatccccacaactgctgctcgccatgcacctagtattcatttcgatagaagtggaggccttctccccttcccagatgtccgagaagattcttctcagattattgaaacaccccaatgttatccaggaattaaaatatgatgagaagaataaaaaagcccccgagtattacctttaccagcgtaacaagcccgttgattattttgtgttgattctgcagggcaaagtcgaagtggaggctgggaaggaggggatgaagttcgaagctagcgccttcagttactatggcgttatggcgctcacggcatcacctgtgcctctgtccctttcaaggacctttgtggtttccagaacggagctgctcgccgccggctcacctggggaaaacaaatcacccccacgaccttgcggcctcaaccactccgattctttgtcccgctccgatcgtatagatgcggtaacccccacactcggctcttctaacaaccaactaaacagctctctactgcaggtgtatataccggactatagtgtgcgggcgctcagcgacttgcagttcgtcaaaatatctcggcaacaataccaaaacgcactcatggcatcccgaatggacaagacacctcaatcctcggactcagagaacacaaaaattgagttgaccctgactgaattgcacgacggcctcccagatgagacagctaatctgttaaatgagcaaaattgtgtgacccattccaaggctaatcactccctgcataacgagggcgcaatctag

SEQ ID NO: 184221 - DNA, 1725 bp, synthetic construct
  misc_feature 1..1725: note = Description of Artificial Sequence: Synthetic coding sequence
  source 1..1725: mol_type = other DNA
atgatcggctgcggcgcctgcgagcccaaggtgaagatggccggcggccaggcggccgccgcactgcccacgtggaagatggccgcgcgaaggagtctcagcgctcggggacgcggtattctgcaggcagcagctggacgcctccttccactcttgctgctctcctgttgttgcggggctggcggatgtgctgctgtgggggagaatgaggaaacagtcatcatcggcctaagactagaagatacaaacgacgtctcttttatggagggcggtgccctacgagtgtcagaacggacccgagtgaaactgcgggtgtatggtcaaaatataaacaacgagacttggtcacgcattgccttcactgaacacgagcggcgccgccactcccccggggaaaggggcctgggcggacctgcacccccagagccagattccgggcctcaacggtgcgggatccgcacaagtgatatcattatcctgccgcatattattttgaataggaggaccagtggtatcatcgaaatcgaaatcaagcccctgcgcaagatggagaagagcaagtcttattatctgtgcacatccctgtcaacacccgcactgggggccggcgggagtggatctacggggggtgctgtggggggcaagggaggcagcggagtcgccgggttgccaccaccaccgtgggctgagacgacttggatttaccatgatggagaggacactaaaatgatcgtcggagaggagaagaagtttcttctgcctttctggcttcaggtaatctttatcagcctgctgctctgtctgtccggcatgttttccggactgaatttgggcttgatggccctagatcctatggagctccggattgttcaaaactgcggcactgaaaaagagaagaattatgccaaaaggatagagccggtgaggcggcagggaaattatctgctgtgcagtcttttactgggtaacgttcttgtcaatacaaccctgactatactgttagatgacatagccggttccggactggtcgccgtggtggtcagcaccatcggtattgttatttttggcgaaatcgtgccacaagccatttgcagtcggcacgggctggcagtgggagctaacacaatcttcctcacaaagttcttcatgatgatgacttttccagcgagctaccctgttagtaagctgttggattgcgttctgggacaagaaatcgggaccgtatacaatagagagaaactgctcgagatgctgcgcgtgaccgacccttacaacgaccttgtcaaggaggagctgaatatcatccagggagccctggaactccgcacaaaaactgtcgaagacgtaatgacccctctacgcgactgctttatgatcaccggagaagcaattcttgattttaataccatgagcgaaataatggaatcaggttacactagaatccccgtgttcgagggtgaacgttctaacatcgtcgacttgctgttcgtaaaggatctcgcgtttgtggatcctgatgattgtacaccactcaagactattacgaaattttacaaccacccactgcactttgtttttaatgatacaaagttagatgctatgctcgaagagtttaaaaaggagcatactaataagaagcctaagtcgtatcagcattgtaacgagcaaaactgcgtcactcacagcaaagccaaccactccctccacaatgaaggggctatttag

SEQ ID NO: 184222 - DNA, 2124 bp, synthetic construct
  misc_feature 1..2124: note = Description of Artificial Sequence: Synthetic coding sequence
  source 1..2124: mol_type = other DNA
atggccgccgccgtggccgccgccggccggctgggctggctgttcgccgctctatgcctgggtaacgcagccggcgaggcggcacctggccctcgggtgttagggttttgcctggaagaagacggggcagccggcgccgggtgggtccgcgggggcgcagccagggatacgcctgatgccacctttctgcttcggctgtttggccctggattcgccaacagttcctggagctgggttgctcctgagggggccggctgcagggaagaagccgcatctcccgccggcgagtggagagcgctgctgcggctaaggctaagagcagaggcagtgcggccacactcggccttgttggccgttagggtcgaaccggggggcggcgccgctgaggaggctgcgcccccctgggctcttgggctgggcgccgctggactcctggctctcgcagcactggcaaggggattacaactgtctgcgttggccctcgcgcccgcagaggtgcaagtgctgagggaaagcggatccgaagcagagagggcggctgcgcggaggctggaacctgcacggaggtgggctggctgtgcattgggcgctttgctgctgctggctagcttagctcaggctgccctggcagtcctgctgtacagagctgctggccaaagggccgttccagccgtgctgggtagcgccggcctggtctttctggtgggcgaagtagtgcctgccgctgtgagcggacgttggacgctggcgctcgcccctcgtgcccttggcttgtcacggctggccgtcttgctgaccttacctgtagccctgcctgtcggacaactacttgaactggcggcccgcccaggaagattgagagaacgcgtgctggagctggctcgcggaggtggcgacccgtacagtgatctcagcaaaggcgtcttacgatgtcggacagtggaggacgtgctcactccccttgaagattgctttatgctagatgccagtacggtcctcgactttggtgtgctggcgtccatcatgcagtccgggcatacacgaattcctgtttacgaggaggaacgttctaacattgtggacatgctatatctcaaagatctggcattcgtcgacccagaggattgtacgccattgtctactattaccaggttttataaccatccgcttcactttgtgttcaacgacacaaaactcgacgctgtgctggaggagttcaaaagggggaagtcccacttggccattgttcagaaggtcaataatgagggcgagggcgaccccttttacgaagtgctgggattggtcaccctcgaggacgtgatcgaagaaatcatcagatcagagattctcgacgagagtgaggactatagagatactgttgtaaaacgaaagcccgcctctcttatggcccccttgaaaagaaaagaggaattttctctcttcaaagtctcagacgacgagtataaggtgaccatttctccccagctactcttggcaacacaacggttcctgtctagagaggtggacgtgttcagtcctcttagaatctctgaaaaggtcttactgcaccttctgaagcatccaagcgttaaccaagaagtgagattcgacgagtcaaaccgcctggccacgcaccactacctctatcaacggtctcagcccgtggactactttatcctaatcctgcagggacgtgttgaggtagagatcggaaaggagggcttgaaatttgagaacggcgctttcacctactatggcgtgagcgcattaaccgtaccgtcaagcgttcaccagagtcctgtgtctagcttgcagcccatacgacacgatttacagcccgatccgggtgatgggacccactcttcagcatactgcccagattacaccgtacgagccctttccgacctccagctgatcaaagtaaccaggctgcagtatctcaacgccctcctcgctactcgagcccagaaccttcctcagtcacccgagaacacagacctgcaggtgatccccggctcgcagacccgcctgctgggggagaagactactactgccgccggctctagccacagcagacccggcgtacccgttgaaggatcaccaggtcgaaacccaggggtttag

SEQ ID NO: 184223 - DNA, 1980 bp, synthetic construct
  misc_feature 1..1980: note = Description of Artificial Sequence: Synthetic coding sequence
  source 1..1980: mol_type = other DNA
atggccgccgccgtggccgccgccggccggctgggctggctgttcgccgctctctgcctgggcaacgcagcaggcgaggcagcccccgggccaagagtcttgggcttttgccttgaggaggatggcgcggccggggctggctgggtgcgggggggggcagcccgggatacacctgacgccaccttcttactccggttattcgggccagggttcgctaattctagttggagttgggtcgcacccgaaggggccggctgtagggaggaggccgcctcacctgccggcgagtggcgtgccttgctgcgcttacggttgcgggctgaggcggtcaggcctcattcagccttactagccgtgcgtgtcgagccaggcggcggggccgctgaggaggcagcccccccatgggccctcggattgggcgcagccggccttctggctctggccgctcttgctcgaggccttcagctttccgccttggccttggcacccgccgaggtccaggtgctcagggaaagtggaagtgaagctgaacgcgccgcagcacgcagactggagcctgcccgacgctgggcgggctgcgcccttggtgccttgctcctgctcgcaagccttgcccaggcagcgctcgcagtcctcctatacagagcagctgggcaacgggccgtccctgccgttcttggtagcgctgggctggtgttcctcgtgggggaggtggtgccggccgccgtgtccggccgctggacacttgccctcgccccaagggcattgggattgagcagactggcagttttgctgacgctgccggtcgccttgcccgtgggccagctgctcgaactggctgccaggccaggccgcctgagggagcgggtcctagaattggcccggggtggcggggacccttactccgatctaagcaaaggcgtcctgcggtgcagaaccgtagaggacgtactaacccctctggaggattgctttatgctggatgcctccacagtcttggactttggtgtgttggcaagcattatgcaaagtggacacacccggatacccgtttacgaggaggaaaggtctaatatagtggacatgttatatctgaaagacctggcctttgtggacccagaggactgcacaccgctttccacgatcacacgtttctacaaccacccccttcactttgtgtttaacgacaccaagctcgacgccgtgctcgaggaatttaagcggggtgacacagtggtaaaacgaaaacccgcgagcctgatggcccccctcaaaaggaaggaagagttttctctgtttaaggtgagtgacgatgagtataaggtcaccatttccccccagttgttgctggctactcagaggtttctatcgcgggaggtggacgtattttctcctctgcgaatctccgaaaaagttctgctccatcttctcaagcatccgagcgtgaatcaggaggtccgattcgacgaatcgaacagactggccacccaccattacctctaccagcgaagccagcccgtagactactttatactcattctacagggtagggttgaagtggaaatcggtaaagagggactcaagttcgagaatggcgcttttacctattacggcgtttccgcgcttactgtgccttccagcgtccaccagagccccgtatcctccctgcagcccattaggcacgatttgcagccagatcccggggatgggactcattccagtgcttactgccccgactatactgtgagagctctttcagatctacagctgatcaaggtgacgaggctacaatatttgaacgcgctgttggctacacgcgcccaaaaccttccccaaagcccagagaacactgacctccaggttatcccgggatcccagacccggttactcggggagaagactaccaccgcggccgggagctcccacagtcggcctggggtgccagtggaagggtcaccggggaggaaccccggcgtgtag

SEQ ID NO: 184224 - DNA, 2043 bp, synthetic construct
  misc_feature 1..2043: note = Description of Artificial Sequence: Synthetic coding sequence
  source 1..2043: mol_type = other DNA
atggccgccgccgtggccgccgccggccggctgggctggctgttcgccgcattatgcctggggaacgcagctggagaggccgccccagggccaagggtcttgggattttgtctcgaggaggatggcgcggctggcgcagggtgggttagggggggcgctgctcgagatacccctgacgctactttcctgctaagactgttcggtcccggctttgccaattcatcctggagttgggtcgcccccgagggtgctgggtgcagggaggaagccgccagccctgctggggaatggcgggctctcctgcggttacgacttcgcgccgaggccgtgaggccccattcagctcttctagctgtgagggttgagcctggaggaggcgctgccgaggaagccgctcccccctgggcacttggtctcggcgcagcaggtcttctcgctctggccgccttggcgagaggactgcagctgtccgctctggcacttgcccctgccgaagtccaggtgctccgggagagcggcagcgaagcagagagagctgccgcccggagactggagccagccagacggtgggccgggtgcgcactgggcgccctactactgctggcctccctggctcaggccgctctcgctgtcctgctctatcgcgcggctggacagcgggcagtgcctgccgtcttgggttctgccggcctcgtgtttctggtgggagaggttgtacctgcagctgtgagcggaagatggaccctggcactcgcccctagggccctcggactgtcccgactggccgttctcctcactttgccggtggccctgccagttggtcagctcttggagctagcagctcgaccaggtcgcctgagagaacgggttctcgagctcgcaagaggtggaggcgacccctactccgacttgtcgaagggagtgctgcgttgtagaaccgtagaggatgtgttgaccccgctcgaagattgtttcatgctagatgcatccactgtgctggatttcggggttcttgcttccattatgcagtccggtcacactcgtatccctgtgtacgaggaggaaaggagcaatatcgtggacatgttgtacctcaaggatctcgctttcgtcgatccagaggattgcaccccactgtctaccatcacccggttctataaccaccccttacatttcgtttttaacgatactaagttggatgccgtcctggaagagtttaagcgcggcgatactgtggtaaagaggaaacccgcatctctgatggcacctctgaaaagaaaggaagagtttagcctttttaaagtgagcgatgacgaatataaggtgaccattagcccgcagcttctgctggcgactcagagattcctgtcccgtgaggtggacgtgttctctccgctgcgaatctcagagaaagtgctcttacacttgctaaagcatccttctgtcaatcaggaagtccgctttgatgaaagtaacaggctcgccactcaccactacctgtaccagcgcagtcagcccgttgattacttcatcctgatcctgcaggggcgagtcgaggtcgagataggaaaggaggggctcaagtttgagaatggcgcattcacctattacggggtctctgccctcaccgttccatcctccgttcatcagagccctgtgtcctctctgcagcccatacgccatgacctccaacctgaccctggtgacgggacccattcaagcgcatactgcccagactataccgtgcgggctctttccgacctgcagctgataaaagtgacaagactacaatacctgaacgccctcttggccacgagagcgcaaaatttgccccagagccccgaaaacaccgacctgcaggtaataccaggctcccagactcgccttttaggagagaagaccactaccgcagccggaagctcacattcaagaccatcacttcccctgttgcctagaggccgtgacagcgcggcatactcagactccgatctgttcgggctctcacacttggtctccgctgttacagcctttgtgtggccttag

SEQ ID NO: 184225 - DNA, 2328 bp, synthetic construct
  misc_feature 1..2328: note = Description of Artificial Sequence: Synthetic coding sequence
  source 1..2328: mol_type = other DNA
atggcccccgtgggcggcggcggccggcccgtgggcggccccgcccgcggtcgcctactcctggctgcaccggtgctgctggtcctattgtgggcactgggggcacgcggccagggatctccacaacaagggacgatcgtaggcatgaggctagcctcctgtaataaaagctgcggcaccaacccagacgggattatttttgtttcggagggttctaccgttaatttgaggctgtatgggtattcactggggaatataagctcaaacctgattagtttcaccgaagtcgacgacgccgagacactccacaaatctactagctgcctggaactaaccaaagacctggtggtacaacaattggtgaacgtaagtaggggtaatacatccggggtgctcgtcgttctgacaaaatttctgcgaagatcggagtctatgaaactgtatgccttgtgcactcgagcgcagccagatgggccatggctaaagtggacagataaggatagtctgctttttatggtggaggagccggggcgcttcctgcccctgtggctccacattctcctcattaccgtcctgcttgtgctctcggggattttcagtggtctgaatttagggctgatggcattagaccctatggagttgcgaattgtgcagaattgcggcacggagaaggaacgacgatatgctcgcaagatcgagcctatacggagaaagggtaactatctgctttgttccttgctcctgggcaacgtccttgtcaatacaagcctcacaattctgctggataacctgatcggcagtgggctcatggcggtggcctcttcaaccatcgggattgtcatctttggggaaattctgccccaagcgttgtgctcccgccacggtctggccgtaggcgccaacaccatcttactcacaaagtttttcatgcttctaacattccctcttagttttcctataagcaagctgctggacttctttttagggcaagaaatccgcaccgtgtacaatcgcgagaagctcatggagatgctgaaggtgaccgaaccctacaatgacctcgtaaaagaagagcttaacatgattcaaggcgcccttgaactgcggactaagaccgtggaggacattatgacacagcttcaggactgtttcatgatacgctccgatgccatcctggactttaatactatgagtgagatcatggaaagtgggtacacccggatccccgtcttcgaggatgaacagtctaatatagtggacatcctgtatgttaaagatctcgcatttgttgacccagatgattgtacgccactgaaaacaattactaggttctacaatcacccagtacatttcgtcttccatgacacaaaactcgacgctatgctggaagaattcaaaaaaggcaagagccatctggccatcgtccagaaagtgaacaatgagggcgagggcgacccattctacgaagtgctgggccttgtgacccttgaagacgtaatcgaagagatcatcaagtctgagatcttagatgaatccgacatgtatactgataaccgctccaggaaaagggttagtgaaaagaataaacgggatttttccgccttcaaagacgctgataacgagctgaaggtgaagatcagtcctcagttgcttcttgcggcccaccgctttctagctaccgaggtgtcccagttttcaccatcactgattagcgagaagatcctcctccggctgctgaaataccccgacgtaatccaagaactgaagtttgatgaacataacaagtactatgcccggcactacttgtatacaaggaataaaccagccgactactttattctcatcctacaggggaaagtggaagtcgaagccgggaaggagaacatgaagtttgaaacaggggcctttagctattatgggaccatggccctgaccagcgttcccagcgaccgtagcccagcccaccctacacccctcagccgtagtgcttccttaagttatcctgatagaactgacgtgtctactgcggcgacccttgctgggtcctctaatcagtttgggtcctccgttctcggacagtatataagcgatttcagcgtaagggccctggttgacttgcagtacatcaagatcactcggcagcagtatcagaacgggctcctcgcatcccgaatggaaaactctcctcagtttcctattgacggatgcacaacccatatggagaaccttgccgagaagagtgaattgccagtcgtggacgaaacaaccaccctcttgaacgagagaaactcactgctgcacaaagcctcccacgagaatgccatctag

SEQ ID NO: 184226 - DNA, 792 bp, synthetic construct
  misc_feature 1..792: note = Description of Artificial Sequence: Synthetic coding sequence
  source 1..792: mol_type = other DNA
atgtacaccgacaaccggagccggaagcgggtgagcgagaagaacaagagggacttctccgccttcaaagacgccgacaacgaattgaaggtcaaaatcagccctcagttactgctggccgcacacaggtttctcgcaacggaggtatcccaattcagtcctagtctaatcagtgaaaagattctgctgcgtctcctgaagtacccagatgtgatccaggagctgaagtttgacgaacataataagtattatgcacggcactacttgtataccaggaataaacccgctgactattttattctcattcttcagggtaaggtagaagtggaggctgggaaagaaaacatgaagtttgaaactggcgcattctcttactacggaacaatggccttgacttcagtgcccagcgacagaagtcctgctcacccgacacctctcagcaggagtgcctcgttatcataccccgatcgaacggacgtaagcactgccgctacactggctggcagctcaaatcagtttggttctagcgtgcttggccagtatatatctgacttctctgtccgcgcgctggtcgatctgcagtatatcaagccacagtcttggccctgcttttcccgtccgggagacagagtctgtcttccagcccccccatccatgaacagcagtttacctcatgccgatcactctgccgcagtccctgagagagcggccggattttcacatggtgaacagcccagtgtttctcatcgtagggtccatcatccgcacggcgagctgggaagagaagtttag

SEQ ID NO: 184227 - DNA, 2193 bp, synthetic construct
  misc_feature 1..2193: note = Description of Artificial Sequence: Synthetic coding sequence
  source 1..2193: mol_type = other DNA
atggccagcggccggggcgccagcagccggtggttcttcacccgggaacagctggaaaacacaccaagcagacggtgtggggtggaagccgacaaggaactgagctgccggcagcaggccgccaacctgatccaagaaatgggccaaaggctgaacgtctcacagcttacaattaatacagccatcgtttatatgcaccggttttacatgcaccacagtttcacaaagttcaacaagaatatcattagctccactgcgctattcctcgcagctaaggttgaggaacaggcgcgcaagctggagcacgtaataaaagtggctcacgcctgtcttcacccactcgagccgctgctagataccaagtgtgacgcctaccttcaacaaactcaggaattggtaatactcgagacaatcatgctgcagaccctgggatttgaaatcaccatcgagcacccacatactgacgtggtaaagtgtactcagcttgtgcgcgcatcgaaagatttggcacagaccagctacttcatggccacaaatagcctacaccttaccaccttttgtctgcagtataaacctactgtcatcgcatgtgtctgtatacacttggcctgtaagtggtcaaactgggaaatccccgtgtccacggatggcaagcactggtgggaatatgtcgatccaacggtgacgctggagcttctagacgagctgactcatgagtttcttcaaatcctggagaagactccgaatcgcttaaagaaaatacgcaactggagagctaatcaggctgcccgcaagccaaaggtcgatggacaggtcagcgagacaccacttctgggtagcagcttagtacagaactctatccttgttgactcagtgaccggcgtgcctaccaatccgtctttccagaagcctagtacttcggcttttcccgcacctgtccctctgaactccggtaacatcagcgtccaggatagtcatacctccgacaatttatccatgctcgcgactggcatgcccagcacatcatatgggctttccagccaccaggagtggcctcaacaccaggactctgcacggacggaacagttgtactcacagaagcaggaaacttctctctccggttcccagtacaacataaatttccaacagggtccatcgatttccctccactccggcctgcatcaccgaccagacaaaatcagtgatcacagctccgttaagcaagaatatacacacaaagcaggcagcagcaagcaccatggacctattagcaccacaccgggcattattcctcagaagatgagtctggataaatatcgcgaaaagaggaagctagagaccttggatttggacgtgagggatcattatatcgctgcacaagtcgagcagcagcataagcagggtcagtcccaagccgccagtagtagctctgtgaccagtccgattaagatgaagattcctatcgcgaatactgaaaagtacatggcagacaaaaaggagaagtccgggtccctcaaattacgcatcccaatcccgcccactgacaagtctgcctcgaaagaagaactcaaaatgaaaatcaaggtgagctctagcgaacgtcactcctcttcagatgaggggtcagggaagagtaaacacagcagcccacacatctcaagggatcacaaggaaaaacacaaagaacatccctcctcccgccatcacacgtccagccataaacattctcatagccattccggaagctcttctggaggctcaaagcatagtgccgatggcataccccccacagttctgagaagtcccgtcggcctgtcgtccgacggtatctcctccagctcgtctagttcccgaaaaagactgcacgtgaatgacgcttcccacaaccaccacagcaagatgtccaagtccagcaagagcagcggaagtagctcaagcagttcatcatccgtgaagcaatatatctcctctcacaactctgtgttcaaccatcccctgcctccgcccccacccgttacatatcaggttggttacggacacctctccacccttgtgaaactggacaagaaacccgtggagacaaacggtcccgatgctaatcacgagtactctacttcctcacagcatatggactataaggacaccttcgacatgctcgactcccttttgagcgctcagggcatgaatatgtag

SEQ ID NO: 184228 - DNA, 1992 bp, synthetic construct
  misc_feature 1..1992: note = Description of Artificial Sequence: Synthetic coding sequence
  source 1..1992: mol_type = other DNA
atggccagcggccggggcgccagcagccggtggttcttcacccgggagcagctcgaaaatacccccagccgcaggtgcggcgtagaagccgacaaagagctctcgtgccgccagcaggccgcaaacctcatccaggagatggggcaacggctcaatgtcagccaactgacaattaacacagcaattgtgtacatgcacaggttttacatgcatcacagttttacaaaatttaataagaacatcatctcatccacggcgctgtttttggccgcaaaggtcgaggagcaggcccggaaacttgagcacgtgatcaaagtggctcatgcctgcctgcacccacttgaaccgctcctcgacactaaatgcgacgcatacctccagcagacacaggagcttgttatccttgaaacaattatgctgcagacactcgggtttgagatcaccatagagcatccccacactgacgtagtaaaatgtacccagttggtgcgtgcgagcaaggacctcgcccagacatcctatttcatggcgacaaacagcctgcacctcacaactttttgtctgcagtacaagccgacagtaatcgcatgcgtctgtatccatttggcctgcaagtggtctaattgggagattcctgtgtccactgatggaaagcactggtgggaatacgtggacccaaccgtaaccctcgagctgcttgacgagctcacacatgagttcttacagattctcgagaagacgcccaacaggctgaagaagatcagaaattggcgcgctaaccaggccgccaggaagccaaaggttgacggtcaagtcagtgaaacgcccttgctcggtagttcactggtgcagaatagcattttagtggatagtgtgactggggttcccacgaacccgtctttccagaagccatctacatcagcctttcctgcacccgtcccccttaatagtgggaatatctccgtgcaggactcacatacttccgacaacctgtccatgctggccaccggaatgccctctacaagttacggtttaagctcacaccaggaatggccgcagcaccaggacagcgcccgaacagaacagctgtacagccagaaacaagagacgtctctctccggttcgcaatacaatattaacttccaacaggggcccagcatttcgttacactccggtctgcatcaccgccccgacaagatctcggaccattcttccgtgaaacaagagtacacgcacaaggctggctctagtaagcatcacggtcccattagcaccacccccggcattatcccacagaagatgtcacttgataagtacagagaaaagagaaaactggagacactggatttagatgtccgagatcattacatcgctgcacaggtagagcagcaacacaaacagggacagagccaggccgcgtctagcagctctgtcactagtcccattaagatgaagattcctatcgccaacaccgagaagtatatggccgataaaaaggagaaaagcggctcactcaaacttcgaatacccatccctccaaccgataagagtgcgtcaaaggaagaattgaagatgaaaattaaggtaagttcatctgaaagacactctagttcagatgaaggaagtggcaagtcaaagcactccagcccccatatctccagagaccacaaggaaaagcacaaggagcatccatcttctcgacatcatacctcttctcataagcactcgcacagccatagtgggagctccagtggaggctcaaagcacagtgcggatggcatacctcccacagttctgaggtctcccgtgggtctgtcttccgatgggatttcttcgtcctcctcctcgagccgtaagcggctacatgtgaacgatgcctcgcacaatcatcattcaaagatgtccaagagcagcaaaagctctgggggtcttaggacctcacagcaccctcgagaaaccggacaggaggcatctggcgaccaacgatcctag

SEQ ID NO: 184229 - DNA, 1467 bp, synthetic construct
  misc_feature 1..1467: note = Description of Artificial Sequence: Synthetic coding sequence
  source 1..1467: mol_type = other DNA
atggccaccaacagcctgcacctgaccaccttctgcctgcagtacaagcctacagtgattgcatgtgtgtgtatacatctggcgtgtaagtggtccaactgggagattcccgtgtctaccgatggaaagcactggtgggagtacgtagacccaacggtgaccctggaactgctcgacgagctgacgcacgaattcctgcaaattcttgaaaagactcccaatcggctgaaaaagatccgcaactggagagccaaccaagcggcccgcaaaccaaaagttgatggccaagtatccgagacgccactgttgggtagcagtctggtccagaattccattctggtggactcggtcaccggcgttccaactaatccatcttttcagaagccaagcacaagcgcgtttcccgcgccagtgcccctcaattcaggaaacatttccgttcaagactcgcatacttccgataatctatcgatgctagctacaggcatgcctagtacaagctacggtctgtcttcccaccaggagtggccacagcatcaggactcggccagaactgagcagctgtacagccagaaacaggaaacctcactaagcgggtcacagtataatattaatttccagcagggaccctccatcagcctccactccggcctgcaccacaggccggacaaaatctctgaccactctagtgtcaagcaggagtacacccacaaggccgggtcttctaagcatcatggaccaataagcacaacacccggcataataccacagaaaatgagccttgacaagtatagggaaaagcggaagctcgaaacactggatctagacgtcagggatcactacattgccgcccaagtcgagcagcagcataaacagggccagtcccaggctgccagctctagcagcgtgacgtctcctatcaagatgaagatccccatcgctaataccgaaaaatacatggcagataagaaagagaagtcgggtagtctgaaactgcggattcccatacctcccactgataaatccgccagtaaagaggaactcaaaatgaagatcaaggtctcgtcatctgagcgccactcaagcagtgatgagggatctggaaaaagcaagcactcctctccacacatatccagggaccacaaggagaagcacaaggagcatccctcctccaggcaccacacatcttcacacaaacattcccattcccacagcgggagcagcagcggcgggtctaaacattccgcggatggaatccctcccaccgtcttgaggtctcccgtggggctgagtagcgacggcatctcaagcagctcctcatcctcacggaagaggctacacgtcaatgatgcgagccacaatcaccattcaaaaatgagcaaaagctccaagtccagtgggggcctaaggaccagccagcatccgcgggaaacaggccaggaagcatcaggtgatcagagaagctag

SEQ ID NO: 184230 - DNA, 864 bp, synthetic construct
  misc_feature 1..864: note = Description of Artificial Sequence: Synthetic coding sequence
  source 1..864: mol_type = other DNA
atggagttcaaccccagcgaccacccccgggccagcaccatcttcctgtctaaaagccagaccgatgtccgcgaaaaacgcaaatctctgttcattaatcaccaccccccagggcagatagcaagaaaatatagttcctgttcgaccatcttcctggacgactctaccgtatcccaacccaatctcaaatacacaatcaagtgcgttgcccttgctatctactaccacatcaagaatcgggatcccgacggccggatgcttttggatatttttgatgaaaatctgcacccattatccaagagcgaggtcccgccggattatgacaagcacaacccggaacagaaacaaatataccggtttgtgaggaccctgttctctgcggctcagcttaccgcagagtgcgcaattgtgactcttgtttatcttgagcgcctactcacctatgccgagatcgacatttgccctgcgaactggaaacgaatcgtgctaggggccatactgctcgcttcaaaggtatgggatgaccaggcagtatggaacgtcgattactgccaaatacttaaggacataacagtggaggatatgaatgagttggaaaggcagtttctggagctgctgcaattcaacataaacgtgccgtccagtgtatacgccaagtactacttcgatctgaggagtctcgccgaagccaacaacctttcgtttcccttagaacccctgtctagggaaagagctcacaagctagaagccatcagtcgcctgtgcgaagataagtacaaggacctaagacggtcagcccgaaagaggtcagcgtccgctgataatttgacacttccgagatggtctcctgcgattattagctag

SEQ ID NO: 184231 - DNA, 951 bp, synthetic construct
  misc_feature 1..951: note = Description of Artificial Sequence: Synthetic coding sequence
  source 1..951: mol_type = other DNA
atgggcaacaccaccagctgctgcgtgagcagcagccccaagctgagacgcaacgcacacagcagactggagtcctatagacccgacacggatctgtctcgggaggatactggatgcaacctccagcacatttctgacagagaaaacattgatgtgcgtgaaaaacggaagtccctgtttataaaccaccatccacctggccagatcgcacggaagtactcctcttgttccacgattttcctcgatgattccactgtgtcacagcctaaccttaaatataccattaagtgcgtggccctcgctatctactatcatattaagaatagggaccctgacgggcgcatgctgctggacatcttcgatgagaacctgcaccccctgtctaagtccgaagttcctccagactatgacaaacacaacccagagcagaaacagatctataggttcgtgcgaacacttttcagcgcagcccaactgactgcagagtgtgcaattgtgacactagtgtacctggaaaggttactcacctatgcagagatcgatatatgcccggcaaactggaaacgtatagtgctgggcgccattctcctcgccagcaaggtgtgggatgatcaggcagtatggaatgtggactattgtcagattttgaaggatataactgttgaggacatgaatgagctagagagacaatttctggagctgctgcagttcaatattaatgttcccagcagcgtgtatgctaagtattatttcgacctgcgctccttggccgaggccaataatctctctttcccactggaaccgctgtcccgtgaacgcgcccataagctggaagccatctctcggctgtgcgaggacaagtataaggatcttaggcgcagtgcacgtaagcggtccgcatcagccgacaacctgacattaccaagatggagccccgcgattatttcctag

SEQ ID NO: 184232 - DNA, 1026 bp, synthetic construct
  misc_feature 1..1026: note = Description of Artificial Sequence: Synthetic coding sequence
  source 1..1026: mol_type = other DNA
atgggcaacaccaccagctgctgcgtgagcagcagccccaagctgcgccgaaacgcgcattctcgtctcgagtcttacagacctgatacagacctaagtagagaggacacgggttgtaatctccagcatatatcagatcgcgaaaatattgacgatttgaatatggaatttaatccgtccgatcacccacgcgcgtctacaatatttctctcaaaatcacagactgacgtccgcgaaaaaaggaagtccctgttcattaatcatcatcctcctggccagatcgcacgaaagtatagcagctgttccaccatcttcctagacgatagcaccgtgagccagcccaacctcaagtacactattaaatgtgtcgccctagctatctattatcacattaagaaccgcgatcctgatggacgcatgctgctggatatttttgatgagaacttgcatcccctgtcaaaatcagaggtgcccccggattatgataaacacaaccctgaacaaaaacagatctacagatttgtgagaacgctgttttctgctgcgcagctgacggcagagtgcgccatcgtgactttggtgtatcttgaacgcttactcacgtatgccgagattgacatctgccctgccaactggaagcgcattgtgctgggcgctattctcctagcaagcaaggtatgggacgaccaggcggtgtggaatgtggattactgccagatcctgaaggatattacagtggaagatatgaacgagcttgagcgccaatttctagagttgttgcagtttaatattaacgtgccgtctagcgtctatgcaaagtactatttcgatttacggtcactcgccgaagccaataatctgagtttccctctggagccactcagtcgggagcgggcccacaaactggaggcaattagcagactgtgcgaggataaatataaggatctgcgaagaagcgcgcgcaagaggagcgcctctgccgacaacctgactctcccgcgctggtcccctgccattatctcttag

SEQ ID NO: 184233 - DNA, 864 bp, synthetic construct
  misc_feature 1..864: note = Description of Artificial Sequence: Synthetic coding sequence
  source 1..864: mol_type = other DNA
atggagttcaaccccagcgaccacccccgggccagcaccatcttcctgtccaaaagtcaaactgacgtccgggagaagcggaaatccttattcataaatcaccacccacctggccagatagcacggaaatactcaagttgtagcacaatttttctggatgactcaacagtgtctcaacctaatctgaagtacaccataaaatgtgttgctttagccatctactaccacatcaagaatagggatcccgacggcagaatgctccttgatattttcgatgagaacctgcaccccctgagcaagagtgaggtgccgccagattatgacaagcacaaccctgagcagaaacagatctaccgctttgtgagaacactgttctccgccgcccagctcaccgctgagtgtgcgatagtgactttagtttacctggagaggctcttgacgtacgccgaaattgacatctgtcctgcaaattggaaacggatcgtcctgggggctatcctactggcctcgaaggtgtgggatgaccaggcggtgtggaatgtagactactgccaaatcctgaaggatattactgttgaggacatgaatgaactagagcgacagttcctcgagctactgcaatttaacattaatgtgccttcctccgtctacgccaagtattattttgacttaaggtccctcgccgaggcaaacaacctctcttttccactcgagccattatccagagaaagggctcataagctggaggccatcagtcggttatgcgaagacaagtacaaggatttgcggaggagcgcacgcaaacggtcagcttcagccgacaatctgacactgcctaggtggtctcctgccattatctcctag

SEQ ID NO: 184234 - DNA, 627 bp, synthetic construct
  misc_feature 1..627: note = Description of Artificial Sequence: Synthetic coding sequence
  source 1..627: mol_type = other DNA
atggaccccgacggccggatgctgctggacatcttcgacgagaacctccacccactcagcaagagtgaagtgccccctgattacgacaaacacaaccccgaacaaaagcagatttatagattcgttaggacattgttcagtgctgcccagctgacagctgagtgcgccatcgtgacccttgtttaccttgaaagattgcttacatatgccgaaattgacatctgcccagcaaactggaaacgcattgtcctcggcgccatcctcctcgcgtccaaagtgtgggatgaccaagccgtatggaacgtcgactactgccagatactcaaagatatcactgtggaggatatgaacgagttagagagacagtttctggagctcctgcagtttaacatcaatgtacctagtagtgtgtacgccaaatattacttcgacctcaggtcgctggcagaagctaataatctcagttttccactggaaccattatccagagaacgagctcataagcttgaggctatctctcgactctgcgaagacaaatataaggacctgcgacggagcgcccgtaagcgaagtgcctcggcagataacctcaccctgcccaggtggtctccagcaattatttcatag

SEQ ID NO: 184235 - DNA, 1026 bp, synthetic construct
  misc_feature 1..1026: note = Description of Artificial Sequence: Synthetic coding sequence
  source 1..1026: mol_type = other DNA
atgggcaacaccaccagctgctgcgtgagcagcagccccaagctgcggcgcaacgcgcactcaaggctcgaatcctatcgcccagatactgacctcagccgggaggatacaggttgcaatcttcagcacatatctgatcgagagaacatcgacgatttgaacatggaatttaacccgtcagatcatcctagggcctctactatcttccttagcaagtcccagacagatgtgagggagaagcggaaatcgctcttcatcaatcatcacccacccggacagatagccaggaagtactcaagctgcagcacgatatttttagatgattccaccgtatcccaaccaaatctcaagtacaccattaagtgcgtcgccttggccatatactatcacattaaaaatcgggatccagatggcaggatgcttctcgatatctttgacgagaatcttcaccccctgtctaaatccgaggtgcctcccgattatgataaacataaccctgaacagaaacagatttaccggttcgttaggactctcttctccgccgcccagctgacagcagagtgtgctatcgtgactctcgtttatctggaaagactgcttacatatgcagaaatcgatatctgtccagctaattggaaacgaattgttttgggcgctattctgctcgccagcaaagtgtgggacgatcaagcggtctggaacgtggactactgccagattttaaaggatatcaccgtggaggatatgaatgagctggaacgccaattcctcgagctgctccaatttaacatcaacgtgcctagttccgtctacgcaaaatattactttgatctccggtctttggccgaggccaacaacctgtccttcccactcgaacccttgagtcgcgagcgggctcataagcttgaagcgatttctaggttatgtgaagacaagtataaggatctgcgaaggtcagctcggaaaaggtccgccagtgcagataacctgactcttccccgctggagccccgccatcatctcatag

SEQ ID NO: 184236 - DNA, 942 bp, synthetic construct
  misc_feature 1..942: note = Description of Artificial Sequence: Synthetic coding sequence
  source 1..942: mol_type = other DNA
atggagcccatgtaccaggaccgggcccgggacacccagaccgacgaaatagtggctctgaaaaaggtgcggatggataaggagaaagatgggattccaatctcctcattgagagaaatcacactgttactgcgccttaggcatccaaacatcgtggagctcaaggaagtggtggtgggaaatcatcttgaatccatattcctcgtcatgggctattgcgaacaagacttggcaagcctgcttgaaaatatgcccaccccttttagcgaagcacaggtaaagtgtattgtcctgcaggttctccgcggactgcaatatttacacaggaactttattattcaccgcgatctgaaggtgtccaatttgcttatgaccgataagggttgcgttaaaacggctgattttggcctagcacgcgcatatggcgtcccggtcaagcccatgacacccaaagttgtaacgctgtggtaccgtgctccggaactcctgttaggcactacaactcagaccaccagcatcgacatgtgggccgtgggatgcattctggccgagctgctggcccatcgtccactccttccaggcacttccgaaattcaccaaattgatctgatcgttcagctgttaggtaccccttctgaaaatatatggccaggctttagtaaactcccactcgtaggtcaatacagcttgagaaaacagccctataataatctgaagcataaatttccatggttgagtgaggcagggctgagactgttacactttttattcatgtacgacccaaaaaagcgcgctacagcaggagattgtttggaatcaagctatttcaaggaaaaacctctgccctgcgaacctgaattaatgcccactttccctcaccacagaaacaaacgggcagcgcctgccacctccgaaggtcaatctaagaggtgcaagccttag

SEQ ID NO: 184237 - DNA, 1083 bp, synthetic construct
  misc_feature 1..1083: note = Description of Artificial Sequence: Synthetic coding sequence
  source 1..1083: mol_type = other DNA
atggccgagcccgacctggagtgcgagcagatccggctgaagtgcatccgcaaggagggattttttacggtgccccctgagcatcggctcggccgttgccggtccgtcaaggaattcgagaagctcaatcgcatcggcgagggcacttacgggatcgtgtacagggccagagacacacagaccgatgagattgtcgcgctgaagaaggttcgcatggataaggaaaaagatggtatacccatttcatccttgcgggaaattactctcctcctgaggctgagacacccaaacatcgtagagcttaaagaagtggtggttgggaaccaccttgagagtatcttcctggtgatggggtactgtgagcaggatctagcctcgcttcttgagaatatgcctacgccgttttctgaggcacaggtaaagtgcatcgttttgcaagtgttgcgaggactgcagtacttgcaccgtaacttcatcattcatagggatcttaaagtaagcaatcttctgatgaccgacaagggatgcgtcaaaaccgccgattttggcctggctcgggcttacggagtgcccgttaaacccatgactcccaaggtggtgaccctgtggtacagggccccagagctgctgctcggaacaacaacccagacaacatcaatagatatgtgggccgtgggatgtattttagccgaactcctggcccaccgacccctgctgcctggcactagcgaaatccaccagatcgatctcatcgtgcaattgctgggtacccccagtgagaacatctggcctggcttttctaagcttcctcttgtgggccagtactcattacgcaagcaaccttataacaacctgaagcacaagttcccttggctgagtgaagctggacttaggttacttcattttttattcatgtacgaccctaagaagcgagctacagccggcgactgcctagaatctagttactttaaagaaaagcctctcccctgtgagccggaactgatgcccacctttccccatcataggaataagagagccgccccagccacgtctgagggccagtccaagagatgcaaaccttag

SEQ ID NO: 184238 - DNA, 819 bp, synthetic construct
  misc_feature 1..819: note = Description of Artificial Sequence: Synthetic coding sequence
  source 1..819: mol_type = other DNA
atggacaaggagaaggacggcatccccatcagcagcctgcgggagatcactctgctgctgcggctgagacatccaaacatcgtcgaactcaaggaggttgttgtaggcaaccaccttgagtcaatctttctggtcatgggctactgcgaacaagatctcgctagtctgttagaaaatatgcctacaccgttcagtgaagctcaggtcaagtgcatagtgttgcaagtcctgcgggggctccagtatctgcacagaaactttatcatacatcgggacctgaaagtgtctaatcttctcatgactgataagggctgtgttaagaccgcagatttcggtctggcccgcgcttatggcgtacccgtgaagcccatgacgcccaaggtggtgaccctttggtacagagctcctgagctgctgctaggtacgaccacgcagacgacctcaattgacatgtgggcggtaggttgcatacttgccgagctcctggcccatagacctctgcttccgggtacctccgaaatccatcagatagaccttatcgtgcagctcctgggaacacccagtgaaaacatctggccaggtttctctaagctccctctggttggacagtactccctgcgcaaacaaccttacaataacctcaaacataagttcccgtggctctccgaggcggggctgagattgttgcacttcttgtttatgtatgatccaaaaaagcgagctaccgctggcgactgcctagagagctcatacttcaaggagaagcctttaagattacccattagtggcgtatgtgaaggctgtagggaacccggatag

SEQ ID NO: 184239 - DNA, 504 bp, synthetic construct
  misc_feature 1..504: note = Description of Artificial Sequence: Synthetic coding sequence
  source 1..504: mol_type = other DNA
atgggcaagaccgaggagaagggcaacggcaagggcgccttccaggagcggaaagggcctttgggagccgtgcgcaaagaggcaggtgcaggtgcccaggacgccggagccgccgagggtgccgcggtgaagaaaatgacctttagcgagcatccctacaacaaccttcgaaaacgtttcggggctctgttgtcggaccagggctttgacctgatgaacaagttcctgacttacttcccaggcaggaggatttccgctgaagacggactgaaacatgaatactttcgagagaccccccttcccattgatccgagcatgtttccaacctggccagcaaagagcgaacaacagcgcgttaaacgcgggacatctccccgcccccccgagggaggactgggatatagccaactgggggacgatgacctgaaggaaactggctttcacctgacaaccacaaatcagggcgcctcagcagccgggcctgggttctccctgaagttttag

SEQ ID NO: 184240 - DNA, 2241 bp, synthetic construct
  misc_feature 1..2241: note = Description of Artificial Sequence: Synthetic coding sequence
  source 1..2241: mol_type = other DNA
atgagccagagcgacgaccgggacagcaagcgggacagcctggaggaaggagagctgagagaccattgcatggagatcacaatccggaactccccctatagacgagaggacagcatggaagatcggggcgaagaggatgactcgctggctataaaacccccccaacagatgtctcgaaaggagaaagtgcaccatagaaaagacgagaaaagaaaggagaaatgccgccaccactcgcacagcgcggagggtggtaagcacgcccgtgtaaaggagcgggagcatgaaaggaggaagaggcacagggaagagcaggacaaggccaggcgtgagtgggagcgtcaaaaacggagagaaatggcaagagaacactcgcgccgggagagagaccgactggagcagttggaacgcaagagagaacgagagcgtaagatgagagagcagcagaaagagcaaagggaacagaaggagagggagagacgcgcagaggagcgtcgcaaagaacgggaagcacgccgggaggtgtctgcccatcatagaactatgcgtgaagattattcagacaaggtcaaggcttcccactggtctaggtccccgccaaggcctcccagagaacgcttcgagcttggagacgggcgtaagcccgtcaaggaagagaaaatggaagaacgcgatctcctgagcgacctgcaggatatcagcgacagcgagcgcaagacttctagcgctgaaagctcctcggccgagtcaggcagtgggtccgaggaggaagaggaggaggaagaagaggaggaagaagaaggaagtacgtcagaagagtcagaggaagaggaggaggaggaagaagaggaggaagaggaaactggcagcaacagcgaagaagcgagtgagcaatcagccgaggaagtgagcgaggaagaaatgtcagaagacgaggagcgagagaatgaaaatcatctgctggtggttcccgagtcacgctttgatcgggacagcggggagagtgaggaggccgaggaggaagtcggcgagggaacccctcagtcgagcgccctgacggaaggcgactacgtcccagactcacccgcattgctccccattgagcttaaacaggagctgccgaaatatttgcctgctctgcaggggtgccgatctgtcgaggagttccaatgtctcaatagaattgaagagggcacgtacggcgtcgtatacagagccaaagataaaaagactgacgaaatagttgctctcaaacggcttaaaatggagaaggaaaaagagggattccctatcacaagcctgagagagatcaacacaattctgaaggcccaacatcccaacattgtgactgttcgagaaatagtggtcggctcaaacatggacaagatctatatagtgatgaattatgtagagcatgatcttaaatccctgatggaaaccatgaagcagccattcttacccggtgaagtgaagactctgatgattcaactcctgagaggagtgaaacatcttcatgataattggatcctacacagagacctgaaaactagcaaccttctgcttagccatgccggaattctgaaagttggggactttgggctggcaagggagtacgggtcgcccctgaaggcttacaccccagtcgtggtcacgcagtggtatcgggccccagagctgcttctgggtgctaaggagtacagcacagcggttgacatgtggtctgtggggtgtatctttggagagctactcacccagaagcccttgttccccggtaacagcgaaatagaccaaatcaacaaggttttcaaagagcttgggacacccagcgagaaaatttggccaggctattctgagctgcccgtggttaaaaagatgacctttagtgagcatccctacaataatctgcgcaaacgattcggcgcccttttgagcgaccaaggattcgacctgatgaacaaatttctcacttacttccccggtaggaggataagtgcggaagatgggctcaagcatgagtactttcgggagacacctctgcctattgacccgagcatgtttcctacatggcccgcaaagagcgagcagcaaagagtgaagcgcggcacaagcccccgaccgccggaggggggactgggctatagtcagctgggcgatgacgacttaaaagagactggtttccacctgacaacaacgaatcaaggagcctcggccgcaggaccaggcttcagccttaaattctag

SEQ ID NO: 184241 - DNA, 2340 bp, synthetic construct
  misc_feature 1..2340: note = Description of Artificial Sequence: Synthetic coding sequence
  source 1..2340: mol_type = other DNA
atgggcgacgagaaggacagctggaaggtgaagaccctggacgagattttgcaggagaagaagaggagaaaggaacaggaggagaaggccgaaatcaagcgactaaagaatagtgacgacagagatagcaaacgcgacagcctagaagagggggagctccgcgaccattgcatggagattacaatccgcaactccccatatcggagagaagactccatggaggacagaggtgaggaagacgacagtcttgctattaagccccctcagcaaatgtcccgaaaggaaaaagtacaccaccgtaaagacgagaagcgcaaagaaaaatggaagcacgcccgggtgaaggagcgggagcacgagcgacgcaagcggcatagagaagagcaagacaaagcgaggcgcgaatgggagaggcagaagagaagagagatggccagggagcatagccgccgcgagcgtgggaatgacggagtttgtctttttagagaccgcctggagcagttagagcgcaagagggagagggaaaggaaaatgagagagcagcagaaggagcaaagagagcaaaaagagagggagaggcgcgccgaggaacgacgtaaggagagagaggcaagaagggaggttagcgctcaccataggaccatgcgcgaagactactctgataaggtcaaggcctcacactggtctagaagtcctccccggcccccccgtgaacgcttcgagttaggcgatggacgtaaaccagttaaagaagagaaaatggaggagcgggatctcttgagcgacctgcaggatatcagcgattctgaacgaaagacaagcagcgccgagagctctagtgctgaaagcggatccggctcagaggaggaggaggaagaagaggaggaggaagaggaggaaggaagcacatccgaggaatccgaagaggaagaagaggaagaggaagaggaagaggaggaaaccgggtccaattctgaggaagcctccgagcagtctgccgaggaagtgtccgaagaggagatgtcagaagatgaagagagagagaatgagaatcacctgctggtggtcccagaaagtagatttgacagggattctggagagtcggaggaggcagaggaagaggtgggcgagggcacccctcagtctagtgccttgacagagggagattacgtgcccgactcacccgcccttcttccaattgagttgaagcaggagctaccaaagtatctgcctgccctccagggatgcaggagcgtcgaggagtttcaatgtctaaacaggattgaagagggaacttatggagtggtgtacagggcgaaggataaaaaaaccgacgagatcgttgctctgaaaagactaaaaatggagaaggaaaaggagggcttccctatcacaagcctgcgcgagattaatacaatcctgaaagcccaacacccaaatattgtgaccgtccgcgagattgttgttggctcaaacatggataagatctacattgtaatgaactacgtggaacacgaccttaaaagcttgatggaaactatgaagcaacccttcctgcctggggaggttaaaaccttgatgattcagctactgagaggggtgaaacatctgcacgacaactggatcttgcatcgcgacctcaagacgtctaacctgctcctgtctcacgcaggcattctgaaagtgggggatttcggtttggctcgcgaatacggcagtccactcaaagcatacactccagtcgtggtcacccagtggtatagggcgccagagcttttgctaggggctaaggaatactcaacagctgtggacatgtggagtgtggggtgtatttttggggaactcttgacccagaaaccccttttcccagggaactctgagattgaccagattaataaagtgtttaaggagctcggcaccccatcggagaagatctggccaggttattctgaattgcccgtcgtcaagaaaatgaccttctccgagcacccgtataataacctgcggaagcgcttcggagcgctgctttccgaccagggattcgacctcatgaacaaattcctcacgtatttccctggtaggagaatttccgctgaggacggcttgaagcatgaatattttcgcgagacacccctgccaatcgatccctccatgttccccacttggcccgctaagagcgagcagcagagagttaaaagaggcacttctccgcgcccacccgaaggcggcttgggctactcccagctaggagatgatgacctgaaagagaccgggtttcatctcacaaccaccaaccaaggcgcttctgctgccggcccgggattcagtctgaagttttag

SEQ ID NO: 184242 - DNA, 2313 bp, synthetic construct
  misc_feature 1..2313: note = Description of Artificial Sequence: Synthetic coding sequence
  source 1..2313: mol_type = other DNA
atgggcgacgagaaggacagctggaaggtgaagaccctggacgagatcctgcaggagaagaaacgccgcaaggagcaggaagaaaaggccgagattaaacgcctgaagaattctgatgatagggactctaagcgggatagtttggaagagggtgagcttagggaccattgcatggagattactattagaaactctccatataggagggaagacagcatggaggatcggggggaggaagacgattcattggctatcaagccaccacagcagatgtcccgcaaggaaaaggttcaccaccggaaggatgagaagaggaaggagaagtggaaacatgcaagagtcaaagagagggaacatgaaaggaggaaacgccaccgggaggaacaagataaggccaggcgcgaatgggagcgccaaaagcgccgcgaaatggccagggaacatagtcgcagggaaagggataggttggagcaactcgaacgcaagagggagagggagagaaaaatgcgggaacagcagaaggaacagcgtgagcagaaagagagggaacgcagagcagaagaacggcgaaaggagcgcgaggcgagacgggaggtctcagctcatcatagaaccatgagagaggattacagtgacaaggtcaaagcgtcgcactggagtaggagccctccgcgcccaccacgagaacgcttcgagctgggagacggacgtaagcctgtgaaggaggaaaagatggaagaaagggatcttttgtccgatcttcaagatatttccgatagcgagagaaagacgtcatccgcagagagtagtagtgccgaaagcggttcgggctccgaagaagaggaggaagaggaggaggaggaggaggaagagggatccaccagcgaggaaagtgaggaagaggaagaggaagaagaggaggaggaagaagaaactggctctaacagtgaggaagcctccgagcaaagtgccgaggaggtgtcagaggaggaaatgtcggaagacgaggaacgcgaaaacgaaaatcacctgctggtggtccctgagtcacgcttcgatagagacagcggcgagtctgaagaggccgaagaagaagtcggggaaggcacgccacagtcctcagctctgaccgagggggactatgtgcctgactctcccgccctcctgccgattgagctgaaacaagaactaccaaagtacctgcctgctctacagggttgtcgtagcgtggaagaatttcagtgtctaaaccgcatagaggaggggacatacggcgtcgtgtatcgggccaaagacaaaaaaaccgacgagatcgtggctcttaaaagactgaaaatggagaaggagaaagaaggcttcccaatcacttctctacgtgaaatcaatacgatcctcaaggctcagcatcctaacatagttacagtcagggaaatcgttgtgggctcaaacatggacaagatttatatagtcatgaactatgttgaacacgatctgaaatctcttatggaaaccatgaaacagccattcctgccaggggaagtcaagactctgatgatccagctgctgaggggcgttaagcacttgcatgacaactggatattgcatcgggaccttaaaaccagtaacctgctgctatcccacgcaggtattctaaaagtgggtgacttcggcctggcaagggagtatggttcccccctgaaggcctacaccccagtggtggttacccagtggtatcgcgccccggagctactgctgggcgccaaggagtactccactgcagtcgatatgtggagcgtgggctgtatcttcggcgagttgctgacccaaaagccactctttcccggtaattctgagattgaccaaatcaacaaagtctttaaggagctcggcacgccttcagaaaagatttggcctggatatagcgagctgcctgtggttaaaaagatgactttctccgagcatccttacaataacttgcgaaagcgctttggcgctctgctctcagatcaaggatttgaccttatgaacaagttcctcacatattttccgggaaggagaattagcgccgaggacggcctgaaacacgaatacttccgtgaaacaccacttcccatagatccaagtatgtttcccacatggccagctaagagtgaacagcaacgggtaaaacgggggaccagtccccggccccctgagggcggactcggctattcccaactgggggacgatgatttgaaggagacaggctttcatttgactacgacaaatcagggagcctccgcagctgggcctgggttttccctaaagttctag

SEQ ID NO: 184243 - DNA, 2241 bp, synthetic construct
  misc_feature 1..2241: note = Description of Artificial Sequence: Synthetic coding sequence
  source 1..2241: mol_type = other DNA
atgagccagagcgacgaccgggacagcaagcgggacagcctggaggagggggagctaagagatcactgtatggagattaccatccgaaactcaccctatcggagggaggatagtatggaagataggggcgaggaggacgactccctggctatcaaacccccccagcagatgtctagaaaagagaaagtgcatcaccgtaaagatgaaaagcgcaaagagaagtgccgacaccattcacattccgccgaaggaggcaagcatgcacgggtcaaggagcgggagcacgagaggcgtaaacggcacagagaagaacaagacaaagcccgcagagaatgggagcgacaaaaacgtagggaaatggctcgggagcactcaaggagagagcgcgacaggcttgagcaattggagcgtaaaagggagcgagaacgaaaaatgcgcgagcaacagaaagaacaacgagagcagaaggagcgggaaaggcgggctgaagagcgacgaaaagagcgagaggctagaagggaggtgtcagcacaccataggacaatgcgagaagattatagtgataaggttaaggcttcacactggagccgctcaccccctcgccctccgagggagcggttcgagttgggtgacggacgaaagccagtaaaagaagagaaaatggaggagcgcgatctcctgtcagacttgcaggatatctctgactctgaaaggaagacttcaagtgccgaaagcagctcagcagagagcgggtccggtagcgaggaggaggaggaagaagaagaggaagaggaggaggagggttcaacatctgaagaaagcgaagaggaggaagaggaagaggaagaggaagaggaagagactggttccaactccgaggaagcatcagaacagtcagcagaggaggtgtccgaggaggaaatgtctgaggatgaagagcgagagaacgagaaccacttactggtcgtgccggagagtcgtttcgatcgggactccggcgagtctgaggaggcagaagaggaggtgggagaaggtacacctcagagtagcgcgctgacagaaggcgattacgtcccagacagccccgccctcttacccatagagcttaagcaggagctcccgaagtatctgccggctctgcagggctgtcgatcggtcgaggaattccagtgtctcaatcggatagaggagggaacgtacggagtggtttatagggccaaagataagaagacagatgaaatcgtcgccctcaagcgcctaaagatggaaaaagagaaagagggttttcccatcacaagcttgcgagagattaataccattctgaaggctcagcaccctaatattgtaactgtgcgggagatcgtcgtgggctcgaatatggataaaatctacattgtgatgaactacgtcgaacacgatctcaaatctctgatggagacaatgaaacagccttttctgccgggagaggtcaagacgctgatgatccagctgcttcggggcgtgaagcatctccacgataattggatcctgcaccgtgacctgaagactagtaacctcttgctgtcccacgccgggattctgaaagtcggagattttggactggcaagagagtatgggagcccactgaaggcgtacactcctgtggtagtgacacagtggtaccgggcccctgagctgctactaggagccaaggaatacagtacagctgttgatatgtggagtgtcgggtgtatatttggtgagctacttacccagaagcccttgtttcccggaaacagcgagatcgatcagattaacaaagtgttcaaagagctggggacaccttccgagaaaatatggcccggatatagcgagttgccagtggtaaagaaaatgacattttccgagcatccatataacaacttgcggaaaaggtttggcgccttgctgagtgatcaaggctttgaccttatgaataaattcctgacctatttccccggccgacgcatatccgcggaagacggccttaaacacgaatactttcgagagaccccgctgcctattgatcccagtatgttcccaacatggccggcaaaatccgagcagcagcgggtgaaacggggtacgtcacctcgcccccctgagggggggctgggatacagccagctaggagatgatgacctgaaagaaaccgggtttcaccttacaaccactaaccagggcgcaagtgccgctggccctgggtttagcctgaagttttag

SEQ ID NO: 184244 - DNA, 2352 bp, synthetic construct
  misc_feature 1..2352: note = Description of Artificial Sequence: Synthetic coding sequence
  source 1..2352: mol_type = other DNA
atgggcgacgagaaggacagctggaaggtgaagaccctggacgagatactccaagaaaaaaagcgtcgcaaagaacaggaggagaaagccgagatcaagagactaaaaaactcggatgatagggacagtaagagggatagtttagaggagggcgaattaagagatcactgcatggaaatcacaatcaggaactcaccttatagaagggaggactctatggaggacagaggggaggaagacgactccctggccataaaaccgcctcagcagatgagtcgcaaggagaaagttcatcatcgcaaggatgaaaaaaggaaagagaagtggaaacacgcccgcgtaaaagaacgggagcacgagcgacgcaagcgacacagagaagaacaggataaggctaggagagagtgggaacgacaaaagaggagggagatggcgcgggaacacagtagacgggaacgggaccgactagagcagctggaaaggaagagagagcgtgagcgaaagatgagggagcagcagaaagagcagagagaacagaaggaacgggaaaggcgggcagaagagcggcggaaggagcgcgaggcaaggagggaggtgtccgctcatcaccgaactatgagagaagactatagcgataaggtgaaagcgtcccactggagtcggagccctccaagacccccccgcgagcgttttgagttaggcgacggcagaaagccaggcgaagctcggccagctcctgcacaaaagccagcccagctgaaggaagaaaagatggaggagagagacctgctttcggacctgcaggatatctcagatagtgaacgcaagacttcttccgcagaatcaagtagcgcagagtccggatcgggatctgaagaggaagaagaggaggaagaggaagaagaagaagaagggtccactagtgaggaaagtgaagaggaggaagaggaggaagaggaagaagaggaggaaaccggctctaacagcgaggaggcctctgagcagagtgccgaggaggttagcgaagaggaaatgtcagaggatgaggagcgcgaaaatgagaaccacctcctcgttgtgcctgaatccaggttcgacagagatagtggagaatccgaggaagccgaagaagaggtgggcgagggaacacctcagagttctgctctgacggagggcgattatgtacccgacagtcccgcgctccttccaatcgaattaaagcaagagctgccaaaataccttccagctcttcaagggtgtcgttccgtcgaggagttccagtgtttaaaccggatagaggaaggtacctacggcgtcgtgtacagagctaaggacaaaaaaaccgacgagatagttgcgcttaaacggctgaaaatggagaaggaaaaggaaggcttccctatcacctcactgagggagatcaacaccatcttgaaagcccagcacccaaacattgtgactgttagagagatcgtcgttggtagtaacatggacaagatttatattgtaatgaactatgtggagcacgatctcaaatctctgatggagaccatgaaacaaccattcctgcccggcgaagtcaagacgctgatgattcagcttctaagaggcgtaaaacatctgcatgataactggatcctgcaccgtgacctcaaaacctcaaacctactgctctctcatgctgggatcctgaaagtgggtgattttggactggcccgcgaatatgggtcccctttgaaagcttacactccagttgtcgtcacccaatggtatcgggctccagagctgctgcttggcgctaaagagtacagcacggcagtggacatgtggagcgtgggttgcattttcggggaactcctgacccagaagcccctcttcccggggaattctgagattgatcaaataaataaggtgttcaaagagttgggaacaccgtcagaaaaaatctggccaggctattcagaattgcctgtggttaagaaaatgaccttctctgagcacccctataataatcttaggaagcgattcggggctctgctttccgaccaggggttcgacttgatgaataaattcctcacatacttcccaggtcgccgaatatccgctgaggacggcctcaagcacgagtacttccgcgaaaccccattgcctatagatccaagcatgtttccaacatggcccgccaagagcgaacagcagcgcgtgaaacgaggtacgtccccccggccacctgaagggggccttgggtattcacagctaggtgatgacgatctgaaggagaccggtttccacctgacaaccacgaatcagggcgcaagcgctgctggtcctggattctcactgaaattctag

SEQ ID NO: 184245 - DNA, 699 bp, synthetic construct
  misc_feature 1..699: note = Description of Artificial Sequence: Synthetic coding sequence
  source 1..699: mol_type = other DNA
atgggcgacgagaaggacagctggaaggtgaagaccctggacgagattctccaggagaagaagcggaggaaggaacaggaagagaaggccgagattaagagattaaaaaatagtgacgatagggactctaaacgagattcccttgaagagggcgaacttagggaccactgcatggaaatcactataaggaacagtccataccggcgtgaagactcaatggaggaccgcggagaagaagatgattcgttggccatcaagccaccccaacagatgtcgcggaaagagaaggtgcaccaccgcaaggatgagaaacgcaaggagaaatggaagcacgcacgcgtgaaggagcgggagcatgagcggcggaagcggcaccgcgaagagcaggataaagctcgaagggagtgggaaagacaaaagcgccgtgagatggcccgggagcattcaaggcgcgaatccgtgtgcacttcacctaatgatgaaaggggcctgcagagacagtccgagtcccagccgctcgaatctcagcccgcatcggccgccgcaggcgctgttagagtggggaggagacctgaggcaagcaagaggcgggagaatgggaggaaaggccccgctgttagattgaccggacaccagcgccagcgcgaagaagaccagctcggtcgagttttggttagtgggatacgcctgagattctag

SEQ ID NO: 184246 - DNA, 2241 bp, synthetic construct
  misc_feature 1..2241: note = Description of Artificial Sequence: Synthetic coding sequence
  source 1..2241: mol_type = other DNA
atgagccagagcgacgaccgggacagcaagcgggacagcctggaggaaggcgaactgcgtgaccactgtatggagatcacaatcagaaacagcccctacaggagggaagattcaatggaggataggggggaagaggacgatagtttggccatcaagccacctcagcagatgtctagaaaggagaaagtgcaccataggaaagatgaaaaaagaaaggagaagtgccgacatcattcacatagcgccgaaggagggaagcatgcccgcgtgaaggagagggaacacgagcgccggaaaaggcatcgtgaggagcaggacaaagctcgcagggaatgggagaggcagaaaagaagggagatggcccgggaacactcacgccgggaacgggatcggttggaacagcttgaaaggaagagagagcgcgaaaggaagatgcgggaacagcagaaggagcagcgggaacaaaaagaacgcgaacgtagagccgaagagagacgtaaggagcgggaggctcggcgggaagtgtccgctcatcaccgaacaatgcgcgaagattactctgacaaggtgaaggcctcccactggagcagatcccctcccagaccacccagggaacgctttgaacttggggacggaaggaagcctgtcaaagaggaaaagatggaggagagagaccttctgtccgatctgcaggatatttctgacagtgaaaggaagaccagcagcgccgaatcaagctcggcagagtcaggctcgggcagcgaggaggaggaggaagaggaagaggaagaggaggaagaaggaagcacttccgaggaaagcgaggaagaggaagaggaggaggaagaagaagaagaagagactggctctaatagtgaagaggcttccgagcagagcgccgaggaggtgagtgaggaggaaatgagtgaggatgaagaacgcgaaaacgaaaatcatctgcttgttgtaccggaaagtaggttcgatagagattctggtgagtccgaggaggcggaggaggaggtgggcgagggtacgccacagtcttccgctctcaccgaaggggattatgtccctgactcacctgccttgctgccgattgagctgaagcaggagttgccaaaatatctgcccgcattacagggttgtcgtagcgttgaagaattccagtgcttgaatcgcatcgaggaaggaacctacggcgtggtataccgcgctaaagacaaaaagactgatgagatcgtggctctaaagcggcttaagatggagaaggaaaaggagggcttccccataaccagcctccgtgagatcaacactatcttgaaggctcaacaccctaacatagtcaccgtgagagagattgttgtgggtagcaatatggataagatttacatcgtgatgaactacgtggaacatgatctcaaatctttgatggagactatgaaacagccttttcttcccggggaagtaaagactctcatgatccagttactgcgcggcgtcaagcatctccacgacaattggatccttcatcgagacttgaagacatccaatctcctgttaagccacgccgggatcctgaaagtgggagacttcggactggctcgcgaatatgggtcacctttgaaagcgtacaccccagtggttgtgacccagtggtaccgtgctccagaacttctcctgggagccaaggagtatagcaccgctgtcgacatgtggtcagttggctgcatcttcggagaattgctcacgcagaagcccctttttcccggaaacagtgaaatagaccagatcaataaggtctttaaggagttgggtacaccgtccgagaagatttggcctggatattctgagttacccgttgtgaaaaagatgaccttcagcgaacacccttacaataatcttcgaaaacggttcggggccttactgagtgaccagggcttcgatctgatgaataaatttctcacatacttcccgggaagaaggatctcagccgaagacggactgaaacacgagtattttagagagactccgttgcccatagatccatcaatgttccctacttggcccgcaaaatccgagcaacaaagggtaaagagggggactagcccaaggccacctgaggggggcctcgggtacagtcagctaggcgatgacgacctgaaggaaactggattccatctgaccacaactaaccaaggggccagcgcagctgggccgggcttcagcctcaagttctag

SEQ ID NO: 184247 - DNA, 114 bp, synthetic construct
  misc_feature 1..114: note = Description of Artificial Sequence: Synthetic coding sequence
  source 1..114: mol_type = other DNA
atgggcgacgagaaggacagctggaaggtgaagaccctggacgagatactgcaagagaaaaagagacggaaagaacaggaagaaaaggctgagatcaagaggctgaagaactag

SEQ ID NO: 184248 - DNA, 2343 bp, synthetic construct
  misc_feature 1..2343: note = Description of Artificial Sequence: Synthetic coding sequence
  source 1..2343: mol_type = other DNA
atgggcgacgagaaggacagctggaaggtgaagaccctggacgagattttgcaagagaagaaacgtcggaaagaacaggaagagaaagccgaaattaagcgactgaagaactctgacgaccgggattctaagcgggattctttggaggagggagaactgagggaccactgcatggaaatcaccattcggaatagcccataccgccgagaagattcaatggaagataggggggaagaggacgattctctcgccataaagcccccacagcagatgtcacggaaagaaaaagtgcaccacaggaaggatgagaaaagaaaagagaaatgtcgccatcactctcattctgccgagggaggaaaacacgctcgagttaaagagcgtgagcacgagcgccgaaaacggcaccgcgaagagcaggataaagcccggagggaatgggaaagacagaagcggagggagatggctcgagagcacagccggcgcgagagagatcgattggaacagctggaacgcaaaagggagagagaaagaaagatgagagaacagcagaaagagcagcgagagcaaaaagagcgcgaacgccgggccgaggagagacggaaagagcgggaagccagaagggaagtgtcggcgcaccaccgcaccatgagagaggactacagcgacaaggtcaaagcaagtcactggtctcgctcaccaccgcgtccaccgagggagagatttgaactgggcgacggccgcaaacccgtaaaagaagagaagatggaggagcgggatctgctgagcgacctgcaggacatctcagacagtgagagaaaaactagctcagctgagtccagctcggcggaaagcggatcagggtccgaagaagaggaggaggaagaggaggaagaggaagaggagggatctacttctgaggagtcagaagaagaggaagaagaggaggaagaagaggaagaagagacaggaagtaatagcgaggaggcgtctgaacagagtgcagaggaggtgagcgaggaagagatgagcgaagacgaagaacgggaaaatgaaaaccatctcttagttgtgccagaatcacggttcgatagggattccggggagtctgaagaggcggaggaggaagtgggcgaggggacccctcagtcctcagctctgaccgaaggggactatgttcccgacagcccagccctattgccaattgagttgaaacaggagctgccaaagtatctccccgccctgcaagggtgtaggtccgtcgaagagtttcagtgcctgaaccgcattgaggaaggtacctatggtgtcgtatatagagctaaagataagaaaaccgacgagatcgtagcgctcaagcggctgaagatggagaaggagaaggagggcttccccatcacctctctgcgcgagattaacaccattcttaaggcacaacatcctaacatagtgactgtcagagaaatcgtagtgggcagtaacatggataagatttacatcgtcatgaactacgtggagcatgatctgaagagccttatggagaccatgaagcagccattcctgcccggggaggtaaagacgctcatgatccagcttttgaggggcgtgaaacatctgcatgataactggatcttacatagagacttgaagacttcaaatctgcttctgtcccatgcaggcattctaaaggtcggagatttcggcctcgcaagggaatacggatcacctctcaaggcttatacgcctgtagtcgtcacgcagtggtatagagccccggaattgctgctgggcgccaaagaatactccaccgcagtggacatgtggtccgttggatgtatttttggtgaactgttaactcaaaagccgctgttcccgggaaatagcgagatcgatcagatcaataaagtcttcaaagagctgggcaccccctctgagaagatctggcccggctacagcgaactgcccgttgttaagaagatgacattctctgaacacccctataacaacctgcggaagcgtttcggcgcactcctgtctgaccagggattcgatctgatgaacaagttcctcacctatttccccgggcggcgtatctctgcagaggacgggctcaaacatgagtacttccgcgagaccccactgccaattgatccctctatgttcccaacttggcccgccaaatcagaacagcaaagagtcaagcggggaactagcccccgtcccccggagggcggtctgggctatagccaattgggagatgatgacttgaaagaaaccggcttccacctcacaaccacaaaccaaggggcatccgccgctgggccaggatttagcctgaaattttag

SEQ ID NO: 184249 - DNA, 456 bp, synthetic construct
  misc_feature 1..456: note = Description of Artificial Sequence: Synthetic coding sequence
  source 1..456: mol_type = other DNA
atgggcgacgagaaggacagctggaaggtgaagaccctggacgagatcctgcaggaaaaaaaaaggcgcaaggagcaggaggaaaaagccgaaattaagcgcctcaaaaacagcgatgatcgagacagcaaacgggacagtctcgaggaaggcgaactgcgggaccattgcatggagatcacaattcgtaattcaccctaccgccgcgaggacagcatggaggatcgtggagaggaggacgactccctcgccatcaaacccccccagcagatgagccgtaaggaaaaagttcaccatcgcaaagacgaaaaaagaaaagagaaatggaaacatgcgcgggtaaaagaacgggagcacgaacgccggaaacggcacagagaagagcaggacaaggccagaagggagtgggagcgtcagaaaagacgggagatggcccgcgagcattccaggcggtag

SEQ ID NO: 184250 - DNA, 1263 bp, synthetic construct
  misc_feature 1..1263: note = Description of Artificial Sequence: Synthetic coding sequence
  source 1..1263: mol_type = other DNA
atgggcgacgagaaggacagctggaaggtgaagaccctggacgagatcctgcaggaaaaaaagaggaggaaagaacaggaggagaaggccgagattaagaggctaaaaaacagtgacgatcgagacagcaaacgagatagcctggaagaaggcgagctgagagaccattgcatggagattactattcgaaacagcccgtacagaagggaagattccatggaggatcggggcgaggaggacgacagtcttgcaataaaaccccctcagcagatgagcaggaaggaaaaagtgcatcaccgtaaggatgagaagcggaaagaaaagtgccgtcatcatagtcacagtgcagagggggggaagcacgctcgggtgaaagagcgggaacacgaaaggcgaaaacggcaccgtgaggaacaggataaggcgagacgtgagtgggaacgccagaagcgaagggaaatggcccgggaacatagtcggcgtgagcgggataggttggaacagctcgaacgaaagcgcgaacgcgagagaaaaatgcgcgaacagcaaaaagaacagcgcgagcagaaggagagggaaaggagagctgaagaaagaaggaaggagcgtgaggccaggcgcgaggtctctgcccaccataggacgatgagggaggattattctgacaaggtgaaggcctctcactggtctagaagtccaccacggccaccaagagaaaggttcgagttgggagacggccgaaagcctggcgaggccaggccagctcccgcacagaaacctgctcagcttaaagaagaaaagatggaggagagagacttgctgtccgatctgcaggacatttcagactcggagagaaagacatctagcgcagaaagctcatccgctgagagcgggtcaggtagcgaagaagaagaggaggaggaagaggaggaagaagaagaaggctctacctccgaggagagcgaagaagaggaagaggaggaggaagaggaggaggaggaaaccggatccaattccgaagaggcctcagaacagagcgccgaagaggtgtctgaggaggaaatgagtgaggacgaggaacgggagaacgaaaatcatttgctggtagtgccagagtctcgttttgatcgggattctggtgagtcggaggaggcagaagaggaggttgggctgcctgaaaggcggggagttcccgtgccagagcaagaccgtggtgggcatttgtggagtgggctgcagtctaagagacaggaaaacagatag

SEQ ID NO: 184251 - DNA, 1686 bp, synthetic construct
  misc_feature 1..1686: note = Description of Artificial Sequence: Synthetic coding sequence
  source 1..1686: mol_type = other DNA
atggccatcgccaccagcacccagctggcccgggccctgtacgacaatactgctgagagccctcaggagcttagcttcaggaggggtgatgtcctgcgcgtcctacagcgagagggtgccgggggactggatggctggtgtttatgcagtctacacggtcagcaaggtatcgtgcccgccaatcgcgttaagttactgcctgcaggaccggcaccaaagccctctctttcgccggcttctccagcccagcctggtagtccctaccccgccccagatcacagtaacgaggatcaagaggtatacgtggtgcccccccctgccaggccttgtccaacaagtgggccaccagccggtccatgcccaccatcaccagacttgatttataaaattcccagagcctcaggaactcaactggcagcaccacgggacgccctcgaggtgtatgacgtgccccctaccgcacttcgggtgccctcctcggggccatacgattgtcccgctagtttctcccatccactgactagggtggccccacagcctcccggggaagacgatgctccatacgacgtcccgcttactccaaaaccaccggccgagctcgagccagatcttgaatgggaaggcggcagagagccaggcccacctatctatgccgcaccttctaacctcaaacgtgcttctgccctgctcaatttgtacgaagctccagaggaacttctggccgacggggaaggagggggcacagacgaagggatctacgatgttcccttactcggtcctgaagcacccccgagtccagagccgcctggcgctctcgccagccatgaccaggacaccttagcccaactgctcgctcgctccccgccaccaccccacaggccacgtctcccaagtgcagagagtcttagtcgtcggccactccctgctctgccagtccctgaagcaccatctccgtctccggttcctagccccgcacctggtagaaagggaagtatccaggaccgcccactcccaccaccgcctccccgcctcccagggtatggcgggccaaaggtcgaaggcgaccctgaaggcagagaaatggaggacgatccagcgggacaccataatgaatatgagggtatccccatggctgaagagtacgactatgtgcatttgaagggaatggataaagcacagggaagcagacctccagatcaggcttgcacaggcgatcctgagttacctgagcgtgggatgcccgctccacaggaggccttgagccctggagagcccctggtggttagtacgggcgatctccagttgctctatttttacgcaggccagtgtcagtctcactacagcgccctgcaggcagccgttgctgccctaatgtcctcaacacaagcaaatcagcctcccaggctgttcgtaccccatagcaaaagggtggtggtggccgcccatcggctcgtctttgtcggggatacactggggaggttagctgcttctgcccctcttcgtgctcaggtgagagctgctggaaccgccctggggcaggcactccgagctaccgtgctagctgtgaaaggcgctgccttggggtacccatcctcaccagcgattcaagagatggtgcagtgtgttacagagctggccggacaggcactgcagttcaccaccctgttaaccagtctggcaccatag

SEQ ID NO: 184252 - DNA, 684 bp, synthetic construct
  misc_feature 1..684: note = Description of Artificial Sequence: Synthetic coding sequence
  source 1..684: mol_type = other DNA
atgaacggcaccatctacgccaacgagtgccagcagatccggcacccgaactctaaaactttaggcacggtgaccccacggaaaccagtgttgagcgtgagtgctagaaagattaaagataacgccgccgactggcacaatcttatcctgaaatgggagaccctaaatgatgctggctttactacagcaaataacatcgccaatttaaagatatctctgctgaataaagataagattgagcttgactcaagttcgcctgcaagcaaggagaatgaggaaaaggtgtgtctcgagtataatgaggaactagagaagctctgtgaggagttgcaagcaaccctagatggcctcaccaagattcaggtgaaaatggaaaagctgagctccactactaagggcatatgcgagctggaaaattatcattatggagaagaatcaaagaggccccccctattccacacatggcccacaacacacttctatgaggtgagtcataagcttctagagatgtatcgaaaggagctgctgcttaagcggacagtggctaaggagctggctcacaccggcgaccccgatttgactctgagctatctctctatgtggctgcaccagccatatgttgaatccgactctcgcctgcatcttgagagtatgcttctcgagactgggcatagagctctgtag

SEQ ID NO: 184253 - DNA, 357 bp, synthetic construct
  misc_feature 1..357: note = Description of Artificial Sequence: Synthetic coding sequence
  source 1..357: mol_type = other DNA
atggaggccaagaccctgggcaccgtgaccccccggaagcccgtgctatcagtgagcgcacggaagatcaaagataatgccgccgattggcacaaccttattctcaaatgggaaactcttaacgacgccgggttcacaacagcaaacaacattgctaatctgaagataagcctcttgaacaaggataagatcgaattagactcttcctccccagcatctaaggagaacgaggagaaggtttgccttgaatataatgaagagcttgagaagctatgcgaggagctccaggccaccctcgatgggctcatgcggttccgaatatcctcctggagatgtaccggaaggtcttgcagttag

SEQ ID NO: 184254 - DNA, 639 bp, synthetic construct
  misc_feature 1..639: note = Description of Artificial Sequence: Synthetic coding sequence
  source 1..639: mol_type = other DNA
atggaggccaagaccctgggcaccgtgaccccccggaagcccgtgctctcagtaagcgccagaaagatcaaggacaacgctgctgattggcacaacctgattttaaaatgggagacgctgaacgatgctggcttcaccacagctaacaatatcgcaaatttgaaaatctctctactgaataaggataagatagaattagacagctcctcgccggccagcaaggagaacgaagagaaggtgtgcctggagtataatgaagagttggagaagctttgtgaagagttgcaagccaccctggacggtctcacgaagatccaggttaaaatggaaaaactgtcctccacgaccaagggaatatgcgaattggagaattatcactatggggaggagtcgaagcgccctccgctgttccacacatggcccacaacacatttctacgaagtgagtcacaagctgctggagatgtacaggaaggaacttctactgaagcgcacggtggccaaggagttggcccacacaggggacccagacctaaccctttcttatctgagtatgtggctccatcaaccatacgtggagagtgattcccgcctgcatctggagtctatgctcctggagacaggacacagggcgctctag

SEQ ID NO: 184255 - DNA, 918 bp, synthetic construct
  misc_feature 1..918: note = Description of Artificial Sequence: Synthetic coding sequence
  source 1..918: mol_type = other DNA
atggacatgttccagaaggtggagaagatcggcgagggcacctacggcgtggtgtataaagcgaaaaatcgggagacagggcagttggtcgctctcaagaagatccgtctggatctggagatggagggcgttccaagtaccgcgatacgggagatctctttgctgaaggagttgaagcatccaaatatcgtacggctcctagatgtggtccataatgaacgtaaattgtatttggttttcgagttcctcagtcaagacttgaaaaaatatatggatagtacgcctgggtcagagctcccactccacttgataaagtcttacttgttccagcttcttcagggagtgagcttctgtcactcacacagagttatccacagagacttaaagccacagaacttgctgatcaacgaactgggagccattaagctggcagactttgggctcgctagagctttcggcgtgcctctgcggacgtacacacacgaggttgttactctgtggtaccgcgcgcccgaaatcctgctcggtagcaaattttacaccaccgccgttgacatttggtcaattggttgcatttttgctgagatggttacgcgcaaggcgctctttcccggagactcggagattgatcagttgtttcgaatcttccgcatgctggggacgccttcagaggacacctggcctggtgtgacgcagctgcccgactacaagggcagcttccctaaatggactagaaagggactggaggaaattgtacctaacttggagcctgaaggacgcgacttactgatgcagctgttgcagtatgacccatctcaacgcatcacggccaagacggcactggcccacccatacttctctagcccagagccttcaccagctgcacgccaatacgtgctgcagagattccgacactag

SEQ ID NO: 184256 - DNA, 918 bp, synthetic construct
  misc_feature 1..918: note = Description of Artificial Sequence: Synthetic coding sequence
  source 1..918: mol_type = other DNA
atggacatgttccagaaggtggagaagatcggcgagggcacctacggagtggtgtataaagctaaaaaccgagaaactggacaactcgtcgcccttaagaagattcgccttgacctggaaatggagggcgtgccgagcaccgccatcagggagatatccctcttgaaggagttgaagcatcccaacatcgtgagactcctcgacgtggtacacaatgaacgcaagctgtatctggtgtttgagttcttaagccaggatctgaagaaatacatggacagtaccccgggaagcgaactccctctgcacctaatcaagagctatctcttccagctcctacagggcgtcagtttctgtcattcacaccgagtcattcaccgcgatcttaagccacagaatctgctaattaacgagttgggggcgattaaactcgccgattttgggctcgctagggcttttggggtgccactccgtacgtatactcacgaagttgtcaccttgtggtacagggctcctgagatcctgctgggatcaaaattttacactactgcagttgacatctggtccataggctgcatctttgctgagatggtgacccgtaaggccctctttccaggcgattctgaaatagatcagctcttcagaatcttccgcatgttgggcacaccatcagaggatacatggcccggagtgacccaactgccggattataaggggagttttcccaagtggactagaaagggactcgaggagatcgtgccaaatttagagcctgaagggcgcgatttactaatgcaactcctccaatatgacccgtctcagcgaatcaccgctaagactgctctggcccatccctattttagctctccagagccttctccggccgcccggcagtacgttctgcagcggttccggcattag

SEQ ID NO: 184257 - DNA, 879 bp, synthetic construct
  misc_feature 1..879: note = Description of Artificial Sequence: Synthetic coding sequence
  source 1..879: mol_type = other DNA
atgcagaagtacgagaagctggagaagatcggcgagggcacctacggtacagtatttaaggccaaaaacagggaaacccatgagattgtcgcccttaaacgtgtgcgccttgacgacgacgacgagggtgttccatcatccgcattgcgtgaaatctgcctcctcaaggagctgaaacataagaatatcgtgcggcttcacgacgttcttcacagcgataagaagctcaccctcgtgtttgaattctgcgatcaggatttgaagaagtacttcgattcctgtaacggagacttggacccagaaatcgtgaaaagtttccttttccaactcctgaagggtctggggttctgccactctagaaatgtgctgcaccgcgatctcaagcctcagaacctgctgataaatcgaaatggcgaactgaagttggctgactttggactggctagagctttcggcatccctgtgcgctgttattcagcagaagtagtaaccctttggtacaggcccccagacgttctttttggggcaaaattatacagcactagcattgatatgtggtctgcgggctgtatctttgccgaacttgctaacgccgggagacctctgtttcccggcaatgacgtggacgatcagttgaagagaatattcagattgctgggaacccctacggaagagcaatggccatccatgaccaagttgccagattataagccctacccgatgtaccctgccactacgagcttagtcaacgtcgtccccaagctgaatgctacgggacgggacctgctacagaacctattaaaatgtaaccccgtccaaagaattagcgcagaggaggctctccagcatccttatttctctgacttttgtcctccttag

SEQ ID NO: 184258 - DNA, 783 bp, synthetic construct
  misc_feature 1..783: note = Description of Artificial Sequence: Synthetic coding sequence
  source 1..783: mol_type = other DNA
atgcagaagtacgagaagctggagaagatcggcgagggcacctacggtacagtgtttaaagcgaagaatagggagacgcatgagatcgttgctctaaaaagagtgcgcctggacgacgatgacgagggcgtcccaagctcggcccttcgtgagatttgtctgctgaaagaactcaaacataagaacattgtgcgcctgcacgatgtcctgcattcagataagaagttaacactggtctttgagttttgtgaccaagacctgaaaaaatactttgattcctgcaatggagacctggacccagaaattgttaagaacggggaactgaaactagccgatttcggcttagctcgcgcctttggcatcccagtgcgctgttactcagctgaagtcgtcacactgtggtatcggcctccagatgtgttgttcggtgctaaactgtactctacctcaatagatatgtggagcgcgggatgcatatttgcagagctggcaaacgccgggcgtcccctgtttcccggcaatgacgtagatgatcagctgaaacggatctttcgactcttaggcactcccacggaggagcagtggccatctatgaccaagctgccagactataagccttacccaatgtatcccgctaccacgagcctagtcaatgtcgttcctaaactcaatgctaccggccgcgatctgctgcagaacctgctgaagtgtaacccggtccagaggatcagcgccgaagaggccttgcagcatccctacttctccgacttctgtcccccttag

SEQ ID NO: 184259 - DNA, 1104 bp, synthetic construct
  misc_feature 1..1104: note = Description of Artificial Sequence: Synthetic coding sequence
  source 1..1104: mol_type = other DNA
atgggcaccgtgctgagcctgagccccgccagcagcgccaagggcagaaggcccggaggactccctgaggaaaaaaagaaggctccaccagcaggagacgaagccctgggaggctacggcgctccgcctgtgggcaagggcggtaagggagagtctaggctgaagagaccctctgtcctgattagcgcacttacctggaagaggttggtggcagcctccgcaaagaagaagaagggaagcaaaaaagttactccaaaaccagctagcactggccccgatccacttgttcagcagaggaacagggagaatctgctgcggaaaggacgagatccaccagacgggggaggtactgcaaagcctctggccgtccctgtccctaccgttccagctgccgcagctacctgcgagcccccatcaggaggatccgctgcagcacagcctcctggttcgggaggtggtaagccaccccccccgcctcctcccgccccgcaggtggccccaccagtgcctggaggttcccccagacgtgtaattgttcaagcatcgactggagagctgctccgctgtcttggcgattttgtctgtcgtagatgctacagactgaaagaactgagccccggcgagttggtggggtggttccgcggtgtagatcgctctttgctcctgcagggctggcaagaccaagccttcattactcctgctaatcttgtattcgtctaccttctctgtagagaaagcctgcggggcgacgagctagcgtcggccgccgagctgcaggcagcttttctcacatgtctgtatcttgcttattcgtacatgggcaacgagatctcttaccccttaaaaccctttctcgtggagccagacaaagagagattttggcagcgatgtctcagactgatccagcggttaagcccacagatgctccggcttaatgctgaccctcattttttcacacaggtgttccaggatttgaagaacgaaggtgaagccgcagcctcggggggtggccctcccagtggtggcgctccagcagcgtctagcgcagcacgagacagttgtgcagccggaactaaacactggacgatgaatctcgatcggtag

SEQ ID NO: 184260 - DNA, 1779 bp, synthetic construct
  misc_feature 1..1779: note = Description of Artificial Sequence: Synthetic coding sequence
  source 1..1779: mol_type = other DNA
atggagatgtacgagaccctgggcaaggtgggcgagggcagctacggaaccgttatgaagtgtaagcacaaaaacacgggtcaaattgtggcaattaaaatcttctatgaacgcccggaacaaagcgtgaacaaaatcgcgatgagagagattaagttcttgaagcaattccatcacgagaatctcgtgaatctgatcgaagttttccggcagaaaaagaagattcacctcgtgttcgagtttatagaccatactgtgctggacgagctgcagcactactgccacggtcttgagagtaaacggcttagaaagtacctgttccagattctgcgcgctattgattatttacattccaacaatattattcatagagacatcaagcccgaaaacattttagtgagtcagagcggtataacaaagctatgcgactttggctttgctcggacccttgctgcaccaggagatatatacactgattatgttgcgacgaggtggtacagagcacccgaacttgtcctcaaggatacttcttatggtaaaccagttgacatctgggccctgggctgcatgattatcgaaatggcgacaggcaatccatatctgccctcctcctccgacctcgacctgctccataagatcgttctgaaggtgggaaacctgtccccgcatctgcagaatattttctcaaaaagccctatctttgccggcgtggtgctgccccaagtgcagcacccaaagaatgctcgaaaaaagtacccgaaacttaacggcctactggccgatattgtccacgcatgcttacagatcgatcccgctgatcggatcagtagttccgatttgctacatcacgagtacttcactcgagacgggtttatcgagaaattcatgcccgagctgaaagcaaagctgctacaggaagctaaagttaattcactcatcaagcctaaggaatccagcaaggagaacgaacttagaaaagacgaacgtaaaacggtgtatacaaacactctgctgtcctcttcggtgttaggaaaagagatcgaaaaagagaagaaacctaaggaaattaaagttcgggtcattaaggtaaagggaggacgtggcgatatttcggagccgaagaagaaagagtatgaggggggcctgggccagcaggatgctaatgagaatgttcatcccatgagccctgacactaagcttgtcacaatcgaaccgcccaaccctattaacccctctactaactgtaatggtctcaaagaaaacccccattgcggaggtagcgtaaccatgccacccatcaatctgaccaacagtaaccttatggcagccaatctcagcagcaacctttttcatccatccgttagattaactgagagggccaagaaacgacgaacgtcctcacagtcaatcggccaggtcatgccaaactctcggcaggaggaccctggaccgatccagagccagatggagaagggaatattcaatgagcggaccgggcattctgatcagatggccaatgagaataaaagaaagttgaacttctcaaggtccgatcgcaaagaattccacttccccgagctgccagtgaccatccagagcaaagacaccaagggcatggaagtgaagcaaataaaaatgttgaagagagagagcaaaaagacggaaagttccaagatcccaaccctgctgaatgtcgaccaaaaccaagaaaaacaagaaggaggcgacggccactgtgagggcaaaaatcttaagcggaatcgcttctttttttggtag

SEQ ID NO: 184261 - DNA, 1368 bp, synthetic construct
  misc_feature 1..1368: note = Description of Artificial Sequence: Synthetic coding sequence
  source 1..1368: mol_type = other DNA
atggagatgtacgagaccctgggcaaggtgggcgagggcagctacgggactgtcatgaagtgcaaacacaagaacaccggccagatcgttgccattaagatattctatgagcggcccgaacagtctgtgaacaagatcgccatgcgcgagatcaaattcctaaaacagtttcaccatgaaaaccttgtcaacttgatcgaggtgtttcgtcagaagaaaaagatacacctggtgttcgagtttattgatcataccgtcctggacgagctccagcattactgccacggcttggagagcaagcggctgcgtaaatacctgtttcagatcctccgagctatcgattaccttcactccaacaacatcatccaccgtgacattaaacctgagaacatcttagtctcgcagtcaggaattactaaactgtgtgactttggcttcgcccgcaccttggccgctcccggtgatatctataccgactacgtcgcaacccggtggtaccgcgcccctgagttggtcctgaaggatacttcctatggcaagcccgtcgatatatgggccctaggttgcatgatcatcgagatggccacaggcaacccgtatctgccctccagttccgatttagatcttcttcataaaatagtgcttaaagtgggcaatctaagcccccacctccagaacatttttagcaaatcaccaatcttcgccggagtggtactgccccaggtacagcaccccaaaaatgctcggaagaaatatcctaaactgaacggactgctcgccgacatagtccacgcatgtttgcaaattgatccagcagaccgaatttcctccagtgatctcttgcatcacgagtactttaccagagacggcttcattgaaaaattcatgcctgagctcaaggctaagctgttgcaggaggctaaagtcaattcacttattaaacccaaggaatcatctaaagagaatgagctccgaaaagacgaaagaaaaacggtctacaccaacacactgttatccagctccgtattggggaaggagatagaaaaggaaaagaaaccgaaagaaattaaagttagggttatcaaggtcaaaggaggacgcggggacatctcagagccgaagaagaaggagtatgagggcgggcttggccagcaagatgccaacgagaacgttcatccaatgtcccccgacacaaagctcgttactatcgagccccccaaccccatcaatccttcaactaactgcaacgggttaaaagagaatccccattgtggtgggtcggtgaccatgccccccattaacttgacaaactcaaacttgatggccgcgaatttatcctcaaatctgtttcaccctagtgtccgttag

SEQ ID NO: 184262 - DNA, 1092 bp, synthetic construct
  misc_feature 1..1092: note = Description of Artificial Sequence: Synthetic coding sequence
  source 1..1092: mol_type = other DNA
atgcccgagctgaaggccaagctgctgcaggaggccaaggtgaactctctaatcaaaccaaaagaaagctccaaggagaatgagttgaggaaggacgaacgtaagaccgtttatacaaataccttgctgagttcgtcagtactgggaaaagagattgaaaaggagaaaaagccaaaagaaataaaagtgagagtgattaaggtgaaagggggccgaggcgatattagtgagcccaagaagaaagaatatgaaggcggcctgggtcagcaggacgccaacgagaacgtgcatcccatgagtccagataccaagctggtgaccatcgaacctcccaatccgatcaatccgtcaaccaactgtaacgggctaaaagaaaacccccactgtggcggctccgtgaccatgccgccgatcaacctcaccaactccaatttaatggccgcgaatctttcatcaaacttgttccacccttcagtgcgactaaccgagcgggccaaaaaaagacggaccagttcacaatcaatcgggcaggtaatgccaaactcacggcaggaagaccctggtcccatccagtctcagatggaaaagggcatttttaatgagaggaccgggcactcagatcagatggcaaatgagaataagcggaaactgaacttttctcggtccgaccgaaaagagtttcattttcccgagctgcctgttaccatccagagtaaggatactaaggggatggaggtaaagcaaatcaagatgcttaagcgggaatcaaaaaagactgaaagcagcaagattcctaccttgctaaatgtggaccaaaatcaagagaaacaagagttcatccctctcagcctcttgtctgcatgttgccccattttcacaaacatatgcagccagctcaccatcagatacgtgtttatttcgggaatgaaaaccgaccagtactcagagctggttccagtagagtggggtattgcagagaaaatccccaagaatgtcgaggctaccctagaactgggcaataggcagcgattcgagcagtttggggagctccggaggcgccaagagaacgtcggaaagtttgggactttctag

SEQ ID NO: 184263 - DNA, 1773 bp, synthetic construct
  misc_feature 1..1773: note = Description of Artificial Sequence: Synthetic coding sequence
  source 1..1773: mol_type = other DNA
atggagatgtacgagaccctgggcaaggtgggcgagggcagctacggaacagtgatgaagtgcaaacacaaaaacaccggacagatcgtggccattaaaatcttctatgagcgccccgagcagtcagttaacaagattgccatgagagagatcaagttcttaaaacagttccaccacgagaatcttgtaaatctcatagaggtgttccgccagaagaaaaaaatccatcttgtcttcgaatttatagaccataccgtccttgacgaactgcagcactactgccatggtctcgaaagtaagcgactgcgcaaatacctgtttcaaattctgagggccattgactacctccacagtaataatattattcatcgcgacatcaagccagagaatatcctggttagccagagcggaatcacaaagttgtgcgatttcggttttgctcgtaccttggccgctcctggggatatttatacagactacgttgcgactaggtggtaccgggccccagagctcgttctgaaggacacttcctacggcaagcctgtcgacatctgggctttgggttgcatgatcatcgagatggccacaggaaacccatacctgcccagctcctcggacttggacttactccataaaattgttctgaaagttggcaatctgagcccacatctgcagaacatcttttctaagtcaccgatttttgctggggtggtcttaccccaggtccagcatccaaagaacgcacgcaagaagtacccaaaattgaacggcctacttgcagatatagttcatgcctgtctacagattgaccctgccgaccgcatcagtagctcagacttactccaccacgagtacttcacacgagatggctttatagaaaagtttatgccggaactcaaggcaaaactgctgcaggaggccaaagtgaattccctcatcaagcccaaggaaagcagcaaagagaatgagttacggaaggacgaaagaaagaccgtgtacaccaatacgttgctgagctctagcgtgctcggtaaagagatagagaaggagaagaaacccaaagagattaaagtgagggtgatcaaggtaaaaggcggacgaggggacatttccgaaccgaaaaagaaggaatacgagggaggactgggacagcaggacgccaacgagaatgtgcatcccatgagcccagacaccaagttggtgacaattgagccacctaatccaattaaccccagtactaactgcaatggtctcaaggaaaatccccactgtgggggctcagtgaccatgcctcccataaatctgactaacagcaacttgatggccgcgaaccttagcagcaacctttttcatcccagtgtccgcctgacggagcgcgctaaaaaaagaaggacaagcagccagagcattggtcaagtcatgcctaatagcagacaggaagaccctggacccatacagtctcagatggagaagggcatttttaacgaaagaacaggacactcagaccagatggcaaatgagaataagcgtaaactcaatttttcgcgcagcgatcgaaaagaattccatttcccggaactccccgtgactattcagagtaaggatactaagggaatggaagtcaaacagatcaagatgctcaaaagagaaagcaaaaagacagaaagctccaaaatccccacgcttttgaacgtggatcaaaatcaagaaaaacaagaaaacactggtaacgcccagaccgaacgaaagaagaaccttccagacgtggaatag

SEQ ID NO: 184264 - DNA, 1368 bp, synthetic construct
  misc_feature 1..1368: note = Description of Artificial Sequence: Synthetic coding sequence
  source 1..1368: mol_type = other DNA
atggagatgtacgagaccctgggcaaggtgggcgagggcagctacggcacggtgatgaagtgcaagcacaagaacacggggcagatcgtcgcaattaaaatcttctacgaaagacccgagcaatcagttaacaaaatcgctatgcgcgagatcaaattcttgaaacagttccaccatgaaaacctggtgaacctgatcgaggtgtttcgacagaaaaaaaagatccatctggtcttcgagttcatcgatcacaccgtactggacgagctgcaacattactgccatggactggagagcaaacgactccggaagtacttgttccagatcctgagggctatcgactacttacactctaacaatattattcaccgggacattaagcctgagaacatactcgtttctcaatccggcatcacaaaactctgcgatttcgggttcgcacgcacccttgctgcccctggtgacatctacactgattatgtggctacccgatggtatcgtgctcccgagcttgtgctcaaggatacatcctacggaaaaccagtggatatttgggccctgggatgcatgattattgagatggctacgggtaatccttatctgccatcttcctccgatttggatctgcttcacaaaattgtattgaaggttgggaacctctctccccacctccaaaacatcttcagtaagtctcctatcttcgccggagtagtcctaccacaggtgcagcacccgaagaacgctcggaaaaaataccccaagctgaacggcctcttagccgatattgtgcacgcatgccttcaaattgaccccgccgatagaatttctagcagcgatctcctgcaccacgagtacttcactagggacgggttcatcgagaagtttatgccagaactgaaagctaagttgctgcaggaggctaaggtgaactctctgatcaaaccaaaggagtcttctaaagaaaatgagctccggaaagacgaacgcaagacggtctacacaaacacattgctctcaagcagtgtgcttgggaaagaaatagaaaaagagaagaagcctaaagaaataaaagtgcgtgtgattaaagtgaaagggggacggggcgacatatcggagccaaagaagaaagaatacgagggggggctcggacagcaggatgctaacgaaaatgtccacccgatgagtccggacactaagctggtcacaattgagcccccgaaccctatcaacccaagtaccaactgtaacggcctgaaggagaacccacactgcggcggctctgtgacaatgccgcccatcaatttgacaaatagcaatcttatggccgccaatttgtctagtaacttgttccacccatccgtgaggtag

SEQ ID NO: 184265 - DNA, 876 bp, synthetic construct
  misc_feature 1..876: note = Description of Artificial Sequence: Synthetic coding sequence
  source 1..876: mol_type = other DNA
atgcccgagctgaaggccaagctgctgcaggaggccaaggtgaactctctgatcaagcctaaagaatccagcaaggaaaacgaactgcggaaggacgagcggaagacagtgtacacaaacacactcttaagttcctctgtgctcggaaaagaaatcgagaaggagaaaaagcctaaggagatcaaagtgcgagtgattaaagtcaaaggaggccggggggacattagtgagcccaagaaaaaggagtacgaggggggcctggggcagcaggacgcgaatgaaaatgtgcaccccatgagtcctgatacaaagctggtgaccatcgagcctcccaaccctattaacccaagcactaactgcaatggattgaaagaaaatccacactgcggcggctctgttacaatgccacccatcaacctgaccaactccaatctcatggccgccaatctcagctcaaatctcttccaccctagcgtgcgcctgaccgagcgagctaagaagcggcgcacctctagtcagtccattggacaggtcatgccaaacagcagacaggaagatcctggccccattcagagtcagatggaaaaaggtattttcaacgaaaggactggccactctgatcagatggccaacgagaacaaaagaaagctaaactttagtcgttcggatcggaaggagttccacttccctgaactgcctgtgacgatccagagcaaagatacaaaggggatggaggtgaagcagattaagatgcttaagagggagagcaagaagacagagtcctctaagattcccactttattaaatgtcgaccagaaccaggaaaagcaggaggtccgattgtaccagcggcatgaggaccggcccatccagtag

SEQ ID NO: 184266 - DNA, 3093 bp, synthetic construct
  misc_feature 1..3093: note = Description of Artificial Sequence: Synthetic coding sequence
  source 1..3093: mol_type = other DNA
atgaagatccccaacatcggcaacgtgatgaacaagttcgagatcctgggcgtggtgggggagggcgcatatggtgtcgtcctgaagtgcaggcacaaagagacacacgaaatcgtagcgatcaagaagtttaaggattcggaagagaatgaagaagtgaaagaaaccacactgagggagctcaagatgttaagaacgttgaaacaggaaaatattgtggaactcaaggaagcgtttcgcaggagggggaaactatatctggtgttcgaatatgttgaaaaaaacatgctggaactgctggaggagatgccaaatggtgtgccccccgagaaggtgaaaagctacatttaccagctaatcaaggccatccactggtgccacaagaatgacatagtacacagggacataaaaccggagaatcttctgatctcacacaatgatgttctgaagctgtgcgactttggattcgctaggaatttgtctgaggggaacaacgccaattacactgaatacgtggccacgagatggtacagatccccagagctgctgcttggcgccccctacggcaagagtgtagacatgtggtccgtcggctgcatcctgggagagctctcagacggacagccgctgtttccaggagagagcgagattgatcagctttttactatccagaaggtcctgggccccctgccttcggagcagatgaagttgttctattctaatccacggtttcatggccttcggtttcccgcagttaatcacccacaaagcctggaacggcggtatcttgggattctgaactcagtcttgttagacctgatgaagaatcttctaaagctcgaccctgcggacaggtaccttacagagcagtgcttaaatcatcccacattccagacacagaggctgctggatcgctcgccatctcgctccgcgaagaggaagccttatcacgtcgagtccagtacactctcaaacagaaaccaggctggaaaatcaaccgctctgcagagccatcacaggagcaatagcaaagatatccagaacctgagtgtgggcctgccacgtgctgacgagggtctccccgccaacgagtcattcctcaacggtaaccttgctggggcttccctttcacctctgcataccaagacataccaggcttcgtcccagcccggatcaacgtctaaggatctgaccaacaacaacatcccacatttgttatccccaaaggaagccaaatccaaaacggagtttgactttaatatagatcccaaaccctccgaaggccccggaaccaagtatctgaaatctaattctcggtctcaacagaataggcactcctttatggagagctctcagtctaaggcgggtactctacaaccaaacgagaagcaaagtcgacactcttacattgatacaattccgcaatcaagcaggtcaccgtcttacaggaccaaagccaaatcccatggggccctatcagactctaaaagtgtgagcaatcttagcgaggctagagcacaaatcgcagaaccctctacctcccgctactttccttctagctgcctggatctcaattcccccactagcccaactcctaccagacactctgatacgcggactctgctgtctccttccggaaggaacaatcggaatgaaggcaccctggattcgcggaggaccacaacccgccacagcaagaccatggaggaattaaaactgccagagcacatggattccagccattcccattccctgtccgctccacatgaatccttctcttatggactggggtacactagccccttcagtagccagcagagaccccaccgacattccatgtatgtgacccgagacaaggtacgagcaaaagggttggacggctccctgagtatcggacagggaatggcagccagggcaaactcactccagctccttagcccgcagccgggcgagcagctcccaccagagatgacagtagccagatcatcagttaaagagaccagtcgggaaggtacatcctcatttcacactaggcaaaagagtgagggaggggtctaccacgatcctcactcagatgacgggactgcccccaaagagaatcgccacctgtataacgatcccgtccctcgccgtgtcggctcattctatcgcgtcccatcccctcgacccgacaactcctttcacgaaaacaatgtctcaactagggtgtcatccctgccatcagagtcctcctccgggaccaaccatagtaaaagacaacctgctttcgatccctggaaatctcccgaaaatatatctcactccgaacagctgaaggagaaggagaagcaaggattctttaggtccatgaaaaaaaaaaagaagaagagtcagacagttcctaacagcgactcacccgacctcctcacgctgcagaaaagtatccactctgcttctacaccatctagccgaccaaaagagtggcggcctgaaaagatctccgatctgcagactcagtcccagccactcaagtctttgcgcaaactccttcacctttccagcgccagtaatcacccagcttcatcagatccccgcttccaacccctgacagcccagcagactaagaacagtttcagtgagatccggatacaccccctgagccaagcttccggaggtagtagtaacatcaggcaagagccggcacctaagggacgcccggccctccagttacccgacggtggatgtgacggacgcaggcagagacaccactctggaccccaggatcgccggtttatgctgaggacaaccgaacagcagggggaatatttttgttgtggagatccaaaaaaaccacacaccccctgcgtgcctaatagggcacttcaccgtccaatcagttcacctgcgccctatcccgtcctgcaggtgcgcggcacatccatgtgtccaaccttgcaggtccgaggcactgatgccttcagctgcccaacccagcagagcggattctctttcttcgttcggcacgtgatgcgcgaagcgctcatccatagagctcaggtcaaccaggcagccctcctgacctaccacgaaaacgctgctctcaccgggaaatag

SEQ ID NO: 184267 - DNA, 3093 bp, synthetic construct
  misc_feature 1..3093: note = Description of Artificial Sequence: Synthetic coding sequence
  source 1..3093: mol_type = other DNA
atgaagatccccaacatcggcaacgtgatgaacaagttcgagatcctcggcgtggtgggcgaaggggcgtacggagtagtgcttaagtgcaggcataaggaaacacacgagattgtcgccattaaaaagtttaaggatagcgaagagaatgaagaggtgaaagagactacgctgcgagaactgaagatgcttcggactctgaagcaggagaacattgtcgagctgaaggaggcgttcagaaggcgcggaaaactataccttgtgtttgaatatgtggagaaaaatatgttagaactgttagaagagatgccaaacggggtgcctccagaaaaagtcaagagctatatttaccagctgatcaaagccattcattggtgccacaagaacgacattgtgcatagagatattaaacccgagaacctgctcattagccacaacgatgttttgaaattgtgtgactttggattcgccaggaacctgtcggagggtaataacgctaactataccgaatacgtcgctacaagatggtaccgatccccggaactgttactcggcgcaccgtatggcaagagcgtggatatgtggtcagtgggctgcattctgggggaactgtccgacggacaacctctgtttccaggcgaaagtgagatcgatcagctcttcaccattcaaaaagtgctaggcccgttgcctagtgaacagatgaagttgttttatagtaatccacgattccatggtctgcgatttccagccgttaatcacccacagagcctggaaaggcgctacctgggcattctcaattcagtgttattagacctcatgaagaacctgctgaaactcgatcccgccgaccgctacctgaccgaacagtgtctaaatcacccaacatttcagactcagcgcctgttggatagatccccctctcgatcagcaaagcgcaagccttaccacgtagaatcgtccacactcagcaataggaatcaggccggcaagagcacggcccttcagtcacatcacagatctaactccaaagatatccagaacctctcggtaggactgcctcgagctgatgagggtctgcctgcgaatgagagtttcttgaacggcaatctggctggagcaagtctgagcccgctccacacaaagacctaccaggcaagctcgcaaccaggttctacttctaaggacctgaccaataacaatatcccacacttactaagtcctaaagaggcaaaatccaagactgaatttgactttaatattgaccctaagccctcggaggggccgggcactaaatatctgaaaagtaacagtaggtctcaacagaataggcacagcttcatggaatcatcgcagagcaaggccgggacccttcagccaaacgaaaagcagtctcggcactcatacatcgacaccatcccccagtcttcccggtccccttcgtatcggacgaaggcaaagtcccacggggcattatcagactccaaaagtgtctctaacctctccgaggccagggctcagatagcagagccaagtacgagccggtattttccctcctcgtgcttagatcttaactctcccacatcccccactcccacccgtcattccgacacccgaaccctgctctcgccctcaggccgcaataaccggaatgaaggcactctggatagcaggagaacaacgaccagacacagcaagacaatggaggagttaaaactgccagagcacatggattcaagtcattctcattcccttagcgctccgcatgaaagcttctcatacggattaggttatacatcacctttttcttctcagcagcggccgcaccggcatagcatgtacgtgaccagggacaaggtccgcgcaaaagggctcgacggaagcctcagcatcggtcaaggtatggctgcccgagctaattccctgcagttgttgtccccgcagcccggagagcagcttcctccagaaatgactgtggctaggtcaagcgtgaaagagaccagcagggagggaaccagcagctttcacactcgccaaaagtctgaaggtggagtttaccatgatccccactccgacgacggtaccgctcctaaggagaatcgacatctgtataatgatcctgtcccacgccgtgttggcagcttttaccgtgtaccctcaccccggccagacaatagttttcatgagaacaatgtttccacccgcgtctcctccctgccatccgaatccagttcaggaaccaatcactccaaaagacagccagcttttgacccctggaagtcacccgagaacatatcgcattccgagcagctgaaggaaaaggagaaacaggggttcttcaggtccatgaagaagaaaaagaagaagagccagaccgtacctaatagcgatagtcccgatcttctcacccttcagaaaagtattcactcagcatctaccccttcctctcgtcctaaagagtggcgtcccgagaagatatctgacctgcagactcagtctcagcccctaaaatctcttcgtaaattgctgcacctctcatccgcttcaaatcaccctgcttcaagtgacccacgattccaacccctgaccgcccagcagacaaaaaactctttttccgagattcgcattcacccgctctctcaggcttcaggggggtctagcaatataagacaggaacccgcccccaagggtcgacccgctctccagcttccggatggaggctgcgatgggcgcagacagaggcaccactctggccctcaggacaggagattcatgcttcgcactaccgaacagcagggggaatatttttgttgcggggaccccaagaaacctcatactccatgtgtgccgaaccgagcgctgcaccgaccaatctcttcccccgccccctaccccgtgctgcaggtaagaggaaccagtatgtgtccaacactccaggtgagagggactgatgctttcagctgtccaacacaacagtcgggtttcagcttctttgtcagacacgtcatgagggaagctcttatccatagggctcaggtcaaccaggccgccttactgacctatcacgagaatgcggcgctgaccggcaagtag

SEQ ID NO: 184268 - DNA, 1956 bp, synthetic construct
  misc_feature 1..1956: note = Description of Artificial Sequence: Synthetic coding sequence
  source 1..1956: mol_type = other DNA
atgagcctgccccggctgctgaaggtgaacatccggacctacgacaatagtatccctatatctgaatcttcacggaaatcctggaaccagaaacactttgctcttacatttcccaagccactgcagcgtggcaccaatgataagagccggccattgaagtctcagattactgtgaccaggcacgacaaaaggaagttggaagaagggcagaagcccgcccataagtggattcgccactcgttcaggaaaattcttcaatggccaccaatctatacagccgctcgcgagcagactcccttcagacacttgtacacttctaagacacatctaaaaaaagctgagtataaaaagtccaaagacgagaagggcggaacacccctgaagaaggacagcaagaagaaaggcgggtcttatgccacaaacccagagtccaaacagatcgttgaagaaaaaacaaagagacagaacgaggcggacaagacccccctgaagtcttcccatgagaatgaacagtccaagaagtctaagtcaagcagcgagaccaaccctgagtctcagaacagtaagacagtgtccaagaactgtagtcagaaggataaaaaagactccaagaactccaaaaagaccaatacggagttcctacataccaaaaacaaccccaagaaggatttgaagcgttcaaagactagcaatgaccccattagtgaaatctgtagcgaaaattcgctcaacgtcgactttctgatgctcgtgggccagagtgacgatgaatcaataaacttcgacgcttggttgaggaattacagccaaaacaactcaaaaaactacagtcttaaatacactaaatacacgaaaaaggataccaaaaaaaacgctaaaaagagctccgatgcggaatcggaggactccaaggacgctaaaaaggatagcaagaaggtcaagaagaatgtcaaaaaggacgataagaaaaaggatgttaagaaggacaccgagagcaccgacgccgagagtggcgactctaaagacgaaagaaaggatactaagaaggataaaaagaaattgaagaaggatgacaagaaaaaggatacaaaaaaatatccggagtccaccgacaccgagtctggagacgcaaaggatgcgcgcaacgattctagaaatctgaagaaagcttcgaaaaacgatgacaagaagaaagatgccaagaaaatcacattttccacagacagtgaatctgaactcgagagcaaagagtcacaaaaagacgaaaagaaggacaagaaagacagcaagacggataacaagaaaagcgtgaagaacgatgaggagtccaccgatgctgactcagaacctaagggtgacagcaagaaagggaagaaagacgagaagaagggcaagaaagattcaaaaaaagacgataagaagaaggatgccaagaagaatgccgaatctaccgaaatggagtccgatttggagctcaaaaaggataagaagcactctaaggaaaagaaagggagtaaaaaggacattaaaaaagatgcacgcaaagatactgagtccaccgacgctgaatttgatgagtctagtaaaacgggctttaaaacctctacaaagataaaaggcagcgatacggaatcagaggaaagcctgtacaagccaggcgctaagaaaaaaatcgatgaatcggacggaacctcagccaactccaagatggagggactggaaagcaaacgcgggttccgcatgagctctaaaaaaacgacctttaacgagaagggcgaaaaggcgagcacaggaagggtgccaccctcccgcgagaagccccctctgccagcctgcgagcctagtctaccgagcccaaaagttaggcgactgtgctggtgcaagatgcccccacccccccccaaaccacggtatgccccactgccagaagccccttggatccataagctgctgtag

SEQ ID NO: 184269 - DNA, 1974 bp, synthetic construct
  misc_feature 1..1974: note = Description of Artificial Sequence: Synthetic coding sequence
  source 1..1974: mol_type = other DNA
atgagcctgccccggctgctgaaggtgaacatccggacctacgacaacagcatcccaatctctgagagtagcaggaaatcttggaatcagaagcatttcgccctgacattcccaaaacctctgcagaggggaacaaatgacaaaagtagaccgcttaaatcgcagatcaccgttacacgccatgataagcgtaagcttgaagaaggccagaagccggctcacaagtggatcaggcatagcttcaggaagatcctgcagtggccacctatctataccgccgccagagaacagaccccgttccgccacctatacacttcaaagactcacctcaaaaaagcagaatataagaaatctaaagatgaaaaaggaggcacaccactgaaaaaggacagcaagaaaaaaggggggtcatatgccaccaaccctgagagtaagcagatagtagaggagaaaacaaaacggcagaatgaggccgataaaacccctctgaaatccagtcacgaaaacgaacaaagcaagaagtctaagagctctagcgaaactaacccagaaagtcaaaactctaagaccgtgtcaaagaactgctcccaaaaggacaaaaaggactcaaaaaactccaagaaaacaaatacagagtttttgcacacgaaaaacaacccaaaaaaggatcttaagaggtctaagacatctaacgaccctatcagcgagatctgttcagagaactcacttaacgtggattttctgatgctggtcggccagagtgacgatgagagtatcaatttcgacgcctggctgcggaactactctcagaacaacagtaagaattactctctgaagtatactaagtacaccaaaaaagacaccaagaagaatgcaaaaaaatccagcgatgcagagtcagaagattcaaaagacgcgaaaaaggactcaaagaaggtcaaaaagaacgtgaaaaaagatgacaagaagaaggacgtgaaaaaggatactgaatccactgatgccgagagcggggattctaaggacgaaaggaaggataccaagaaggacaaaaagaagttaaaaaaggatgataaaaagaaagacactaagaaatacccggaatctacggatacggaaagtggggacgccaaagacgcaaggaatgacagtcgcaaccttaaaaaagcatccaaaaacgacgataagaaaaaggacgctaagaagattacattcagtaccgactccgagtccgagctggagagtaaagagtcccagaaagacgagaaaaaggataagaaggactctaaaactgataataaaaaatctgtcaaaaacgacgaagaaagtaccgacgctgacagcgaaccgaaaggtgactctaagaaaggcaaaaaagacgagaaaaaaggtaagaaagattccaaaaaagatgacaaaaagaaggatgccaagaagaacgcagaatctaccgagatggaaagcgatctggagctcaaaaaggacaagaagcacagcaaggagaaaaaaggcagtaagaaagacatcaaaaaagatgcacggaaagataccgaatccacggacgcagagttcgacgaatctagcaagaccggattcaagacttccaccaaaatcaaaggctccgacactgaatcagaggagagtctttacaagcccggcgccaagaagaagattgatgaaagcgatggaacttcagctaactcaaagatggaggggctcgaatccaagcgcggcttccggatgtctagcaagaagacaaccttcaatgagaaaggagagaaagccagtactgggcgggtgccaccgagcagggagaaaccccctctgcctgcctgtgagccttctctgccaagcccaaaggtaagaaggctgtgttggtgcaagatgccacctccccccccgaagcctagatacgcaccattaattcagcgtaggcagaggctgggagtgcgtaggtgtcagctcttaatgtag

SEQ ID NO: 184270 - DNA, 1086 bp, synthetic construct
  misc_feature 1..1086: note = Description of Artificial Sequence: Synthetic coding sequence
  source 1..1086: mol_type = other DNA
atgcaggagaaggacgccagcagccagggcttcctgccccacttccaacatttcgcaacacaagctattcacgtgggacaagatcctgagcaatggactagccgcgctgtggtccccccaatttctctgtctacaaccttcaaacagggagctcccgggcagcactctgggttcgagtacagtcggtccggcaacccaacccgcaactgcctggagaaagccgttgccgctctcgacggcgcgaaatactgcctcgcatttgcttctggactggccgcgactgtaactataacacatctgctgaaggccggcgatcagataatctgtatggatgacgtctacggggggaccaataggtactttcggcaggttgcttcagaattcggacttaaaatttctttcgtggactgctcgaagattaaactcctggaggcagccataacaccagagaccaaacgtcccctagcgttgggcgccgacatctccatgtatagtgcaactaagtatatgaacggtcattctgacgtggtcatgggcctcgtctcggtgaactgcgaatctctgcataaccgcttaagatttttgcagaatagtctcggggctgtgccgtcacccatagactgctatttatgcaatagaggcttgaaaactctccatgtaagaatggagaagcacttcaaaaatggcatggcagtggcacaatttttggagtccaatccatgggtcgagaaggtcatctacccaggactaccaagccacccacaacacgaacttgtcaagagacagtgcaccggttgtacaggcatggtgactttttatatcaagggcacgctgcaacacgccgaaatctttctgaagaatctaaagctattcacccttgccgaaagtctgggcgggttcgaatccctggcagagctccccgctattatgacccacgcatccgtgctgaagaacgaccgggacgtgctgggcatctcagacacactgatacggctttctgtgggattagaagatgaggaagatttactcgaggatctcgatcaggccttgaaggccgctcatccaccctctgggtcacacagctag

SEQ ID NO: 184271 - DNA, 1218 bp, synthetic construct
  misc_feature 1..1218: note = Description of Artificial Sequence: Synthetic coding sequence
  source 1..1218: mol_type = other DNA
atgcaggagaaggacgccagcagccagggcttcctgccccacttccaacacttcgctacccaagccatccatgtgggtcaggaccctgagcagtggacctctagggccgtggtaccacctatctctctgtctaccaccttcaagcagggagcacctgggcagcacagcggatttgagtacagcaggtctggtaatccaacacgcaattgtttggaaaaggctgtcgccgcgttagacggggccaaatactgcttagctttcgcctctggactagctgccaccgtgacaatcacacacctacttaaggccggtgaccagattatctgtatggacgacgtttacgggggtacaaataggtattttaggcaggtcgcaagtgaattcgggctgaagatctcttttgtggattgttctaaaattaagctcctggaggccgctattactccagagaccaagttagtgtggattgaaaccccgacaaaccccactcagaaagtcatcgatatagaagggtgcgcccacatcgttcacaagcatggtgacatcatcctcgttgtggacaacacctttatgtcaccttacttccaacggcctctcgccctgggagccgatatcagtatgtattctgccactaaatacatgaatggccattccgatgtggtgatgggactggtgtccgtgaactgcgaatcgctgcacaacagactgcgcttcttacagaattcacttggcgcagtgcccagccctatcgattgctacttgtgcaatagaggactcaaaaccctccacgtcaggatggagaaacattttaaaaacggtatggccgtcgcccagttcctggaaagcaatccttgggttgagaaggtgatctaccctggcctgccgagtcatcctcagcatgagctggtgaaaaggcagtgtacaggctgcaccggcatggttaccttttacataaaggggaccctccaacatgcagaaattttcctaaagaatctcaaattgttcacgttggctgaatctctgggggggttcgaaagtctggcagagctgcctgccattatgacccacgcctcagtgttgaagaacgatagagatgtcctgggcatatctgacactctgatccgcctaagcgtcggactggaagatgaggaggacctactggaagatttggaccaggccctgaaagcagctcacccgccttctggaagtcattcctag

SEQ ID NO: 184272 - DNA, 1122 bp, synthetic construct
  misc_feature 1..1122: note = Description of Artificial Sequence: Synthetic coding sequence
  source 1..1122: mol_type = other DNA
atgcaggagaaggacgccagcagccagggcttcctgccccacttccagcactttgcaactcaggctatccacgtgggccaggatcctgaacagtggaccagccgggcggtggttccccctatctctctttctacaactttcaaacagggagcgccagggcagcacagcggtttcgaatatagtagaagtggcaacccaacgcggaattgcttggaaaaagctgtcgctgccctggacggagctaagtactgcacgaaccgttacttccgacaagtagcctcggaattcggccttaagatctcatttgttgactgttctaagatcaaattgctcgaagccgcaatcacaccggagactaaactggtgtggattgaaacccccacgaaccctacacagaaagtgatcgatatcgaggggtgtgcccacattgtgcataagcacggggacataatcttggtcgttgacaacaccttcatgagcccctattttcagcgtcctcttgctcttggagcagatatcagtatgtattctgcgacaaaatatatgaacggacactctgatgttgtgatgggactggtgagcgttaactgcgaatcacttcacaaccgtctgcggttcctgcaaaattcactcggcgccgtccctagccctattgactgttacttgtgcaaccggggactgaagacccttcacgtccgaatggagaagcacttcaagaatgggatggctgttgcacagttcctggagtccaacccatgggtcgaaaaagtgatctacccaggccttccttctcacccccagcatgagcttgttaagcgccagtgcacgggctgcaccggtatggtgacattctacatcaaaggtaccttacagcacgcagaaatttttttgaagaatcttaaacttttcacactcgcagagtcactaggcggctttgaatcactggccgaactcccagccatcatgactcacgcctctgttctgaaaaatgatcgggacgtgcttgggatcagtgacacactcatccggctctcagtgggtctggaggacgaagaggatctcctggaagacctcgatcaggctctgaaggccgcgcacccacctagtggttctcattcctag

SEQ ID NO: 184273 - DNA, 1656 bp, synthetic construct
  misc_feature 1..1656: note = Description of Artificial Sequence: Synthetic coding sequence
  source 1..1656: mol_type = other DNA
atgcccagcgagaccccccaggccgaggtgggccccaccggctgccctcataggagtggtccccattcagccaagggaagtctggagaaggggtccccagaagacaaagaggctaaggagcccctctggatcaggcccgacgctcccagtaggtgcacttggcaacttggcaggccggctagcgaatctccacatcaccacaccgcgcccgccaagtccccaaagatcctccctgacatcctaaagaaaattggagatacccctatggtgcggatcaacaagatcgggaaaaagtttggcttgaagtgcgagcttttggccaagtgcgagttcttcaacgctggcggatcagtaaaggaccggattagcctgaggatgatcgaggacgcagagcgggatggaactcttaaaccaggcgacacgattattgaacccacttctggtaacacaggaatcgggcttgctttggccgcagccgtgcggggatatagatgcatcattgtaatgccagagaagatgagctccgagaaggtagacgtattgagagcattgggtgccgagattgtgcgcacacccaccaacgctcgctttgatagccccgagtcccatgtgggcgtagcctggcgcttgaagaacgaaattcctaatagccacatcctggatcaatatcgcaatgcttctaatcctctggctcattatgacactaccgcagacgagattctgcagcaatgtgatggcaagttggatatgttggtagcaagcgtggggaccggtgggactatcacgggcatagcaaggaaactgaaggaaaaatgcccaggctgtagaattattggcgtggatcctgagggatcaatcctggccgagcctgaagaactgaaccagactgagcagacaacatacgaggtggaggggattggctatgatttcattccaaccgtgctggatcgtacggtggtggacaagtggtttaagtccaatgacgaggaggcctttacctttgctcgcatgcttatagcccaggaaggcttgctgtgcggtggtagcgcgggtagtaccgtcgccgtggccgtgaaagccgcccaggagttgcaggaagggcagagatgcgtcgtgattctgccagactcagtgcggaactatatgacgaagtttctctcagatcgttggatgctgcaaaagggctttctgaaggaggaagacctgacagaaaagaagccatggtggtggcacctccgggtgcaggagctgggattgagtgctcctctgactgtcctccctaccattacttgtggacacaccatagagatcctgagggaaaaggggtttgaccaggccccagttgtggatgaggccggagtaattttgggcatggtgacacttggaaatatgctatctagcctcctcgcgggcaaggtgcaaccctcagaccaggtgggtaaggtcatttataagcagttcaagcagatcagactgaccgataccctgggaaggctgagtcatatcctggaaatggatcacttcgcccttgtggtccacgagcagattcaataccattctacagggaaaagctctcagagacaaatggtcttcggagtagttacagccatcgatctgctgaatttcgtagcagcgcaagagcgggaccagaagtag

SEQ ID NO: 184274 - DNA, 1656 bp, synthetic construct
  misc_feature 1..1656: note = Description of Artificial Sequence: Synthetic coding sequence
  source 1..1656: mol_type = other DNA
atgcccagcgagaccccccaggccgaggtgggccccaccggctgcccacaccgaagtggccctcatagcgcaaaaggctcacttgagaagggctcccctgaggataaggaagctaaggaaccactgtggattagacctgatgccccgtcccggtgtacctggcagttaggcagacctgcctcagagtccccgcaccaccacacagccccagctaagtcccccaaaatccttcctgacattctcaaaaagattggcgacacccctatggtgcggattaacaagattggcaagaaattcggactgaaatgcgaattattagccaagtgcgagtttttcaatgctggaggctctgtgaaagacaggattagccttcggatgattgaagacgccgagcgggatgggacactcaagcccggtgacactattatcgagcccacctcggggaacacaggcattgggttggccctcgccgccgcagttcgtggttacagatgcataatcgtcatgcctgagaaaatgagcagcgaaaaagtggacgtactgagagccttgggcgccgaaatagttcggacgcccaccaatgctagatttgactcacccgagtcgcacgtgggagtggcttggaggctgaagaacgagataccaaactctcacatcctcgaccagtaccgaaacgcgtctaacccgctggctcactacgataccacagcagatgaaattcttcagcagtgtgatggcaagctggatatgttggtggcttctgtcgggactggcggtacaataaccggaatagctcggaaactgaaggaaaaatgccctggatgccggataattggggttgatcctgaggggtctatcttggcagagcccgaagaactaaatcagactgagcagaccacatatgaagtggagggaattggatatgacttcattcccacagtgctggatcgtaccgtagtagataagtggtttaagagcaatgacgaggaggccttcacttttgccaggatgctgatcgctcaggaaggattattgtgtggcgggtctgcgggatctaccgtggctgtcgcagtgaaagccgctcaggagctccaggaaggccagcgttgcgtggtcattttgcccgatagtgtgagaaactacatgaccaaattccttagcgacaggtggatgctgcagaagggcttccttaaagaagaggacttgactgaaaagaaaccatggtggtggcacttacgtgttcaggagctaggcttgtctgcaccccttacggttctgccgacaattacatgtggtcacacgatcgagattctccgggagaagggatttgaccaggcccctgtcgtcgatgaggctggtgtgattctgggcatggtaaccctgggaaacatgctgtcaagtctgcttgccggtaaagtgcagcccagcgatcaagttgggaaggtgatctacaagcagtttaagcaaatacgcctgaccgatacgttagggcgcctatcccacattctggagatggaccactttgctctggtagttcatgagcagattcagtaccactccactggtaagagttctcagcgccaaatggtctttggggtggtgacggccattgacctcttaaattttgttgccgctcaggagagggaccagaagtag

SEQ ID NO: 184275 - DNA, 1656 bp, synthetic construct
  misc_feature 1..1656: note = Description of Artificial Sequence: Synthetic coding sequence
  source 1..1656: mol_type = other DNA
atgcccagcgagaccccccaggccgaggtgggccccaccggctgcccccacagaagcggccctcatagcgctaaaggtagtctcgaaaagggttcgcccgaggacaaagaggccaaagaaccgctttggattagacccgatgcaccttctcgctgcacttggcagctgggtcgcccagccagtgaatcacctcaccatcacaccgcgcctgccaagtcacccaaaattctcccagacattctgaaaaagatcggcgacacccctatggtgcggattaataaaatcggtaagaagttcgggctaaaatgcgaattgctggccaagtgcgagttctttaatgccggggggagcgtgaaggacagaatttctctgaggatgatcgaggacgccgagcgcgatggaacccttaaacctggagatactattatcgaacctacgtcggggaataccggcatcggccttgccctagcagctgccgttagaggctatagatgcatcatcgtgatgcctgaaaagatgtctagcgaaaaggttgacgtgctcagggcactaggagcagaaattgttcggacacctaccaacgcccgctttgattcgccagaaagccatgtgggtgtggcttggaggttaaagaacgagataccaaactctcacattctcgaccagtatcgtaacgcttcaaatccattggctcactatgatactacagctgatgagatactgcaacagtgcgatggcaagctagacatgctggtggcaagtgtggggacaggcggcaccatcaccggcatcgcacggaaacttaaagagaaatgtccaggctgtaggattatcggcgtcgaccccgagggtagcatactggctgagccagaggagttgaaccaaaccgagcagaccacctatgaggtagaaggcatcgggtacgattttatccccaccgtcctcgacagaactgttgttgataagtggttcaagtcaaacgatgaagaagcttttacgttcgccagaatgcttattgcccaggagggactcttgtgtggtgggtctgcaggatcaactgtcgcggtggctgtcaaggcagcccaagagcttcaagagggccagaggtgcgtggtgattttgcccgacagtgtgaggaactacatgacaaaattcctcagcgaccgctggatgttgcagaaaggattcctgaaggaggaggacctcaccgagaagaagccttggtggtggcacctgcgagttcaggagctggggcttagcgctccgctcaccgtgctccctacgatcacctgtggacatacaattgagattctcagagagaagggttttgaccaagccccggtggttgatgaagccggagtgatcttaggcatggtgaccctcgggaatatgctcagctcattattggcaggcaaggtacagccttctgaccaagtcggcaaggtgatttataagcaatttaaacaaatcaggctgaccgatactcttggaaggctgtcacatatactagaaatggatcatttcgccctggtcgtgcatgaacaaatacaatatcacagcacaggaaaatcatcccaacggcagatggtttttggggtggtgacagccatcgatctgcttaactttgtggcagcccaggagagagatcagaagtag

SEQ ID NO: 184276 - DNA, 1656 bp, synthetic construct
  misc_feature 1..1656: note = Description of Artificial Sequence: Synthetic coding sequence
  source 1..1656: mol_type = other DNA
atgcccagcgagaccccccaggccgaggtgggccccaccggctgcccccaccggagcggcccccactcagctaaaggctccctcgagaagggttcgccagaagataaagaagcgaaggagcccctatggatacgtcccgatgcacctagtagatgcacatggcaactagggaggcccgcttctgagagcccccaccatcacaccgcaccagccaaatcacctaagatcctgcctgatatcctgaaaaagattggcgacacgccaatggtgcggattaataaaatcggcaaaaagttcggtcttaaatgtgagctcttggccaaatgtgaattcttcaatgctggtggaagtgttaaggaccgcatttcgctgcggatgatcgaagatgcagaaagagatgggaccctcaaacctggtgacaccatcattgaacccacttctggcaacaccgggataggattggcattagccgcagcagtgcgaggatatagatgcattattgtcatgcctgaaaaaatgagctccgagaaggttgatgtcctcagagccttgggtgctgagattgtcaggacacccactaatgcgcgcttcgacagcccagagagtcacgtcggcgtagcttggaggctcaaaaacgagattccaaattctcacatcttagatcagtaccggaatgcgtccaaccccttagcccattatgacactacagctgatgagattctccagcaatgcgatggcaagctagacatgctggtcgcctctgtgggtacaggcgggactatcactggaatagcaaggaaactgaaagaaaagtgtcctgggtgtcggatcataggcgtcgaccctgagggaagcatcttggcagagcctgaagagctcaaccaaacagagcagaccacctacgaggtggagggaatcggctatgactttatccccaccgtgttggaccgcaccgttgtagataagtggttcaagtctaacgatgaagaagcattcaccttcgctcgaatgctgatcgcacaggagggactcctctgcggcggatctgcagggtccacagttgctgtggcggttaaggccgctcaagagcttcaggagggacagcgatgcgttgttatccttccagactccgtaaggaattacatgaccaaatttctcagcgatcgatggatgctccagaaggggttcctgaaggaggaagatctgactgaaaaaaaaccgtggtggtggcatctgagggtgcaggagctcggtttaagcgcccccctcaccgtcttacctactataacttgcggccataccatagaaatcctgcgggaaaaaggctttgaccaggctcccgtagtggacgaagctggagtgattttaggaatggtgacactgggcaatatgctaagtagtctgcttgctggaaaggtgcaaccgagcgatcaggtcggcaaagtgatttataagcaattcaaacagatccggctgaccgacacactgggccggctctcccatatactcgagatggaccattttgccctggtcgtacacgaacagatccagtaccactcaacagggaaaagctctcaacgccagatggttttcggagttgtgactgccatcgacctgttaaactttgttgccgcccaggagagagaccaaaagtag

SEQ ID NO: 184277 - DNA, 1698 bp, synthetic construct
  misc_feature 1..1698: note = Description of Artificial Sequence: Synthetic coding sequence
  source 1..1698: mol_type = other DNA
atgcccagcgagaccccccaggccgaggtgggccccaccggctgcccccatcggtccgggccacatagtgccaagggcagcctggaaaagggttccccagaagacaaggaagcaaaggagccgctgtggatccggcctgacgccccttctcggtgcacctggcaactgggccgccccgcgtccgaaagcccacaccatcataccgctccagcgaagagtccaaaaattctacctgacatactcaagaagattggcgatacccccatggtccgtattaacaagatagggaaaaaattcggcctgaagtgcgaactgcttgctaagtgtgagttttttaacgccggcgggagtgtgaaagatcggattagtctccggatgattgaggatgcagagcgggatggaaccctaaagcctggagataccattattgaacccactagcggcaatacagggatcggtctcgcccttgccgccgccgtcagaggataccgctgtataatcgtaatgccagagaaaatgagtagcgagaaggtagacgtacttagggctctcggagcagaaattgtgcgaaccccgacaaacgccaggttcgacagtcccgagagtcatgtcggggttgcctggcgcctaaaaaatgaaattccgaactcccatatactagatcagtacaggaacgctagcaaccctttagcacactacgacaccacggcagatgagattctgcagcaatgcgatgggaaattagatatgctggtcgcttcggtggggacaggcggaaccatcacaggtattgcccgcaaactgaaagagaaatgcccaggctgccgcattattggcgtggaccccgagggctccatcctggccgagcctgaggaactgaaccagactgagcagaccacatatgaagttgaagggatcggttacgatttcatcccaacagtgctggaccgcacggtagtggacaagtggttcaagtctaatgacgaggaggctttcaccttcgcccgaatgctgatcgcccaggagggcctattgtgcggcggttccgcgggtagcacagttgccgtagccgtgaaggctgcccaagagctgcaagaaggtcagcgttgcgttgtcatcttaccagactctgtcagaaattacatgaccaaatttctgagcgatcgttggatgctgcaaaagggcttcctcaaagaggaagacctgacggagaaaaagccctggtggtggcacttgagagttcaagagctgggcctctcagcccctctgacggtgctgccgacgatcacctgtggccacaccattgagatcttgagagagaaaggatttgatcaggcccccgtggtggatgaggcgggagtaatcttgggaatggtgacacttggaaacatgctgtcctctctccttgcagggaaagtacagccaagtgaccaggtgggcaaggttatctataagcagttcaaacagatccgcctgaccgacacgttgggtcgccttagccacatcttggagatggaccatttcgcattggtggtacacgaacagatccagtcgcaggatcaggcttgggccggtgtggttgggggccctgcggatcattccacaggtaagagtagccagcgacagatggtctttggcgtcgtgacggctatagacctcctcaacttcgtggctgcccaagagcgcgatcagaaatag

SEQ ID NO: 184278 - DNA, 534 bp, synthetic construct
  misc_feature 1..534: note = Description of Artificial Sequence: Synthetic coding sequence
  source 1..534: mol_type = other DNA
atgcccagcgagaccccccaggccgaggtgggccccaccggctgcccacaccggtctggcccgcattccgcaaaggggtctctcgagaagggctcaccagaagacaaggaggccaaagagccactgtggatccggcccgatgctccaagccggtgcacctggcagctgggcagacctgcgagtgaatcccctcaccatcatactgccccagccaaatcccctaaaattctgccggacatcctgaagaagatcggagatacgcccatggtccgaattaataaaatcggaaaaaaattcggtcttaaatgtgagctgctagccaagtgcgagttctttaacgccggcggctctgtaaaagatcgtatcagccttaggatgattgaagacgctgaacgggatggtaccctgaagcctggcgacacaattatcgagcccactagcggcaatacaggcatcggcctcgcacttgctgcggctgtgcgtgggtatcgttgcatcatcgttatgcccgagaaaatgtctagcgagaagtag

SEQ ID NO: 184279 - DNA, 1527 bp, synthetic construct
  misc_feature 1..1527: note = Description of Artificial Sequence: Synthetic coding sequence
  source 1..1527: mol_type = other DNA
atgcccagcgagaccccccaggccgaggtgggccccaccggctgccctcacagatccggcccgcaccaccacaccgccccggcaaagagcccgaagatccttcccgatatactgaaaaagatcggggacacccctatggtgcgtatcaataaaattggcaaaaaattcggcctaaagtgcgaactgctggctaagtgtgaatttttcaatgccggggggtctgttaaggacaggatcagcctcaggatgattgaggatgcagaacgggatgggacacttaagcctggggacacaatcatcgaacccacttctggaaacaccggaattggccttgcgcttgccgcagcagtccgcggttatagatgtattatagtgatgccagaaaaaatgtcttcagaaaaggtcgatgtgttgagggccttgggggccgaaattgttcgaaccccaaccaacgctaggttcgactcaccggaatctcatgtaggagtcgcatggcggttgaagaatgaaattccaaatagccacatcttggatcagtaccgaaacgcaagcaatcctctggctcactatgacaccactgcggatgagatactgcagcagtgtgatggaaagcttgacatgttggtggctagtgtggggactggagggactattacaggaatcgcgcgcaagctgaaagaaaagtgcccaggttgtaggattattggagtcgatcccgaaggcagcatcctggcagaaccagaggagctaaaccagacagagcaaaccacgtacgaggtggagggaattggctacgacttcatacctaccgtgctggaccgcacagtggtggacaagtggttcaaatcaaatgatgaggaagcgttcaccttcgcaaggatgctgatagcccaagaaggactcctgtgtgggggaagtgcaggaagtacagtggccgttgcagtgaaggccgctcaggagttacaggaggggcaacggtgcgtggtcattctccctgattctgtgcggaactacatgacaaagttcctgtccgatcgctggatgcttcagaaaggatttctgaaagaagaggatctaaccgagaaaaaaccgtggtggtggcacttgcgcgttcaagaattgggtttgtctgctccgctgaccgtgctgcctactattacatgtgggcataccattgagattctcagagaaaagggattcgaccaggcccctgtggttgatgaggccggcgtaattctggggatggtgacccttgggaacatgctcagctcactcctcgcaggcaaagtacaacccagtgaccaggtgggtaaagttatatacaaacagttcaaacagataaggttgacggacacacttggaagactgtctcacatcctcgagatggaccatttcgccctagtcgtccacgagcaaatccagtaccacagtactgggaaatccagccagcgtcagatggtgtttggagtggtcaccgctatcgacttgctgaactttgtggcagctcaggagcgtgatcagaaatag

SEQ ID NO: 184280 - DNA, 1392 bp, synthetic construct
  misc_feature 1..1392: note = Description of Artificial Sequence: Synthetic coding sequence
  source 1..1392: mol_type = other DNA
atggtgcggatcaacaagatcggcaagaagttcggcctgaagtgcgaattgctggccaagtgtgagtttttcaacgcaggcggctctgtgaaggacagaatatctcttaggatgattgaagacgcggagagagacgggaccctcaagccaggggataccatcatagagcccacttcgggcaataccggcatcggcctggcactagcggcggccgtaaggggataccgttgtataattgtcatgcccgagaagatgagctctgaaaaggtagacgtcttgcgcgccctcggcgccgaaattgtgcgcactccgaccaatgcgcggtttgactcccccgaatctcatgtgggcgtggcctggagactcaagaacgaaataccaaatagccatatcctagaccagtaccggaatgcatccaatcctctggcgcattatgatacaactgctgatgagatattacagcaatgcgatgggaagcttgatatgctcgttgcatctgttggcacgggcggtacaataacggggatagcgcggaaactgaaggaaaaatgtcccgggtgcagaatcattggtgtcgatcccgaagggtctatactcgctgagcctgaagaactgaaccaaaccgaacagacaacttacgaggtggaagggatcggttatgatttcatcccgaccgttctggatcggacagtggtggataagtggttcaagagcaatgatgaggaggcctttacattcgcccggatgttgatagctcaggagggattgctgtgcggtggatccgccggcagtacagtcgccgtggctgtgaaagctgcccaggaactccaggagggccagaggtgtgttgtcatactgcccgactctgtgagaaactatatgaccaaatttctgagcgaccggtggatgctgcagaagggctttctgaaagaagaagacctgacggagaagaagccatggtggtggcatcttcgggtccaagagctgggactttccgctcctctaacggttctgcccacaatcacttgtggacacactattgaaattcttcgtgagaaaggctttgaccaggcacctgtggttgacgaggctggggtcatcttgggcatggtcacgctgggaaacatgctgtcctccctcttggccggaaaggtccagccttccgatcaggtcgggaaggtcatttacaaacagttcaaacaaatccgtctcacagacactcttggaaggctgtcacacatcctcgaaatggatcactttgccctggtagtgcatgagcaaattcagtaccatagtaccggcaaatcttcacaacggcaaatggtgtttggcgttgtgacggctattgatctgcttaactttgtcgccgcacaggagcgggatcagaaatag

SEQ ID NO: 184281 - DNA, 312 bp, synthetic construct
  misc_feature 1..312: note = Description of Artificial Sequence: Synthetic coding sequence
  source 1..312: mol_type = other DNA
atgatggccgagccctggcaggccctgcagctgctgctggccatcctgcttaccctcatggctctgccctaccaagcccgaaaaaagacattcctttctgtgcacgaggtaatggccgttgagaattatgccaaagacagcttgcagtggataacagatcagtataacaaagaatcagacgataaatatcactttagaatttttcgtgttctgaaggtgcaaaggcagcaggtgaattgctttttctctgtctttgctgtcccatggtttgagcagtataagattctgaacaagtcatgctcatcagactag

SEQ ID NO: 184282 - DNA, 417 bp, synthetic construct
  misc_feature 1..417: note = Description of Artificial Sequence: Synthetic coding sequence
  source 1..417: mol_type = other DNA
atgatggccgagccctggcaggccctgcagctgctgctggccatcttactcaccctaatggctctaccctatcaagccaggaagaaaactttcctgagtgtgcacgaagtaatggccgtagaaaactacgccaaggacagtcttcagtggatcaccgatcagtataataaggagtcagacgataagtatcactttcgaatcttccgagttctcaaagtgcagagacaggtgacggatcaccttgagtaccatctgaatgtagagatgcagtggaccacatgccagaagccagagaccactaactgcgtgccccaggaacgggagctgcataagcaggtaaattgcttcttttctgtgttcgctgtgccttggtttgaacaatataaaatactcaataagtcttgttcttccgactag

SEQ ID NO: 184283 - DNA, 297 bp, synthetic construct
  misc_feature 1..297: note = Description of Artificial Sequence: Synthetic coding sequence
  source 1..297: mol_type = other DNA
atgatccccggcggcctgagcgaggccaagcccgccacccccgagatccaggagatcgttgacaaagttaaacctcagctggaggagaaaaccaatgagacctatggtaaactcgaggctgtgcagtacaagactcaagtcgtggccgggaccaactattacatcaaggttcgcgcaggcgataacaaatacatgcacctcaaagtatttaagagtctgcccggacagaacgaggaccttgtgctcactggttaccaggtggataagaataaagatgacgagctcactggcttctag

SEQ ID NO: 184284 - DNA, 297 bp, synthetic construct
  misc_feature 1..297: note = Description of Artificial Sequence: Synthetic coding sequence
  source 1..297: mol_type = other DNA
atgatgtgcggcgcccccagcgccacccagcccgccaccgccgagacgcagcatattgccgaccaggtcaggagtcagttggaggagaaagaaaacaaaaagttcccagtctttaaggcagttagctttaagtcacaagtcgttgccggcactaactacttcataaaggtacatgttggagatgaagattttgtccatctgcgcgtgttccagtcactacctcatgagaataaaccacttactctgtcaaactaccaaacgaacaaggccaagcatgatgagctaacctatttttag

SEQ ID NO: 184285 - DNA, 441 bp, synthetic construct
  misc_feature 1..441: note = Description of Artificial Sequence: Synthetic coding sequence
  source 1..441: mol_type = other DNA
atggccggccccctgcgggcccccctgctgctgctggccatcctggccgtcgccctcgctgtgagtccagccgccggctcttccccggggaaaccccctcggcttgttggtggaccgatggacgcctccgtcgaggaggagggggtgcgcagagcactcgatttcgccgtgggcgagtacaataaggcttctaatgatatgtatcacagtcgcgcactccaggtcgtgagagctcgcaaacagattgtggctggtgtcaattacttcctggacgtggagctcggccggactacatgtactaaaacccaaccaaatctagataattgcccttttcacgaccagccacacctgaagaggaaggcattttgtagcttccaaatatatgctgtgccatggcagggtactatgacactgagcaagagtacttgccaggacgcttag

SEQ ID NO: 184286 - DNA, 441 bp, synthetic construct
  misc_feature 1..441: note = Description of Artificial Sequence: Synthetic coding sequence
  source 1..441: mol_type = other DNA
atggccggccccctgcgggcccccctgctgctgctggccatcctggcagtcgcgctggccgtgtcacctgccgcaggatcttctccaggaaagccacccaggttggtgggaggtccaatggacgcttctgtcgaggaggaaggtgtccgtcgggcactcgacttcgcggttggagaatacaataaagcatcgaacgacatgtatcactctagagccctccaggtagtccgtgctcgtaagcagattgtggctggagtgaactactttcttgatgttgaactgggtaggaccacctgtaccaaaacacagccgaatcttgacaactgccctttccatgatcagcctcatttaaagcggaaagccttttgtagcttccagatctacgccgtaccctggcagggtaccatgactctgtcaaaatcaacctgtcaggatgcctag

SEQ ID NO: 184287 - DNA, 441 bp, synthetic construct
  misc_feature 1..441: note = Description of Artificial Sequence: Synthetic coding sequence
  source 1..441: mol_type = other DNA
atggccggccccctgcgggcccccctgctgctgctggccatcctggctgtggcactggcggtctcccctgctgcagggtctagtcctgggaagcctccacgccttgtgggcgggcctatggacgcctccgttgaggaggagggggtgagacgtgctcttgactttgcagtgggggagtacaacaaggcgtccaatgacatgtaccactctcgggcgcttcaggtggtgcgagcccgcaagcagattgtggctggcgtaaattactttctagatgtggaactcggcagaaccacatgtacaaagacacaaccgaatctggataattgcccatttcacgaccagccgcacctgaaaaggaaggccttttgcagtttccaaatctacgctgttccttggcaggggactatgacattatctaagtctacgtgccaggatgcctag

SEQ ID NO: 184288 - DNA, 429 bp, synthetic construct
  misc_feature 1..429: note = Description of Artificial Sequence: Synthetic coding sequence
  source 1..429: mol_type = other DNA
atgatgtggcccatgcacacccccctgctgctgctgaccgccctgatggtcgcggtggctggcagtgcctccgcccagtcacggaccctggccgggggcattcacgctacagatttgaatgacaagagtgtgcagtgcgcgctggacttcgccattagcgaatataacaaggttattaataaggacgaatactacagccggcctcttcaggtgatggccgcttaccagcagattgttgggggtgtgaactactacttcaatgtcaaatttggaaggacaacctgtaccaagtctcaaccgaacctggataattgtccgtttaatgaccaaccgaagcttaaggaggaggaattctgcagctttcagataaacgaggttccctgggaagacaagatctccattctcaattacaaatgtaggaaggtttag

SEQ ID NO: 184289 - DNA, 1578 bp, synthetic construct
  misc_feature 1..1578: note = Description of Artificial Sequence: Synthetic coding sequence
  source 1..1578: mol_type = other DNA
atggccaccctgctgcggagcaagctgagcaacgtggccaccagcgtaagcaacaagagccaagcgaaaatgtctggcatgtttgcccggatgggttttcaggcagccactgatgaggaagctgtagggtttgcccactgcgacgatcttgacttcgaacatagacagggcttgcagatggacatcctgaaggcggaaggggagccatgcggcgacgaaggtgccgaggcaccagtggagggagatatccactatcaaaggggatccggcgctccactacccccatccggaagcaaggatcaggtaggtgggggaggcgagtttggtggccatgataagcctaagatcacggcttgggaggctgggtggaacgtgaccaacgccattcagggtatgtttgtcttgggcctaccctacgccatcctacacggaggttacttggggctgttcctaattatcttcgccgctgttgtatgttgttacaccggaaagatcctgatcgcctgcctgtacgaggaaaatgaggatggagaggtggtgcgagtgagagactcctatgtggccatcgcaaacgcctgctgcgctccccgtttccctacattgggcggtagggtggtgaacgtagctcagattatcgaactggtgatgacgtgtattttgtacgttgtggtcagcggcaacctaatgtacaacagcttcccagggctacccgtaagccagaagtcctggagtattatcgcaacggcagtattactgccctgcgcctttctcaaaaacctcaaagcggtttccaaattttcactcctctgtactttagcccacttcgtgattaacatcctagtgattgcttactgtttgtctcgggctagagactgggcgtgggagaaagtgaaattctacatagatgttaagaagtttcctataagcattggcatcattgtctttagttacacctcccaaatttttttgcctagcctggagggcaatatgcagcagcctagcgaattccattgtatgatgaattggacccatattgctgcttgtgtgttgaagggattgttcgctctagtcgcctatctgacgtgggcagatgaaaccaaagaggtcatcacagataaccttcccggatccattcgcgccgtggttaacattttcctcgtggccaaggccttgttgagttatcctcttccatttttcgcagctgtcgaggtgctcgaaaaaagcctcttccaggagggcagccgagctttcttccccgcatgctacagcggggatgggaggttaaagtcttggggacttactcttcgctgtgctcttgttgtatttacactcttaatggctatttatgtgcctcactttgctttgcttatgggtctgactggaagcctcactggcgctggtttatgtttcctgttgccatccctattccacttgcgattactttggaggaagttgctttggcaccaagtcttttttgacgttgctatctttgtgattgggggcatttgttcagtttctggatttgtccactccttggagggtttgatcgaagcttataggactaatgctgaggactag

SEQ ID NO: 184290 - DNA, 426 bp, synthetic construct
  misc_feature 1..426: note = Description of Artificial Sequence: Synthetic coding sequence
  source 1..426: mol_type = other DNA
atggcctggcccctgtgcaccctgctgctgctgctggccacccaggccgtggccctcgcttggagcccccaggaagaggatcgaatcatcgaaggagggatatatgacgctgacctgaatgacgagagggtgcagcgggccctccacttcgttatctccgaatataacaaggccaccgaggatgaatactacagacgtctgctgcgcgtccttcgcgccagggagcagatcgtcgggggcgtcaactacttttttgacattgaggtcgggcgcacgatttgcaccaaatcccagcccaatctcgacacatgtgccttccacgagcaacccgaactccagaagaagcaactgtgttcttttcaaatctacgaagtgccgtgggaggatcggatgtctttagttaacagtcgatgtcaggaagcctag

SEQ ID NO: 184291 - DNA, 426 bp, synthetic construct
  misc_feature 1..426: note = Description of Artificial Sequence: Synthetic coding sequence
  source 1..426: mol_type = other DNA
atggcccagtacctgagcaccctgctgctgctgctggccaccctggccgtggcacttgcttggtcacctaaggaggaggatcgtattatccccggaggcatctataatgctgatctgaacgatgagtgggtccagcgtgcgctgcacttcgccatttctgagtacaataaggccactaaagacgattattataggcgaccccttcgggtgctgcgggcacgccagcagactgtgggcggggtgaattactttttcgacgtagaagtgggaagaacaatatgcaccaaaagccagccaaatctcgatacatgcgccttccatgagcagccagaactgcagaaaaagcaactatgcagctttgagatatacgaagtgccatgggaaaaccggcgctccctggtgaaatcgcgatgtcaggaatcctag

SEQ ID NO: 184292 - DNA, 426 bp, synthetic construct
  misc_feature 1..426: note = Description of Artificial Sequence: Synthetic coding sequence
  source 1..426: mol_type = other DNA
atggcccagtacctgagcaccctgctgctgctgctggccaccctggcagtcgcactagcttggtcccctaaggaagaggatcgcatcattcctggaggcatttacaatgctgatctgaatgatgaatgggtacagagggcgctacacttcgctatctcagaatataacaaggccacaaaggacgattactaccggaggcctctaagagttttgagagcgagacaacagactgttggcggcgtgaattacttttttgacgtggaggtgggccgtactatttgtaccaagagccagcctaacttggacacgtgcgcatttcatgaacaacctgagcttcaaaagaagcagctgtgttcttttgagatttacgaagtgccgtgggaaaatcgcaggagccttgtcaagtctcggtgccaggaatcctag

SEQ ID NO: 184293 - DNA, 582 bp, synthetic construct
  misc_feature 1..582: note = Description of Artificial Sequence: Synthetic coding sequence
  source 1..582: mol_type = other DNA
atgcccaactggggcggcggcaagaagtgcggcgtgtgccagaagacggtgtacttcgctgaggaagtgcagtgtgaaggtaactctttccacaagagctgtttcctgtgcatggtgtgcaaaaagaatctggacagtaccactgttgctgtgcacggcgaggagatttactgcaaatcttgttacggaaagaagtacggccccaagggatatggttatgggcagggtgctggcacattaagtacagataagggagaatcccttggcatcaagcatgaggaagcgcccgggcatcgtcccacaaccaatcctaacgccagcaagttcgcccagaaaatcggcggttccgagagatgtcccagatgctcacaggccgtttacgccgcagagaaagtcatcggcgctgggaagagctggcacaaggcctgcttcaggtgtgcaaagtgtggcaagggcttggagtccacaaccctggccgataaagatggcgaaatctattgtaaaggctgctatgccaagaactttggccccaaaggttttggattcggccagggtgctggggccctcgtgcacagcgagtag

SEQ ID NO: 184294 - DNA, 582 bp, synthetic construct
  misc_feature 1..582: note = Description of Artificial Sequence: Synthetic coding sequence
  source 1..582: mol_type = other DNA
atgcccaactggggcggcggcaagaagtgcggcgtgtgccagaagactgtctactttgctgaggaagtccagtgcgagggaaattcctttcacaagtcttgctttctgtgtatggtatgcaagaaaaatcttgatagcacaacggtggctgtgcacggggaggagatttattgcaaaagctgctacgggaagaagtatggtccaaaaggatatggctacgggcagggggccggcactctaagcacggataagggggaatctttaggcatcaagcatgaggaagcgcctggccatcgcccgaccacaaaccccaatgcctccaaatttgcacagaaaatcggcgggtcagagcgatgccctcgctgctctcaggcagtctatgcagctgaaaaggtcatcggagcgggaaagtcctggcataaagcatgcttccgctgcgccaaatgcggaaaaggactggagagcacgaccttggctgacaaggatggggaaatttattgcaaagggtgctacgccaaaaacttcgggcctaaaggattcggtttcgggcagggagccggagccctggtacacagcgagtag

SEQ ID NO: 184295 - DNA, 582 bp, synthetic construct
  misc_feature 1..582: note = Description of Artificial Sequence: Synthetic coding sequence
  source 1..582: mol_type = other DNA
atgcccaactggggcggcggcaagaagtgcggcgtgtgccagaagaccgtatactttgccgaagaggtgcaatgtgaaggtaacagtttccataagtcttgctttctgtgtatggtatgcaaaaagaacctggatagtaccaccgtggcggtgcacggagaagagatctattgcaaatcatgctacggcaagaagtacggaccaaagggctacggctacgggcagggagcgggtaccctgtccactgacaaaggtgagtctctcgggatcaaacatgaagaagctccgggccataggcccacgaccaaccccaacgcatcaaagttcgctcagaaaatcggagggtctgaaaggtgcccacggtgctcccaagcggtctatgctgctgaaaaagtgattggggccggaaaatcctggcataaagcatgcttccgatgtgctaaatgcgggaagggcctggagagcacgacactagctgacaaggacggggagatttattgcaagggatgctacgccaagaatttcggccccaagggctttggatttggtcaaggcgccggggcacttgtacactccgaatag

SEQ ID NO: 184296 - DNA, 582 bp, synthetic construct
  misc_feature 1..582: note = Description of Artificial Sequence: Synthetic coding sequence
  source 1..582: mol_type = other DNA
atgcccaactggggcggcggcaagaagtgcggcgtgtgccagaagaccgtgtacttcgcagaagaggtgcagtgcgaaggaaatagctttcataaatcctgctttctgtgtatggtctgtaaaaagaaccttgatagtacaacagtggccgtgcacggggaggagatatactgcaagagctgttacggcaaaaagtatggcccgaaggggtacgggtacgggcagggcgcaggtactttgtcaactgataaaggcgaaagcctgggcatcaaacacgaggaggcccccggtcaccgacccaccactaaccctaacgcctccaaattcgcccagaagatcggggggtcagagaggtgtcccaggtgctctcaagcagtctatgcagccgaaaaagtgatcggggcaggtaaatcctggcacaaggcctgcttccgatgtgctaaatgtggaaaaggactcgagagtaccacccttgccgataaggacggtgagatttactgcaaaggctgctacgcgaaaaatttcgggccgaaggggttcggttttgggcagggagcaggggccctggtgcactcggaatag

SEQ ID NO: 184297 - DNA, 513 bp, synthetic construct
  misc_feature 1..513: note = Description of Artificial Sequence: Synthetic coding sequence
  source 1..513: mol_type = other DNA
atgcccaactggggcggcggcaagaagtgcggcgtgtgccagaagacagtctatttcgctgaagaggtgcaatgcgagggcaattcatttcataaaagttgctttctgtgcatggtatgtaaaaagaatctcgacagtactaccgtggccgtgcacggggaagaaatctattgtaagagttgttacggcaaaaaatacggtcccaaagggtacggctatgggcagggggctgggacaaatcctaatgcaagcaaatttgcacagaagattggcggcagcgagcgctgtcctcgatgttctcaagcagtgtacgctgccgagaaggttattggcgccgggaaaagctggcacaaggcctgcttcagatgcgcaaagtgcggcaaagggctggaatccacaacgctcgcagacaaagacggagagatctactgtaaaggttgctatgcgaagaattttggcccaaaaggcttcggcttcgggcagggggccggcgcactggtgcacagcgaatag

SEQ ID NO: 184298 - DNA, 582 bp, synthetic construct
  misc_feature 1..582: note = Description of Artificial Sequence: Synthetic coding sequence
  source 1..582: mol_type = other DNA
atgcccgtgtggggcggcggcaacaagtgcggcgcctgcggccggactgtttaccacgctgaagaggttcagtgcgatggacgatctttccacagatgctgtttcttgtgcatggtatgcagaaaaaacctcgattccacaacggtggccattcacgacgaggagatttattgcaaaagctgctacgggaaaaagtacggccctaagggatacggatatggccagggtgccggaaccctgaacatggatcggggcgagcggctcgggattaaaccggagtctgttcagccgcacaggcctacaactaatcccaataccagcaaatttgctcagaaatacggaggggccgagaagtgctcccgctgtggcgactccgtttatgcagcagagaagatcatcggggcaggtaaaccttggcacaagaattgcttccgttgtgctaagtgtggaaagtctctggaatctacaactcttacagagaaggaaggcgagatctattgcaagggatgttacgctaagaattttggtccaaaaggattcgggtatgggcagggggcaggcgctttggttcacgcccagtag

SEQ ID NO: 184299 - DNA, 582 bp, synthetic construct
  misc_feature 1..582: note = Description of Artificial Sequence: Synthetic coding sequence
  source 1..582: mol_type = other DNA
atgcccgtgtggggcggcggcaacaagtgcggcgcctgcggccggacagtttaccacgctgaagaagttcaatgcgatgggcgctctttccatcgttgctgcttcctgtgtatggtctgcagaaagaatcttgattccacaaccgtcgccatccacgacgaagagatttactgcaagagttgttacggcaaaaagtacggccccaagggctacgggtacggacagggcgctggcacgttgaacatggatcggggcgaacgcttaggtattaagccagaatcggtgcagccccaccgccccacaactaaccccaatactagcaaatttgcacaaaagtatggcggcgcagagaaatgttcccgatgtggcgactcagtgtatgccgccgagaaaataatcggcgctggcaagccctggcataagaattgcttcagatgtgcaaagtgtggcaagtcacttgagtctactacacttacagaaaaggagggggagatttattgcaaaggttgttatgccaaaaactttggcccgaaaggcttcgggtacggccaaggggctggcgcactagtccatgcacagtag

SEQ ID NO: 184300 - DNA, 585 bp, synthetic construct
  misc_feature 1..585: note = Description of Artificial Sequence: Synthetic coding sequence
  source 1..585: mol_type = other DNA
atgcccaactggggcggcggcgccaagtgcggcgcctgcgagaagacggtttaccacgccgaagagatacagtgtaatgggaggagcttccataagacttgctttcactgtatggcctgccgaaaggcactggacagcacaaccgtggctgcacacgaatcagagatctattgcaaggtgtgttacggtcgcaggtacggtccgaaaggcatcggctatggccagggagccggttgtctttcaacggatacaggtgaacacctgggtcttcagtttcagcagagtccaaaacccgcgagaagcgtgactacctctaatcctagcaagtttaccgcgaagtttggcgaatcggagaaatgccctagatgcggcaaaagcgtgtacgcagcggagaaggtaatgggggggggaaagccttggcacaaaacctgcttccgctgtgctatttgtggcaaaagtcttgagtctactaatgttacagataaggacggagaattatactgtaaagtgtgttatgccaaaaatttcggaccgactggcatcggatttggtggtttaactcagcaggtggagaaaaaagagtag

SEQ ID NO: 184301 - DNA, 585 bp, synthetic construct
  misc_feature 1..585: note = Description of Artificial Sequence: Synthetic coding sequence
  source 1..585: mol_type = other DNA
atgcccaactggggcggcggcgccaagtgcggcgcctgcgagaagaccgtgtaccacgcggaggagatccaatgcaacgggagaagtttccacaaaacttgtttccactgcatggcctgccgaaaggccttggatagtaccactgtggctgctcatgaatctgagatctactgtaaggtatgctacgggagacgttacggaccaaagggtatcggctacggacagggagccggctgtttatccactgacaccggggagcatctgggactgcagtttcagcagtcaccgaaacctgcccgctctgtaacaacctctaatccaagtaagtttaccgccaagttcggcgagagcgaaaagtgccccaggtgcggaaagtctgtgtatgcggctgagaaggtaatggggggtggaaagccatggcataaaacttgtttcaggtgtgcaatttgtgggaagagtttggaaagcacaaatgttaccgacaaagacggcgagctctactgcaaagtgtgctacgctaagaatttcggtcctaccgggataggcttcggaggactgacccaacaagtggagaagaaagagtag

SEQ ID NO: 184302 - DNA, 1365 bp, synthetic construct
  misc_feature 1..1365: note = Description of Artificial Sequence: Synthetic coding sequence
  source 1..1365: mol_type = other DNA
atgttcctggcccagcggagcctgtgcagcctgagcggccgggccaagttccttaagaccattagcagctccaaaatcctgggcttcagtacatcagctaaaatgagtcttaaatttactaacgcgaagaggattgagggcctagatagtaatgtctggattgaatttacgaagcttgctgcagatcccagcgtagtgaacctcgggcagggtttccccgacatttcacctcctacctacgtaaaggaagaactgtcaaagatagctgccatagacagtttgaatcaatatacacggggctttggtcatccatccctagtgaaagcccttagctacctctacgaaaaattataccaaaagcagattgactcaaataaagaaattcttgttaccgtcggcgcttacggttctctgtttaacaccatccaggcactgatcgacgagggcgacgaagtgattctgatagtaccattctacgactgttatgagcctatggtgagaatggctggggctacgcccgtattcatacccctgcgttccaaacctgtttacggcaaacgctggtcaagttccgactggacactggacccccaggaactcgaaagtaagttcaactccaaaaccaaggcgattatcttgaacacgccgcataatcctcttggcaaagtgtataatcgagaagagttgcaggtgatagctgacctgtgcatcaaatatgacactctgtgtatttccgatgaggtgtatgaatggctcgtctactctggtaacaaacacttgaaaatcgcaactttccccggcatgtgggagcgcaccattaccatcggttctgcagggaagaccttttctgttaccggttggaaacttgggtggtcaattggcccaaaccacttgattaagcatttgcaaacggttcaacagaacaccatatacacctgtgcaacaccacttcaggaagctttggcgcaggccttctggatcgatatcaagcgtatggacgaccccgagtgctatttcaactcactgcctaaggaactggaggtgaaaagggaccggatggtcagattgctggaatccgtgggactgaaacctattgtccccgacggaggatatttcatcattgcagacgtgtcactgttggacccggacttatcagatatgaagaacaatgagccctacgattataagttcgtgaagtggatgactaagcataagaaactcagtgccattcctgtatctgcattctgtaactccgaaactaagtctcagttcgagaaattcgtgaggttctgtttcatcaagaaggatagcaccctggatgccgcagaagagattatcaaagcgtggtcagtgcagaagtcttag

SEQ ID NO: 184303 - DNA, 504 bp, synthetic construct
  misc_feature 1..504: note = Description of Artificial Sequence: Synthetic coding sequence
  source 1..504: mol_type = other DNA
atgttcctggcccagcggagcctgtgcagcctgagcggccgggccaaatttctcaagacaatctcatcaagcaagatcctgggcttcagtacttcagccaagatgtcactgaagttcacaaatgctaagcggatcgagggtctagactcaaatgtttggattgagtttaccaagcttgctgccgatcctagtgtcgtgaacttaggtcagggatttcccgacatctcacccccaacatatgtgaaggaagaattgagcaagatcgccgccatagatagcttgaaccagtataccaggggattcgggcacccatctttggttaaggccttgtcctacctgtacgaaaaattatatcagaaacagattgatagtaataaagagatccttgtgacagtgggcgcctacggttcactctttaataccatccaggccttgatagatgaaggggatgaatacaacgcatgtacagtgaagtttaccaatctcaaatgcaccgccggttag

SEQ ID NO: 184304 - DNA, 789 bp, synthetic construct
  misc_feature 1..789: note = Description of Artificial Sequence: Synthetic coding sequence
  source 1..789: mol_type = other DNA
atgttcctggcccagcggagcctgtgcagcctgagcggccgggccaagttcctgaaaacaatctctagctccaagatccttggtttcagcacgagtgcaaagatgagccttaaattcacaaacgctaagaggattgaaggtcttgacagtaatgtctggattgaatttactaaacttgcagccgatccatctgttgtgaacctgggtcaggggtttccggacatctcaccacctacctacgtcaaagaagagctaagcaaaatcgcagccatcgattccctaaaccagtacactcgcgggtttgggcatccttctctagtgaaggccctgtcatatttatatgaaaagctgtatcagaaacagatagatagtaacaaggagattctggtcacagtcggagcgtatggcagtctattcaatactatacaggcacttattgatgagggcgacgaggtgattcttatcgtgccattttatgattgttacgagcccatggtgcgcatggctggtgcgacccctgtgtttatccccttgcggtccaagcccgtgtatggaaaacgctggtcaagcagtgactggacattagatcctcaggagctagaatctaagttcaatagcaaaactaaagcaattatactcaacaccccacataaccccctcgggaaggtgtacaatcgcgaggagctgcaggtgatcgctgacctgtgcattaaatatgacacgctctgtatctctgatgaagtgtacgagtggctcgtctactcgggaaacaagcatctaaaaatctag

SEQ ID NO: 184305 - DNA, 1263 bp, synthetic construct
  misc_feature 1..1263: note = Description of Artificial Sequence: Synthetic coding sequence
  source 1..1263: mol_type = other DNA
atgagcctgaagttcaccaacgccaagcggatcgagggcctggactctaatgtgtggatagagttcacaaagctcgcagcggatccttctgttgtgaacttgggacaagggtttcccgacatctcaccccctacctacgtaaaggaagaactgagcaaaattgccgcgattgactctcttaatcaatacaccagaggtttcggccaccccagcctcgtgaaggcactttcttacttgtacgagaagctctatcaaaagcagatcgattcaaacaaggagatcctcgtgacggtaggggcatatgggtccctgtttaataccatccaggccctcattgacgagggtgacgaagtgattctgatcgtccctttctacgactgctatgagcccatggtgaggatggccggcgcaacgccagtctttattccactacgcagcaaacccgtttatggcaagaggtggtcctcctccgattggaccctcgacccacaagagctggagtctaagttcaattcaaagacaaaggcaattatcctcaacacacctcacaaccccctcggaaaagtgtacaatcgcgaggagctgcaggtcatagctgacctatgcatcaagtacgacacgctttgcattagcgacgaagtgtatgagtggctcgtgtacagcgggaataaacacctgaaaatagccacctttcccggcatgtgggagaggaccatcaccattggaagtgccggtaaaacctttagcgtgacaggctggaagctgggctggtcaatcggtccaaaccacctaattaagcacctgcagaccgtccaacagaacacaatctacacctgcgctacaccactgcaagaggccttggctcaggctttctggattgacataaaacggatggacgatccagagtgttacttcaattcattgcctaaagaactggaggttaaacgcgatcgcatggttcgacttctggaatcagtgggccttaaacctatagtccccgatggcggatactttatcatcgcagatgtcagtctactggatcccgatctgtctgacatgaagaataacgaaccctacgattacaagttcgtaaagtggatgaccaaacacaaaaaactctctgctatccccgtgtccgctttctgtaatagcgagacaaaatctcagtttgaaaaattcgtgcggttctgctttattaaaaaagactctacactcgatgccgccgaggagatcatcaaggcgtggtccgtgcagaaatcttag

SEQ ID NO: 184306 - DNA, 1269 bp, synthetic construct
  misc_feature 1..1269: note = Description of Artificial Sequence: Synthetic coding sequence
  source 1..1269: mol_type = other DNA
atggccaagcagctgcaggcccggcggctggacggcatcgactacaacccctgggttgaattcgtgaagctcgcgagcgagcacgacgtggttaacttgggccagggcttccccgacttcccccctccagatttcgcggtggaagccttccagcacgctgtgagcggtgactttatgttaaatcagtacaccaaaaccttcggctatcccccactgaccaagattctggcaagcttttttggggaactattagggcaggagattgaccctctccgcaacgttctggttactgtgggcggctacggcgccctgttcactgcctttcaggccttggtggacgagggggacgaggtcattatcatcgagcctttctttgactgctatgagccaatgacaatgatggctggggggaggccagtctttgtatcattgaaacctggccctatccaaaacggcgaacttgggtcaagctctaattggcaactggaccccatggagcttgccggaaaatttacctctaggacaaaagccctggtactgaataccccaaacaatccgctgggtaaggttttcagtagggaggagctcgaactcgtagcgagcctctgccaacaacatgacgtggtttgtataacagatgaggtctatcagtggatggtgtatgacggacatcagcacatctcaattgcaagtctcccaggaatgtgggaaaggacactgaccattggctctgccggtaaaacattctccgcgaccggatggaaggtcgggtgggtccttggacccgatcatatcatgaagcacctcaggacagttcatcagaattcagtgttccattgccctactcagagccaggctgctgtagcggaatcttttgagagggaacagctgctcttcaggcagcctagtagctatttcgttcagttcccacaagctatgcagaggtgtcgggaccatatgattagatcacttcagagcgtagggttgaagcccatcatcccacaaggcagttattttctcataactgacatctccgacttcaagagaaaaatgccagacctgccaggcgccgtggacgaaccctacgatcggcggtttgtgaaatggatgattaaaaacaaaggactggtggccattcccgtgtctattttctattctgtgccccaccaaaaacatttcgaccattatattagattctgttttgtcaaagatgaagcaaccctgcaggccatggatgaaaaactgagaaaatggaaggtcgagctttag

SEQ ID NO: 184307 - DNA, 1119 bp, synthetic construct
  misc_feature 1..1119: note = Description of Artificial Sequence: Synthetic coding sequence
  source 1..1119: mol_type = other DNA
atggccaagcagctgcaggcccggcggctggacggcatcgactacaacccctgggtcgagtttgtgaagcttgccagcgaacatgacgtggtgaatctcggccaggggtttccggatttcccccctcctgactttgctgtcgaggcctttcagcatgctgtaagcggagatttcatgctcaatcagtacacaaagaccttcgtgattatcattgagccctttttcgactgttacgaacccatgaccatgatggcaggtggaagacccgtgttcgtctccctgaaaccagggcctatacagaacggggaattaggctccagttcgaattggcaactggaccctatggagctggcagggaagtttaccagcagaaccaaagcactggttctgaatactccgaataaccctctcggtaaagtcttttcccgggaggagctggagttggttgcatccctgtgccagcagcacgacgtagtgtgcattacagatgaggtctaccagtggatggtctacgatggacaccaacacatcagtatagcttcactcccgggcatgtgggagaggactttgaccattggcagtgccggaaaaacgtttagcgccactgggtggaaagtgggctgggtgctgggcccagatcatattatgaaacatctgagaactgtgcatcagaattccgtcttccactgccctactcagagtcaggccgctgtggccgagagttttgaaagggagcaactcctgttcagacagcccagttcctacttcgtacaattcccacaggcaatgcagagatgcagggatcatatgatacgcagcctacagtctgtggggctgaagcccatcatccctcaagggtcctacttcctcattaccgatatttctgactttaagagaaaaatgccagacctgcctggcgccgtggatgagccctatgatcgcaggtttgtcaagtggatgataaaaaacaagggccttgttgctatcccggtcagcattttttacagtgtaccccatcaaaagcacttcgaccactatattcgcttttgctttgtcaaggatgaggcaacgttacaagccatggatgaaaagctccgcaagtggaaagtagaactgtag

SEQ ID NO: 184308 - DNA, 480 bp, synthetic construct
  misc_feature 1..480: note = Description of Artificial Sequence: Synthetic coding sequence
  source 1..480: mol_type = other DNA
gccatggccaagcagctgcaggcccggcggctggacggcatcgactacaacccttgggtggagtttgtaaagctcgcgtctgaacacgatgtcgttaacctggggcaggggttccccgactttccacctccagattttgcagtcgaggcttttcaacacgctgtttcaggagatttcatgctgaaccagtacacgaagacatttgtatctctgtgttatcctggttggagtgctatggtccgttcctggagtactgcggcattaaccttgccggtatcctccggtccgcctacctcagcttccggcgttactgggactacgggctggagtcagtcctggctcgagtcctccttcttcgaccctaagaagaagaagattatttggggctaccctcctctgacaaagatactcgcgtctttctttggggaattgctggggcaagagatcgaccccttgcggaacgttcttgtgaccgtgtag

SEQ ID NO: 184309 - DNA, 555 bp, synthetic construct
  misc_feature 1..555: note = Description of Artificial Sequence: Synthetic coding sequence
  source 1..555: mol_type = other DNA
atggccaagcagctgcaggcccggcggctggacggcatcgactacaatccttgggtggagttcgtaaagctcgccagcgaacatgatgttgtcaacctgggccaggggttccctgacttccccccgcctgatttcgctgtggaggcatttcagcatgctgtcagcggagattttatgctgaatcaatatactaagacattcggataccccccgctgactaaaattctggcaagcttcttcggcgagctgctggggcaggaaatcgatccacttagaaacgttcttgtaaccgtaggaggctacggcgctctgttcacggcttttcaggcccttgttgacgagggggacgaagtgataatcattgagcccttttttgactgctacgaacccatgactatgatggccggtggtcgccctgtgttcgtaagtttaaaacccggcccaattcagaatggcgagcttggctcatcctccaactggcagctcgatcccatggaattggcgggcaagttcacatctagaaccaaggctctggtgctaaatacacccaactag

SEQ ID NO: 184310 - DNA, 480 bp, synthetic construct
  misc_feature 1..480: note = Description of Artificial Sequence: Synthetic coding sequence
  source 1..480: mol_type = other DNA
gccatggccaagcagctgcaggcccggcggctggacggcatcgactacaatccctgggtcgaattcgtcaagctggcgagtgagcatgacgtggtcaacctcggccagggctttccagactttccaccacccgattttgctgttgaggcctttcagcatgcagtgagtggggactttatgttgaaccagtacacaaaaacgtttgtctctctctgttatccagggtggagcgccatggtccgttcttggagcacagccgctctcacactcccagtaagcagtggacctcccacaagcgcatccggcgtcactggcaccaccgggtggtctcagtcttggctcgaatccagttttttcgaccccaaaaagaagaagatcatttggggctaccctcctctaactaagattctggcctcgttttttggtgagcttctcggccaggagattgacccactgcgcaacgtcttggtgacagtctag

SEQ ID NO: 184311 - DNA, 1551 bp, synthetic construct
  misc_feature 1..1551: note = Description of Artificial Sequence: Synthetic coding sequence
  source 1..1551: mol_type = other DNA
atgttccggaccgccgccgccatcagcgtgcacctggtgggccccctccaaggccgtaaagctggggctcccctgacatggttcctgcaccagactcaggttgcggaaaagaatgtgggaagcccggcacccagacccacatctcacctaggcctagccaatccacaggaacgtaaggtcccacaggggccacagtccccatgtgaggtgcccgctgctgaggggatcctacggactgggggagcaaagctgcccatacagggccatcctgccaagcttgccatggcaaagcaactgcaggctaggagactcgacggaattgactataacccatgggtggaatttgtgaagcttgcctccgagcacgatgtggtcaacttagggcagggcttccctgactttcctccgcccgattttgcggttgaagctttccagcacgcggtgtccggcgacttcatgcttaatcagtacaccaagaccttcggctacccccctctgaccaagatactggcgtcctttttcggggagttgctaggacaggaaattgaccctctgcggaatgtgctggtcacggtgggcggctacggcgccctctttactgcctttcaggccctggttgatgaaggtgacgaggtcattatcattgaaccattctttgattgctacgagccaatgaccatgatggctggtggtaggcccgtgtttgtatcattaaaacctggtcccatccagaatggcgaattaggaagcagtagcaattggcaactcgaccctatggagttggcaggcaagttcacctcgagaacaaaggcactcgttctgaatacccctaacaacccgctgggcaaggtgttttcaagggaagaactagagctggttgcctctctttgccagcagcatgacgtggtctgtatcaccgacgaagtgtaccagtggatggtgtacgacggtcaccaacacattagcatcgcttccctgccagggatgtgggagagaaccctgaccatcgggtctgcgggtaagaccttcagtgcaactggatggaaagtcgggtgggtgctgggccctgaccacatcatgaagcatttaaggaccgttcaccaaaatagcgtgtttcactgtcctacccaaagccaggccgcggtggccgagagctttgaacgggaacaattgctgtttagacagccttctagctattttgtgcagtttccccaggctatgcaaaggtgtagggatcatatgatacgcagcttgcagagcgttgggctgaagcccattatcccacagggctcatattttctcattacagacattagcgactttaagaggaaaatgcccgacctgcccggggcagtggatgagccgtatgacagaaggtttgtcaaatggatgatcaaaaataagggcttggtcgctattcccgtctccattttctactctgtcccccaccagaagcactttgatcactacattcgattctgcttcgtgaaagacgaagccaccctgcaggctatggacgaaaagctgaggaagtggaaggtggaactgtag

SEQ ID NO: 184312 - DNA, 756 bp, synthetic construct
  misc_feature 1..756: note = Description of Artificial Sequence: Synthetic coding sequence
  source 1..756: mol_type = other DNA
atggccaagcagctgcaggcccggcggctggacggcatcgactacaacccgtgggtggaattcgtgaaacttgcttcagagcacgatgttgtaaaccttgggcaggggtttcccgacttccccccgccagacttcgctgtagaggcttttcagcatgctgtttctggcgattttatgttgaaccagtacactaagaccttcggttacccaccccttacaaagatactggcttcattctttggggagctgctcggccaagagattgatcctctccgcaacgtgctagtgaccgtgggaggatatggagccctgttcacagctttccaggcccttgtcgacgagggcgatgaagtcattattattgagccatttttcgactgctacgaacctatgactatgatggccggcggaaggcctgtgtttgtatcattgaagcctgggccaatccaaaacggtgagctaggtagctcttcgaattggcaactggatcctatggaactggcggggaagttcacttcccgcactaaagccctggtcctaaacacacccaataatcctctcggtaaagttttcagtagagaggaactcgaactggtggccagcctgtgtcaacagcacgatgtggtttgcattaccgatgaggtctaccagtggatggtctatgatgggcaccagcatatctccatcgctagccttccgggaatgtgggaacgaacacttaccatcggcagtgctggtaagactttctctgcgtag

SEQ ID NO: 184313 - DNA, 603 bp, synthetic construct
  misc_feature 1..603: note = Description of Artificial Sequence: Synthetic coding sequence
  source 1..603: mol_type = other DNA
atggagcagaccgaggtgctgaagccccggaccctggccgacctgattagaatcctacatcagctgttcgctggcgatgaggtgaacgtcgaagaggttcaggcaatcatggaagcctatgaatctgaccccaccgaatgggcaatgtacgctaagtttgatcaatacagatatactcggaatctcgtcgaccagggaaacggcaagtttaaccttatgattctctgctggggcgagggtcatggctcttctattcacgatcatacaaactctcactgctttttgaaaatgcttcagggaaatctaaaagagacgctgttcgcttggcccgacaagaagtcaaacgaaatggtcaagaagagcgagagagtgctgcgagagaatcaatgtgcctacatcaacgactctatcggattgcaccgggtcgaaaatatcagccacactgagccggccgtcagtctgcatctctattctccaccattcgatacttgtcacgcttttgatcagaggacagggcataagaacaaggtgacgatgacattccatagcaagtttgggatcaggactcccaacgcgacttctgggtccctagaaaataattag

SEQ ID NO: 184314 - DNA, 3111 bp, synthetic construct
  misc_feature 1..3111: note = Description of Artificial Sequence: Synthetic coding sequence
  source 1..3111: mol_type = other DNA
atgtacctggtggccggcgaccggggcctggccggctgcggccacctgctggtctctcttctggggctgctgctgctgctggctagatctgggacgcgtgcacttgtgtgcttgccatgtgacgaaagtaaatgcgaagaaccccgcaactgcccaggctcaattgtgcagggtgtttgtgggtgctgctacacctgcgcctctcagcgcaacgaatcttgtggggggacatttggcatctacggaacttgtgaccgcggactccggtgcgttattcggcctccacttaatggggattccctcaccgagtatgaagccggcgtgtgtgaagacgagaattggacggacgatcagctgcttggctttaagccctgtaacgagaacctgatcgctggttgtaacattatcaatgggaagtgcgaatgcaatactattaggacctgctccaatcccttcgaatttccctcccaggacatgtgcctgagtgccctgaaaaggattgaagaagaaaagccagattgttccaaagcgcggtgtgaggttcagttttccccacggtgccctgaggacagcgttttgatcgaggggtatgctccaccaggagaatgctgtccacttccaagccgctgtgtgtgcaaccctgccggctgtcttaggaaggtttgtcagcctggaaatctgaatattctcgtaagtaaggctagtggaaagccaggggaatgctgtgacctgtatgaatgtaaacccgttttcggagtagactgtcggacagtggagtgccctcccgtccaacagaccgcctgtccaccagactcatatgagacccaagtgcgcttgacggctgatggctgttgcacactgcccacacgttgtgaatgccttagcggactttgcggctttccagtgtgtgaggtgggctcaacacctcgtatcgtctctagaggggatgggacgccgggaaaatgttgcgatgtattcgaatgcgtgaatgacaccaagccggcgtgtgtttttaataatgtcgagtattacgatggagacatgttccgtatggataattgcaggttttgccgatgtcaaggtggtgttgccatctgcttcaccgctcagtgtggagagattaactgcgagcgatattatgtgcctgagggggagtgttgccccgtgtgcgaagaccctgtttacccctttaataacccagcaggctgctacgccaacgggctgatccttgcccatggagatcgttggcgcgaggatgattgcaccttttgtcagtgtgtaaacggcgaacgacactgcgtcgcaaccgtatgcggccagacttgcacaaatccggtaaaagtcccaggggagtgttgccctgtctgtgaggagccgaccatcattacggttgacccacccgcgtgtggggagctgtctaactgcacgctgacaggtaaagactgtataaatggctttaaacgagatcacaacgggtgtagaacttgccagtgcattaatacagaagagctgtgttctgagagaaaacagggctgtactctgaattgcccattcggattcttgacggacgcccagaactgcgagatttgtgagtgccgccccagacctaagaagtgtagacccatcatttgcgataaatactgtccattggggctgttaaaaaataagcacggatgcgacatctgcagatgcaagaagtgtccagaactctcctgtagcaaaatttgccctctgggcttccagcaggacagccacggttgccttatctgcaagtgtagggaggcaagcgcctcagctggacctcccatcctctcaggcacttgcctcacggtggatggtcaccatcataagaatgaggaaagctggcatgacgggtgccgggagtgctattgcttgaatggacgggaaatgtgtgccctgattacatgccctgtgccagcctgcgggaacccaactatccatcctggtcaatgttgtccgagctgcgctgacgacttcgtcgtgcaaaagcctgagctcagtaccccaagcatatgtcacgctccggggggtgagtacttcgttgagggagagacctggaacatagatagctgcacacagtgcacatgccattcagggcgcgttctgtgcgagacagaagtctgtccgcccctcctgtgtcagaacccctccagaactcaagactcttgttgcccacagtgcactgatcagccctttagaccgagcctcagtcgaaacaatagtgtgcccaactattgtaaaaacgatgaaggcgatatctttttagctgcagagtcatggaaacccgacgtgtgcacctcatgtatatgcattgactccgtcattagctgcttttccgagtcttgtccctcagtgtcctgcgaaaggcctgttctgaggaagggacagtgttgtccctactgtattgaggataccattccaaagaaagtggtgtgccatttttccggaaaagcatacgctgatgaggaaagatgggatctggattcatgtactcattgttactgcctgcaggggcagaccctgtgctctactgtgagttgcccacccttgccatgtgtagaacctattaatgtggaaggttcatgttgccccatgtgccccgaaatgtatgtgcctgaacctactaacattcctattgaaaaaacaaaccataggggcgaggtagatctcgaggtccctctgtggccaactccttcggaaaacgacattgtgcacctgcctagggacatgggccatctgcaggtcgattatagggataatcggctgcaccccagcgaggatagttcattggactcaattgcatctgttgtcgtccccatcattatctgtctgagtataatcatcgccttcttgtttatcaaccagaagaagcagtggatcccactgctgtgctggtatcgcactcccactaagccgagtagcctgaataatcagctggtgagtgtggactgcaagaagggtaccagggtgcaggtcgattcctcacagcgtatgctacgcatagccgagccggatgccaggtttagcggcttctattctatgcagaagcagaaccacctgcaggccgataatttctatcaaaccgtctag

SEQ ID NO: 184315 - DNA, 498 bp, synthetic construct
  misc_feature 1..498: note = Description of Artificial Sequence: Synthetic coding sequence
  source 1..498: mol_type = other DNA
atggccgacttcgacgagatctacgaggaggaggaggacgaggagagggctctggaggagcagctgctgaaatactctccggatcccgttgtcgtgcgaggctcaggccacgtgaccgtgtttggcctgtcaaacaaatttgagtcagagtttccttcaagcttgacaggtaaggtggcaccagaagaattcaaagcctccattaaccgggtcaactcatgcttgaagaagaacttacccgttaacgtccgctggctgttgtgtggatgtctttgctgttgttgcacactgggctgcagtatgtggcccgtgatttgcttgtccaaacgcactcggcgctccatcgaaaagctattggagtgggaaaataacaggttgtaccacaaactgtgcttacattggaggctcagcaagaggaagtgcgagaccaataacatgatggagtacgttatcctaatagagttcctgcccaaaacaccaattttcagacccgattag

SEQ ID NO: 184316 - DNA, 234 bp, synthetic construct
  misc_feature 1..234: note = Description of Artificial Sequence: Synthetic coding sequence
  source 1..234: mol_type = other DNA
atgcccaagtgccccaagtgcaacaaggaggtgtacttcgccgagcgcgtcacctcactaggcaaagattggcatagaccttgtcttaagtgcgagaaatgtggcaagactctaacgtccggagggcacgctgagcacgagggcaagccgtactgcaaccatccatgttatgcagcaatgtttgggccaaaaggcttcggcagaggcggcgcagaaagtcatacttttaaatag

SEQ ID NO: 184317 - DNA, 234 bp, synthetic construct
  misc_feature 1..234: note = Description of Artificial Sequence: Synthetic coding sequence
  source 1..234: mol_type = other DNA
atgcccaagtgccccaagtgcaacaaggaggtgtacttcgccgagagggtcacctcactgggaaaggattggcaccgcccgtgtttaaagtgtgagaaatgtggaaagacgctgaccagcgggggccatgcagagcatgaaggaaagccatactgtaatcacccctgttatgccgctatgtttggacccaaagggttcggccgcggcggtgctgagagtcatactttcaagtag

SEQ ID NO: 184318 - DNA, 234 bp, synthetic construct
  misc_feature 1..234: note = Description of Artificial Sequence: Synthetic coding sequence
  source 1..234: mol_type = other DNA
atgcccaagtgccccaagtgcaacaaggaggtgtacttcgccgagagggtcacctctctgggcaaagattggcatcggccatgcttaaagtgcgagaaatgtggcaaaacactgacctcaggcggccacgccgagcatgaggggaagccatactgtaaccacccatgctacgccgcaatgtttggacccaagggcttcgggaggggcggcgcagaatcgcatacttttaaatag

SEQ ID NO: 184319 - DNA, 627 bp, synthetic construct
  misc_feature 1..627: note = Description of Artificial Sequence: Synthetic coding sequence
  source 1..627: mol_type = other DNA
atggccagcaagtgccccaagtgcgacaagaccgtgtacttcgccgagaaagtgtccagtttgggaaaagactggcacaagttttgtctgaagtgcgaacgatgctccaaaactctgaccccgggggggcacgccgagcacgacggcaaacccttctgccataagccatgttacgctacactttttggacctaaaggcgtcaacattggcggagccggcagttatatatacgagaaacctctggcagagggcccgcaggtcaccgggcctatcgaggtaccggcggctcgtgccgaagaaagaaaagcctctggccctccaaaaggaccctccagagcctcttcggtgacaacctttacaggagagccgaacacttgcccacgctgctccaagaaagtgtatttcgcggagaaagtaacatcacttggcaaggattggcacagaccgtgcttacgctgcgagaggtgcggcaagactctgaccccaggtggccatgcggagcacgacggccaaccttattgccataagccttgttacggtatccttttcggcccgaagggcgtcaacactggcgccgtcggaagctacatttatgatagggatcctgaggggaaggttcagccatag

SEQ ID NO: 184320 - DNA, 849 bp, synthetic construct
  misc_feature 1..849: note = Description of Artificial Sequence: Synthetic coding sequence
  source 1..849: mol_type = other DNA
atgcccccccaccacctgctgccctggctggcccaggtgcccagcgcagagggcgagctggtacggctcgtgtcccgggccggtgggagaggcgcctgtttttggcccgccgttacaatggagatggccgtggcagccggatgcgtttgtaagggcggtggatgctgtcacagggaacctagccaggaccatcatgagtcacaagaacataggggacccctggtagggagtcagacatgcctcgtacaccaggccgaagggaccgcggaaaaagtgtccagcctcggcaaggattggcataaattctgtttgaagtgcgagagatgttctaaaacccttactcccggtggccatgctgagcatgatggcaaaccattctgccacaagccctgctatgcaacactgttcggccctaaaggggtgaacatcggaggcgctgggtcatatatttacgaaaagcctcttgctgaggggccgcaggttaccggtccgatcgaagtgcccgccgccagagccgaggagaggaaggccagcggcccacctaaagggccttccagagctagcagcgtaaccacgttcacaggagagccaaacacgtgccctcgatgtagcaaaaaagtgtattttgctgaaaaggtcacctcactggggaaagattggcatagaccgtgcctgaggtgtgagcggtgcgggaagacccttacccccggtggtcacgcggaacatgacggccagccatactgccataagccctgctatggcatattgtttggccccaagggagtgaacacgggggccgtcgggtcttatatttacgaccgggaccccgaaggcaaagtgcaaccttag

SEQ ID NO: 184321 - DNA, 315 bp, synthetic construct
  misc_feature 1..315: note = Description of Artificial Sequence: Synthetic coding sequence
  source 1..315: mol_type = other DNA
tgacccggcggcgagcgggccgagggcgccggccggcccggcgccccaactatggcatcaaagtgcccaaaatgcgacaaaaccgtatactttgccgaaaaggtcacctctcttggcaaagactggcatagaccatgtctccggtgcgaaagatgcggaaaaactcttacccctggtggccatgctgagcacgatggacaaccttattgccataagccctgctacgggattctgtttggtcctaagggggtaaatacgggcgctgtcgggtcttatatctatgacagggatccggaggggaaagtacaaccgtag

SEQ ID NO: 184322 - DNA, 537 bp, synthetic construct
  misc_feature 1..537: note = Description of Artificial Sequence: Synthetic coding sequence
  source 1..537: mol_type = other DNA
atggagatcaagcacctgctgttcctggtggccgccgcctgcctgctgccaatgctgtctatgaaaaaaaaaagtgctcgggatcagttcaataaactggtcacagaccttcccaatgttcaggaggagatcgtgaacattcacaacgctctgcgaaggagggtagtgccacctgccagcaatatgcttaaaatgtcttggtcagaggaagccgctcagaacgctaggatattctctaaatactgcgacatgaccgaaagtaatcctctggaaagacgccttcctaacactttctgtggagagaatatgcacatgacctcttatcccgtgtcctggtccagcgtgataggggtgtggtacagcgagtcaacatcattcaagcacggtgaatggacaacaacagatgacgatattacgactgatcactacacgcagatcgtttgggctaccagttacttgattggctgtgctatcgcaagctgtcggcagcagggcagtcctagatatctgtatgtatgccactattgccatgattag

SEQ ID NO: 184323 - DNA, 750 bp, synthetic construct
  misc_feature 1..750: note = Description of Artificial Sequence: Synthetic coding sequence
  source 1..750: mol_type = other DNA
atggagatcaagcacctgctgttcctggtggccgccgcctgcctgctccctatgctgtctatgaagaagaagtcggctagagatcagttcaacaaactggtcactgatctgccaaacgtgcaggaggagatcgtcaacatccataatgctctgcggcgccgtgtagttcccccagccagcaacatgctgaagatgtcctggtcagaagaggccgctcagaacgctcgcatcttcagcaaatactgcgatatgactgaaagtaatccccttgagcggaggctcccgaatactttctgtggggagaacatgcatatgacctcataccccgtgagctggtcaagcgtaattggagtgtggtactcagaatccacaagcttcaagcacggtgagtggaccaccacagacgatgacatcacaaccgatcactatacccagatagtctgggccacctcttacctcatcggatgcgcaatcgcatcctgcagacaacagggttcacctagatacctgtatgtgtgtcattactgccatgagggaaatgaccccgagaccaaaaatgagccatacaaaaccggtgtcccttgtgaagcctgcccttcaaattgcgaagacaaattgtgtactaatccttgtatctactatgacgagtactttgactgcgatattcaggtgcactacctaggctgcaaccattctaccactattctgttttgtaaggctacctgtctgtgcgatactgagatcaaatag

SEQ ID NO: 184324 - DNA, 750 bp, synthetic construct
  misc_feature 1..750: note = Description of Artificial Sequence: Synthetic coding sequence
  source 1..750: mol_type = other DNA
atggagatcaagcacctgctgttcctggtggccgccgcctgcctgctcccaatgttgtctatgaagaagaaatccgctagagaccagttcaataagctggtaacggacctacccaacgtgcaagaggagatcgtgaatattcacaatgcgctccgcaggcgggtggtgccacccgcttcgaatatgctgaaaatgagctggagcgaagaggctgcccagaatgcacggatcttctccaaatactgcgatatgactgagtcaaatccgctggaaaggaggctaccgaacactttttgcggagagaatatgcatatgacatcgtaccctgtgtcctggtcatccgttatcggcgtgtggtatagcgagtcaactagttttaagcacggagaatggacaactaccgacgacgatatcaccacggatcactatacacagatcgtctgggccacaagctacctaatcggctgcgccattgccagctgcaggcagcagggatcccctaggtacctgtatgtgtgccactattgccacgagggcaacgaccctgaaacgaagaacgagccctacaaaacaggggtaccttgcgaggcctgccctagtaactgcgaggacaaactgtgcaccaatccctgtatctattatgacgagtacttcgattgcgatatccaggtccactatctgggctgcaatcactctacaaccattctgttttgtaaagcaacatgtctgtgcgatactgagataaagtag

SEQ ID NO: 184325 - DNA, 750 bp, synthetic construct
  misc_feature 1..750: note = Description of Artificial Sequence: Synthetic coding sequence
  source 1..750: mol_type = other DNA
atggagatcaagcacctgctgttcctggtggccgccgcctgcctgctgccaatgctgtccatgaagaagaaatccgcacgtgatcagtttaataagttggtgaccgacctaccgaacgtccaggaagaaattgtgaatatccataacgctttgaggcggcgagttgttccacctgccagtaacatgctgaagatgagctggagtgaggaagccgcacagaacgctcggatcttctctaagtattgcgatatgactgaatctaaccctctggagagacggctgccaaacaccttttgcggagaaaacatgcatatgacctcctaccctgtgtcctggtcctctgtgattggcgtgtggtatagtgagtctacctctttcaagcacggcgaatggaccaccactgatgacgatataaccaccgaccactatacacagatagtgtgggccacctcatatttaattgggtgcgccatagccagctgcaggcaacagggaagcccaagatacctgtatgtgtgccattattgccatgaagggaatgatccagaaacaaagaatgagccatataaaactggagtgccatgcgaggcctgccctagcaattgcgaagacaaattatgtactaacccttgtatttattatgacgagtactttgactgtgatatccaagtgcactatctaggctgcaaccattccacaactattctgttttgcaaggccacctgtctttgcgatactgaaattaagtag

SEQ ID NO: 184326 - DNA, 537 bp, synthetic construct
  misc_feature 1..537: note = Description of Artificial Sequence: Synthetic coding sequence
  source 1..537: mol_type = other DNA
atggagatcaagcacctgctgttcctggtggccgccgcctgcctgctccccatgctgtcgatgaaaaagaaatcagcccgggaccagttcaacaagctggttacggacctgcccaatgtccaggaggaaatcgtgaacatccataatgccttgcgcaggcgggtggtccccccagcttccaatatgctgaagatgtcttggtccgaagaggccgcccaaaatgccagaatcttctccaagtattgcgacatgactgagtcgaacccattagagaggaggctgcctaacacattttgtggcgaaaatatgcatatgacgtcataccctgtgtcctggagctcagtgattggagtatggtatagcgaatccacaagttttaagcatggcgagtggaccacgacagatgacgatattacaaccgaccattacacacagatagtatgggctacaagctaccttatagggtgtgcgatcgcgtcatgccgacagcaggggagtcctaggtatctctacgtgtgccactattgtcacgactag

SEQ ID NO: 184327 - DNA, 537 bp, synthetic construct
  misc_feature 1..537: note = Description of Artificial Sequence: Synthetic coding sequence
  source 1..537: mol_type = other DNA
atggagatcaagcacctgctgttcctggtggccgccgcctgcctgctgcccatgttaagcatgaaaaagaagagtgctagagatcagtttaataagctcgtgactgatctgcccaacgtgcaagaagagatcgtgaacatccacaatgcgcttagacgtagggtggtgccccccgcttccaacatgctcaaaatgagttggagcgaagaggccgctcagaatgctcgaattttttcaaagtactgtgatatgacagaaagcaaccctctggaacgccgtttaccaaataccttctgcggcgaaaatatgcatatgacgtcatatcccgtcagctggtcctctgtgattggtgtgtggtacagtgagtcaacatcattcaaacacggagagtggaccactacggacgacgacattacaacagaccactatacccaaatagtttgggctacatcctatttaatcggatgtgcaattgcttcctgtcgtcaacagggctcacctaggtacttgtacgtctgccactattgccacgattag

SEQ ID NO: 184328 - DNA, 669 bp, synthetic construct
  misc_feature 1..669: note = Description of Artificial Sequence: Synthetic coding sequence
  source 1..669: mol_type = other DNA
atggccggcaagcccaagctgcactacttcaacggccggggccggatggagccaatcaggtggttgctagccgcagctggggtggaattcgaggaaaagtttatcgggagcgcggaggacctaggcaagctcagaaatgatgggtctttgatgtttcagcaagtgcctatggtagagattgacggaatgaaactagttcagacccgtgccatactgaattacatcgcctccaagtacaatctgtacggcaaggacattaaggaaagggccctgatcgacatgtatactgaagggatggctgatctgaatgagatgatactcctcctgcccttgtgcaggcctgaggagaaagatgctaaaatagctttaatcaaggaaaagaccaagtctaggtattttccagcctttgaaaaggtcctgcagtcccatggacaggactacctggtgggcaacaaactctcgagagcagatatctccttagtggagctgctgtattatgtggaggaactggacagttcactcattagtaacttccccctgctcaaagcactaaagaccaggatttcaaatctccccaccgtcaaaaagttcctgcagcccgggagtccacgcaagccccctgctgacgcgaaggccctagaagaggccaggaaaatttttcgattttag

SEQ ID NO: 184329 - DNA, 732 bp, synthetic construct
  misc_feature 1..732: note = Description of Artificial Sequence: Synthetic coding sequence
  source 1..732: mol_type = other DNA
atggccctgctgcccgtgctgttcctggtgaccgtgctgctgccctctttgcccgccgaggggaaagacccagccttcacggcccttctgaccacccagctgcaggtccaaagagagattgtgaataaacacaatgaattgcggaaggcggtgagcccacctgcgagtaatatgctgaagatggagtggtcaagggaggtcactaccaacgcgcagagatgggctaataagtgcaccctccaacactccgatccagaggaccggaagacatctaccagatgcggagaaaacctgtacatgagcagtgaccccacatcctggagcagtgccatccagtcatggtatgacgaaatactggatttcgtgtatggtgtcggaccaaaatcccctaacgccgtggtgggccattacactcagctggtttggtattctacctaccaggtcggttgtggaatagcctactgccccaatcaggatagcctcaaatactattatgtatgtcagtactgtccggccggcaacaatatgaaccggaagaataccccctatcaacagggcaccccttgtgcagggtgcccggacgattgtgataagggcctgtgtaccaattcatgtcagtaccaagacttactgtccaactgtgacagcctaaaaaacacagctggctgcgaacacgaactgttaaaggaaaaatgtaaagcgacatgcctgtgtgaaaataaaatatattag

SEQ ID NO: 184330 - DNA, 1494 bp, synthetic construct
  misc_feature 1..1494: note = Description of Artificial Sequence: Synthetic coding sequence
  source 1..1494: mol_type = other DNA
atgagctgcgtgctgggcggcgtgatccccctgggcctgctgttcctggtgtgtggctctcaagggtatcttcttcctaacgtgacccttctggaagagcttttaagcaaatatcaacataacgaatctcattctagggtcaggagagccattccgagggaggataaagaagagattctaatgcttcacaacaaactgaggggtcaggtacaacctcaggcttctaacatggagtacatgacttgggacgacgaactggagaaaagtgccgcagcctgggctagccagtgtatctgggagcatgggccaacctcattgctggtgagcattggccagaatctcggggcccactgggggcgctaccgaagccccggctttcacgtgcagtcttggtacgacgaagtgaaggattatacatacccatatcccagtgagtgcaatccatggtgccctgaacgatgcagcggacccatgtgtactcattacactcagatcgtttgggctacaacaaacaagatagggtgcgccgttaacacttgtagaaaaatgacagtatggggcgaggtatgggagaatgcagtttattttgtgtgcaactacagtcctaaagggaactggatcggggaggccccatacaaaaatggccgaccatgtagtgagtgtccaccatcatacggcgggtcttgtaggaacaacttatgttacagagaggaaacgtacacccccaaacctgagacggacgagatgaacgaagttgaaacggcaccaattcccgaggagaaccacgtctggctgcagcctagagttatgcgcccaaccaaacccaagaagaccagtgctgtgaattacatgactcaagtggtacgctgtgacacaaaaatgaaagatcgatgtaaaggctccacatgcaacaggtatcagtgccccgcaggctgtctgaaccataaggcaaagatcttcggcactctattctatgagtcttcctcatcaatctgtagggctgccattcactatggtatcctggacgacaagggcgggctggtggatatcactaggaatggaaaagtcccattctttgtgaaaagcgagagacacggagtgcagtcactctctaaatataagcccagtagtagctttatggtgagcaaggttaaagtccaggacctggactgctataccactgtggcccagctgtgtccctttgagaaacctgctacccactgccctaggatccattgcccggcgcattgcaaagatgagcccagttattgggctcctgtatttggaaccaacatttacgccgatacaagtagcatatgcaagaccgccgtgcacgctggtgtcatttcaaacgagtccggtggagacgtcgacgtcatgcctgtggataaaaaaaagacatacgttggctctctacggaacggagtgcaaagcgagtcactcggaaccccgcgggacggtaaagcattccgcattttcgccgtcagacaatag

SEQ ID NO: 184331 - DNA, 1269 bp, synthetic construct
  misc_feature 1..1269: note = Description of Artificial Sequence: Synthetic coding sequence
  source 1..1269: mol_type = other DNA
atggccccctggccccccaagggcctggtgcccgccatgctgtggggcctctcactgttcctgaatcttcccgggcccatttggctgcagcctagcccaccacctcagagtagcccaccgccccaaccccacccgtgtcacacatgccgggggttggttgattcctttaacaaaggcctggagcggaccatccgagataatttcggaggcggcaatacagcatgggaagaggagaacctatctaaatataaggactctgaaactcggctggttgaagttctggagggagtgtgctctaaaagcgactttgaatgtcaccgtctcctcgaactttccgaagaactggttgagagctggtggttccacaagcagcaagaagcccccgacctgtttcagtggctgtgcagtgacagcttgaagttgtgttgtcccgcgggcacattcgggccctcttgcctcccgtgtcctggcggtaccgaaagaccttgtggtggatatggccagtgtgagggagaaggcacgaggggaggttccggccattgtgactgtcaggccggctatggtggagaggcttgtggccagtgtggactaggctacttcgaggccgaacgcaacgcctcccacctcgtgtgcagcgcatgcttcggaccatgtgcccgatgcagtgggcccgaggaatccaattgcctgcaatgtaagaagggctgggccctgcatcacctgaagtgtgttgatatcgatgaatgcgggacggagggcgctaactgcggggctgaccagttctgcgttaacacagaggggtcctatgagtgcagggattgtgcaaaagcatgtctgggctgtatgggagcaggccctggacgttgcaaaaagtgcagtccagggtaccagcaggtgggatccaagtgtttagacgtggacgaatgcgagaccgaagtctgtccgggcgagaacaaacagtgcgaaaacaccgagggagggtaccgatgtatttgtgcggagggatataagcaaatggagggcatttgtgtgaaagaacagatccccggggcttttcccatcctgacagacctcaccccggagaccacgaggcgctggaagctgggatcccacccacacagtacctacgtgaagatgaagatgcagcgcgacgaggctaccttccctgggctgtatggaaagcaggtggcgaaacttggcagtcagtctaggcaatctgataggggcaccaggttgattcattcgcagcaggcttcaagtcagcgctag

SEQ ID NO: 184332 - DNA, 1263 bp, synthetic construct
  misc_feature 1..1263: note = Description of Artificial Sequence: Synthetic coding sequence
  source 1..1263: mol_type = other DNA
atggccccctggccccccaagggcctggtgcccgccatgctgtggggtctgtcgcttttcttaaacttgcctgggcccatttggctccagccaagtccaccaccccagagctcccctccacctcaaccacacccctgtcatacctgcagaggcctcgttgatagcttcaacaagggactcgaaagaaccatccgggacaacttcgggggcggcaataccgcttgggaagaggagaatctgagtaaatataaagattctgaaaccaggttagtggaggttttagaaggagtgtgcagtaagtcagacttcgagtgtcaccgccttctggaactgagtgaggagctagttgagtcatggtggttccacaaacagcaggaggcccctgacttgtttcagtggctgtgctccgattccctcaagctgtgctgcccagcaggaacattcgggcccagctgcctaccctgccctggtggaactgagagaccttgtggaggatacggccagtgcgaaggtgaaggaacaaggggagggtccggccactgcgattgtcaagctgggtatggaggtgaagcgtgtggccaatgcgggctgggctactttgaagccgaacggaatgcgtcccacttggtctgcagtgcctgcttcggaccatgtgcgcgctgttcaggccccgaggaatcgaactgccttcagtgcaagaaggggtgggctttacaccatttgaaatgcgttgacatcgacgagtgcgggacagagggcgctaattgcggggcagaccagttctgcgtcaatacggagggctcttacgagtgccgggactgcgccaaggcctgcttgggttgtatgggcgctggccccggcaggtgcaagaagtgctctccagggtatcagcaagttggtagcaaatgtctcgatgtcgacgagtgcgagactgaagtgtgtccgggagaaaacaaacagtgtgaaaacacagagggcggttatagatgtatttgtgccgaggggtataaacagatggaaggtatatgtgtcaaggaacagattcctgagtcggccgggtttttttcagaaatgacagaggatgaactggtggttctccagcaaatgttttttggaattatcatatgcgcccttgctaccctcgctgccaagggagatctcgtctttaccgcaatctttatcggcgctgtggccgcaatgacgggctactggctctccgagagaagcgacagggtgctggagggattcataaaggggaggtag

SEQ ID NO: 184333 - DNA, 1263 bp, synthetic construct
  misc_feature 1..1263: note = Description of Artificial Sequence: Synthetic coding sequence
  source 1..1263: mol_type = other DNA
atggccccctggccccccaagggcctggtgcccgccatgctgtggggacttagtcttttcctgaacctgcccggccctatttggctccagcccagcccacctcctcagtcttctcctccccctcagccccatccatgtcacacatgtcggggtctagtggactctttcaataaggggttagaaaggacaatcagggacaacttcggcgggggcaataccgcgtgggaagaggagaacctctcaaaatacaaggattctgagacgagactcgtggaagtcctggagggagtgtgctcgaagagcgacttcgaatgccaccggctgctggagctgtcagaagagcttgtggagtcctggtggttccataagcagcaggaagctcctgatctgtttcaatggctctgcagtgattcactaaagctgtgctgtccagcagggacttttggcccttcttgcttgccttgccctggcggcacagagaggccttgtggggggtacgggcagtgcgagggggagggcactcggggcggaagcggacactgcgattgccaggctgggtatggaggcgaggcgtgtggacagtgtgggctcggctattttgaagctgagcgcaatgcatctcacttagtatgctccgcttgttttgggccctgcgcaaggtgtagtgggcctgaggagagcaattgcctgcagtgtaagaaggggtgggcactccaccacctgaaatgcgttgacatcgatgagtgcggaaccgaaggagcgaactgtggtgcagaccagttttgcgtgaacaccgagggtagttacgagtgtagagactgcgcgaaagcctgcttgggatgcatgggagcgggccctggtagatgtaagaaatgctctcctggatatcagcaggtcggctcaaaatgcctagacgtcgacgaatgcgagacagaagtctgcccaggagagaacaaacaatgcgagaacacagagggcggctaccgatgtatctgcgctgagggatacaagcagatggaaggcatctgtgtcaaagaacagatccctgagtccgcaggcttcttctctgaaatgacagaggacgaattggtagtcctgcaacagatgtttttcggcatcatcatctgtgccctcgccaccttggctgctaagggggacctggtgttcactgccatcttcattggtgctgtagcagcaatgaccggatactggctgagtgagcgctccgatcgagtgttggagggattcatcaagggccgatag

SEQ ID NO: 184334 - DNA, 1263 bp, synthetic construct
  misc_feature 1..1263: note = Description of Artificial Sequence: Synthetic coding sequence
  source 1..1263: mol_type = other DNA
atggccccctggccccccaagggcctggtgcccgccatgctgtggggtctgtcattgttcctgaatcttcctggaccaatatggctgcagccctccccaccgcctcagtcaagccccccaccccaaccacacccctgtcatacctgtcgcgggttggttgactccttcaataaaggtctcgagcggaccattcgagataatttcggtgggggcaacactgcatgggaggaggagaacctgtccaagtataaggattccgagacacggctggtggaggtgctggagggggtctgcagtaaaagcgattttgaatgccatcgtttgctcgagctatccgaggaattggtggaatcttggtggtttcataaacaacaggaggctcctgacctgtttcagtggctttgttccgatagcctcaaactgtgctgccccgcaggtaccttcggcccgtcctgtctaccatgtccaggagggactgaacgaccttgtgggggctacggccagtgtgagggagaggggacgagaggaggctctggccactgcgactgccaggcggggtacggaggggaagcatgcggacagtgtggattagggtactttgaggctgagagaaacgcctcgcacttagtgtgtagtgcttgttttgggccttgcgcgaggtgttctggccccgaggagagcaattgtctccaatgtaagaaggggtgggcgcttcaccatttgaagtgcgtcgacattgatgaatgtggcactgagggggcaaattgtggagcggatcagttctgcgtgaatacagaaggcagctacgaatgccgggattgcgccaaggcttgcctggggtgcatgggggccgggccgggtcgctgcaagaagtgtagccctggttatcaacaggtaggctccaagtgcctcgatgtcgatgaatgtgaaacggaggtctgccccggtgaaaataagcagtgcgagaacaccgaaggaggctaccgctgcatttgtgcggagggctataaacagatggaaggtatctgcgtcaaggagcaaattcctgaatcagctgggttcttttcggaaatgacagaagacgagcttgtcgtgctgcagcagatgtttttcggcataataatctgcgcactcgccactttagcagccaaaggggatctggttttcacggccatcttcattggtgccgtggccgctatgaccggctactggctgagcgaaagatccgacagagttctcgaaggctttatcaagggccggtag

SEQ ID NO: 184335 - DNA, 1140 bp, synthetic construct
  misc_feature 1..1140: note = Description of Artificial Sequence: Synthetic coding sequence
  source 1..1140: mol_type = other DNA
atgagcagccggatcgcccgggccctggccctggtggtgaccctgctccatctaaccaggcttgccctgagcacctgtcccgccgcatgccactgccccctggaggcccccaagtgtgcccctggcgtgggcctagtgcgggatggttgcgggtgctgtaaagtgtgcgccaagcaactgaacgaggactgttctaagacgcaaccctgcgaccacacaaaagggttggagtgcaattttggagcaagtagcaccgcactcaagggcatctgccgagcacaatcggagggcagaccttgtgagtacaatagtagaatctaccagaatggcgaatcttttcagccgaattgcaagcatcaatgcacatgcatagacggggccgtgggttgtataccactgtgtccgcaggaactgtccttgccaaaccttgggtgtcccaaccctaggcttgtgaaagtgaccggccagtgttgtgaggagtgggtgtgtgacgaggactctataaaggatcccatggaggaccaggacggcctgttgggtaaggagctaggcttcgatgcctctgaggtcgagttaactcgtaataatgaactgatcgctgtgggcaaggggtcgtcacttaagaggctaccagtcttcggcatggagccacgaattctctacaaccccctacagggccagaaatgcatcgtgcagaccacgagctggtcccagtgttcaaaaacttgcgggacagggattagcacgagggtgaccaacgataaccccgagtgtcgccttgtaaaagagacgcggatttgtgaagtgcgtccgtgtggccagcccgtatattcaagcctgaaaaagggtaaaaagtgctcgaaaacaaagaaatcaccggagccagtacggtttacatatgccggatgcttgagtgtcaaaaaatataggccaaagtactgtggctcctgcgttgacggacgatgttgcactcctcagctgacaagatgcgaggatgccgtacccctgcggcgttggggggacatttttcaggagagacatgatgacccagtgaagtgtaattacaattgtcctcatgccaacgaggccgctttccccttctatagactctttaacgacatccacaaatttcgcgactag

SEQ ID NO: 184336 - DNA, 1146 bp, synthetic construct
  misc_feature 1..1146: note = Description of Artificial Sequence: Synthetic coding sequence
  source 1..1146: mol_type = other DNA
atgagcagccggatcgcccgggccctggccctggtggtgaccctgctgcatctgactcggctggccttgagcacctgccccgcagcctgccactgtcccctagaggcccctaagtgcgcccccggggtcggactcgtcagggacggctgtggttgttgtaaagtctgtgctaagcagcttaatgaggactgttccaagactcaaccatgtgatcacacaaaggggcttgagtgcaattttggagcctcctccactgccctgaagggcatttgtcgcgcccagagcgaaggaagaccttgcgaatacaactccaggatatatcaaaacggcgagtccttccaaccgaattgcaagcatcagtgcacctgcattgatggggccgttggctgtatacccctgtgccctcaggagctaagtctccccaacctaggctgcccaaatccaagattggttaaggttactggccagtgttgcgaagaatgggtgtgtgacgaggactctatcaaggatcctatggaagaccaggatggtctgttgggtaaggaattaggttttgatgcctcagaagttgagctgactcgtaacaacgagctcattgcagtaggaaagggttcttcccttaaaagactaccagtctttggaatggaacccagaatcctatacaatccacttcagggccagaaatgcatcgtgcagaccacttcttggagtcaatgttccaaaacctgcggcaccggaatttcgactagagtcaccaatgataatccagagtgtcgcctagtcaaggaaacaaggatatgcgaggtgaggccctgtgggcagcccgtgtacagctccttgaagaaggggaagaagtgcagtaagaccaaaaaatccccagaaccggtccgctttacatatgcaggctgcctctccgtcaaaaagtaccgtcctaagtactgcggctcctgcgtcgacggccggtgctgcacaccccaactcacccgtaccgtgaaaatgaggttcaggtgcgaagacggagaaaccttttcaaagaatgttatgatgatccagagttgcaaatgcaactacaattgtccacacgccaacgaagccgccttccctttttatagactcttcaacgatatccacaagtttagggattag

SEQ ID NO: 184337 - DNA, 1074 bp, synthetic construct
  misc_feature 1..1074: note = Description of Artificial Sequence: Synthetic coding sequence
  source 1..1074: mol_type = other DNA
atgagcagccggatcgcccgggccctggccctggtggtgaccctgctacacctgactcgactggccttgtccacgtgcggttgctgcaaggtatgcgccaagcagcttaatgaagactgcagcaagacacagccctgcgaccataccaaaggcctcgagtgtaatttcggcgccagttctactgccctgaagggaatttgtagagcacaaagcgagggccgtccatgcgagtataatagccgaatttaccagaatggcgaatctttccaacctaactgtaagcaccaatgtacctgtatcgatggggccgtgggatgtatacctctttgcccccaggaactgtctcttccgaaccttggctgccctaacccccgcctggtgaaggtaacaggtcagtgctgcgaggagtgggtctgcgatgaagacagtattaaggaccccatggaagatcaagacgggctgctgggaaaggagctagggttcgacgccagcgaggttgaattgaccagaaacaatgaactgatcgccgtggggaaaggtagtagcttaaaaagactgcctgttttcggcatggaaccaagaattctgtacaatccactgcagggacagaagtgtatagtgcagacaacctcctggtctcaatgttccaagacttgcggtaccggaatctctacacgggttacaaacgataatcccgagtgccggctggtgaaagagacaagaatttgtgaagtgcggccatgcggacagccagtgtactccagtctgaagaaaggcaagaagtgctcgaaaacaaagaagtctcctgagccagtcagattcacctacgccggatgcctttctgtcaaaaaataccgtcccaagtactgcggaagctgcgttgatgggagatgctgcaccccacagttgaccaggactgtgaagatgagattccgatgcgaggatggggaaactttctcaaagaacgtgatgatgatccagtcctgtaagtgtaattataattgcccacacgccaacgaagcagccttcccattttatcgcctgttcaatgatattcacaagtttagggactag

SEQ ID NO: 184338 - DNA, 1014 bp, synthetic construct
  misc_feature 1..1014: note = Description of Artificial Sequence: Synthetic coding sequence
  source 1..1014: mol_type = other DNA
atggacgagaccggcaacctgaccgtgagcagcgccacctgccacgatacaatcgatgacttccggaatcaggtctatagcacgctctacagtatgatctcagtcgtgggtttctttgggaacggttttgtgctgtacgtgctgattaagacgtaccacaaaaagtccgcttttcaggtttacatgatcaacctcgctgtcgcggacctactgtgtgtgtgtaccctccccctgagagtggtgtactatgtgcataagggcatctggctatttggtgattttctgtgtcgcctgtccacctatgctttgtacgtcaatctctactgttctattttcttcatgacggctatgtcatttttccgctgcatcgcaattgtattccctgtgcagaacataaatctcgtgacccagaaaaaggctaggttcgtctgcgttggtatctggatcttcgtcatcctcacatcttcaccttttctgatggccaagccacagaaagatgaaaagaataataccaaatgttttgagccgccacaagacaaccaaacgaagaaccacgtgttggtgttgcactacgtctccttgttcgtgggcttcattatcccttttgtgattatcatagtgtgctatactatgataatcttaacccttttaaaaaagtctatgaaaaaaaatttaagctcacataaaaaggccattggaatgatcatggtagtaacggctgcctttcttgtgtccttcatgccctaccacattcagcggacaatacacctgcactttttgcacaacgagacgaaaccgtgcgattcagttctccgaatgcagaagagcgttgtgatcacgttgagtttggccgcaagcaactgttgtttcgatcctttactgtactttttctctgggggcaatttcaggaaaagactgtccacttttagaaaacatagcctgagctccgtgacttacgttccgcgcaagaaagccagtctgccagaaaagggcgaagaaatctgcaaggtgtag

SEQ ID NO: 184339 - DNA, 1041 bp, synthetic construct
  misc_feature 1..1041: note = Description of Artificial Sequence: Synthetic coding sequence
  source 1..1041: mol_type = other DNA
atggagcggaagttcatgagcctgcagcccagcatcagcgtgagcgagatggaacctaatggcaccttctcaaacaacaacagccgcaattgcactattgagaactttaagcgtgaattttttcccattgtctatttaattatctttttctggggggtgctggggaatggcctctcaatctacgtatttctgcaaccgtacaaaaagtctaccagtgtcaacgtctttatgttgaatctagcgatcagtgatcttctatttatttccacgctgccatttagagctgattattatctacgggggtctaactggatcttcggtgatctagcatgtcgaattatgtcttactctctatatgtgaacatgtacagcagtatctacttccttacagttttgtccgtggtaaggttcctggccatggtgcacccttttagattgcttcatgtgacttctatccgcagtgcctggatcctctgcggcatcatttggattctgattatggcaagttccatcatgcttttggactccggcagtgagcagaacgggagcgtgaccagttgtttagagctaaacctgtataaaattgcaaaactgcaaactatgaattatatagccttagttgtcggatgccttttgcccttcttcaccctctcaatatgttatctgttgatcattagggtacttttgaaggtggaggtgccagagtccggactgcgcgtaagccaccgaaaggccttgacaactattattatcactctgattatcttctttctgtgctttctgccttatcatacgctcaggaccgtgcatctaacgacatggaaagttggactgtgcaaggacaggcttcacaaggccctcgtgattaccctggccctggcagccgcaaacgcttgctttaaccctctgttgtactatttcgccggcgaaaacttcaaagatcggctgaaaagcgccctgagaaagggtcatccgcagaaggccaagaccaagtgtgtgttccctgttagtgtctggctgagaaaagaaactagagtgtag

SEQ ID NO: 184340 - DNA, 2181 bp, synthetic construct
  misc_feature 1..2181: note = Description of Artificial Sequence: Synthetic coding sequence
  source 1..2181: mol_type = other DNA
atggccgacagcagcggccagcagggcaagggccggcgggtgcagccccaatggtcacctccagcaggtacacagccatgccgacttcacctgtacaactctctgacaaggaataaggaagtgttcatcccacaagacggcaaaaaggttacctggtactgctgcggcccaacggtttatgacgcttctcacatggggcatgcccggagctacatttcttttgatatcctcagacgcgtgctaaaggactatttcaagttcgatgtgttctactgcatgaatataaccgacatcgacgataagattattaagagggccagacagaatcatctgtttgaacagtaccgggaaaagcgtccggaagccgcccaattactcgaagatgtgcaagccgcacttaagcccttcagtgtaaaactcaacgagacgaccgaccccgacaaaaagcagatgctggaaaggatccaacatgctgtgcaacttgctaccgagccccttgaaaaagcagtccagtcccgcctgactggtgaagaggttaacagttgtgtggaagtgctcctggaggaagctaaggacctcctgtcggattggctggatagtaccttgggctgcgatgtgacggacaactctatctttagcaagttgccaaagttctgggaaggagatttccatcgtgacatggaggcactcaacgtgctgccacccgatgtgcttactcgcgtatccgagtacgtgcctgaaattgtaaatttcgtgcagaaaatcgtggataatgggtatggctacgtgagtaatggttctgtttactttgacacagcaaaattcgcttctagcgagaagcattcatatggcaaactggtgcccgaagcagtaggggaccagaaagcattgcaggagggtgaaggggacctgtcaatctctgcagatcggctttcagagaagcgctctcctaacgacttcgctctctggaaagcaagcaagccgggtgagcccagttggccctgtccctgggggaagggacgccccggctggcacatcgagtgtagtgcaatggccgggaccctactgggggcttcaatggatattcatggcggagggttcgatttgcgttttcctcatcacgataacgagctcgcccagagtgaagcatatttcgagaacgattgctgggtgagatattttctccatacagggcacttaacgatcgctggatgtaagatgtctaagtctcttaagaactttattacaattaaggacgcccttaagaaacactctgctcggcaactgcgactcgcttttttgatgcactcttggaaggacacattggactactctagcaacactatggagtcagccctccagtatgaaaagtttctgaacgagttctttctaaacgtgaaggatatccttcgcgctccagtggatatcaccggccagttcgagaaatggggagaagaggaagccgagcttaataagaacttttatgataagaagacagcaatacacaaggctctctgcgacaacgtagatactcggacagttatggaagaaatgcgagctctcgtgtctcagtgtaatctctatatggcggctcggaaagctgtccgcaagaggcccaaccaggctcttctggaaaatattgcgctgtacctgactcatatgcttaaaattttcggtgcagtagaggaagacagcagcctcgggttccccgtgggaggccccgggacctctttgtctcttgaggctaccgtgatgccatatctgcaggtactaagcgaatttagggagggggtgaggaaaatcgcaagggaacaaaaggttccggagattctgcaactgtctgacgctttgagggacaacattttgccggagctgggagtgcgtttcgaagaccacgaaggccttccaaccgtggtaaagctggtggaccgaaatacattactgaaagaacgcgaggaaaaaaggcgcgttgaagaggagaagcgcaaaaagaaagaagaggctgccaggcggaagcaggaacaggaagccgccaaactcgccaaaatgaaaatccctccatctgagatgttcctgtctgagacagataaatactccaaatttgatgagaatgtatcaatggtgtgtcctcacatgacttggcgcgccaagtcttccgccaagggcaaacctagaagttag

SEQ ID NO: 184341 - DNA, 2496 bp, synthetic construct
  misc_feature 1..2496: note = Description of Artificial Sequence: Synthetic coding sequence
  source 1..2496: mol_type = other DNA
atggccgacagcagcggccagcaggcccccgactaccggagcatcctctccatttcagatgaggccgcacgagcgcaggccctgaatgagcacctgagtacacgctcctacgtccaaggatattccctgtcacaggccgatgtggacgctttccgacagttgagcgctcctccagctgacccgcagttattccatgtggcccgctggttcagacacatcgaggctctgctggggtctccgtgcgggaaaggacaaccatgccgactacaggcctcaaaagggcgcagggttcaaccacaatggagccccccagccggcacacagccatgtcgcctccatctgtataattcactgacgcggaacaaggaggtgtttatcccccaagatggcaaaaaggtgacgtggtactgctgcggtccaactgtttatgacgcttctcatatgggccacgccaggagctatattagttttgatattctgcgcagagtgctaaaggattactttaaatttgacgtgttttactgtatgaacatcaccgacattgatgacaagatcataaaaagagctagacaaaatcacctgttcgagcaatatcgagaaaagaggcctgaggctgctcagctgttggaagatgtacaggctgccctgaagcctttctccgtcaaactgaatgagactactgacccagacaaaaaacagatgctcgagaggatccagcatgccgtacagctggcgacggagcccctggagaaagccgttcagtcaaggttgaccggggaagaggtaaactcttgcgttgaagttctgctcgaagaggccaaggaccttttgagtgattggttggactctacgctgggatgtgacgtaacggacaactcaatattctccaagctgccaaaattttgggaaggggattttcatcgagacatggaggccctgaatgtcctaccaccagacgtgctgactagagtttccgagtatgtgcctgagatcgtgaactttgtccagaagatagtggacaacgggtatggctatgtgagcaacggatcagtgtatttcgatactgcaaagttcgcatcttcagagaagcattcatacggtaagttggtgccagaggcagtcggagaccagaaggcgctccaggaaggcgagggagatctctccattagtgccgatcgcctaagtgaaaaacggtctccaaatgactttgccttatggaaagcttcaaagcctggcgagcccagttggccttgcccttggggtaagggacggcccggctggcacatcgaatgtagcgcgatggcaggcaccttgcttggcgcaagcatggacatccatggaggagggttcgatctccggtttcctcaccacgacaacgagctcgcccagtctgaggcctactttgagaacgactgctgggtaaggtattttcttcatactgggcacttgacaattgctggttgtaagatgtcaaaatccctcaaaaactttatcacaattaaggatgccctgaaaaaacactcagctcgacagctgagactcgccttccttatgcattcctggaaagacactctggattattcctccaacacaatggagtctgcactgcagtatgagaagtttctcaacgaattcttcctgaatgtcaaagatattctgagggcccccgtggacatcaccggacaatttgagaaatggggtgaggaggaagcggagttgaacaaaaatttctatgataagaagaccgccatccataaagcgctgtgtgataacgtcgacacacggacagttatggaggaaatgcgagctttggtctcccagtgcaacttgtacatggcagcacggaaggccgtgcgcaaacggcctaaccaggctctgcttgaaaacatagctctgtaccttacccacatgctaaagatcttcggagctgtcgaagaagattcttccctcggcttccccgtgggagggccagggaccagcctcagcctggaagccactgtgatgccatacctgcaggttctctccgagtttcgggagggtgtgagaaagatcgctcgagagcagaaggtgccagagattcttcagctgagtgacgctcttcgggataacattctgcctgagctcggcgtgagattcgaagatcacgagggtctgccaaccgtggtgaaattggtagaccggaacactctattgaaagaaagggaggagaagcgtcgcgttgaggaggagaagcggaaaaagaaagaagaagccgctaggagaaagcaggagcaagaggcagccaagctcgccaaaatgaaaattccccctagcgagatgttcttgtcagagacagataagtactccaagttcgatgaaaatggacttccgactcatgatatggaaggaaaggagctgtccaagggccaggctaaaaagctcaagaagctgttcgaggcccaagagaaactgtacaaagagtatcttcagatggcccagaatggcagttttcagtag

SEQ ID NO: 184342 - DNA, 2247 bp, synthetic construct
  misc_feature 1..2247: note = Description of Artificial Sequence: Synthetic coding sequence
  source 1..2247: mol_type = other DNA
atggccgacagcagcggccagcagggcaagggccggcgggtgcagccccaatggtcccctccagccggcactcagccctgcaggctccacctctacaactcgctgactagaaataaggaggtgtttatccctcaggatggcaagaaagtgacctggtattgctgcgggccaactgtatatgacgcgagccacatggggcatgcccggagctacatttcctttgatattttgaggagagtgctcaaggactacttcaagtttgatgtgttttactgcatgaatattacagacatcgacgataaaatcataaaaagggccagacagaatcatctctttgaacagtacagggaaaagcggcccgaggccgcacaactgttggaagacgtacaggccgctctgaagcccttcagcgtgaagctaaacgaaacgactgacccagataagaagcagatgctggaacggatccagcacgccgtgcagctggctacagagcccctggaaaaggctgtccagtcccgccttaccggggaggaggtgaacagttgcgtagaagtactactcgaggaagcaaaagatctgctctccgattggttagactcaactttgggctgtgatgtcactgataatagcattttttctaaactgcccaaattttgggagggggacttccatagggatatggaggcgctaaacgttctgcctcccgacgtgctcacaagagtcagcgagtatgtgccagaaatcgtgaacttcgtccagaaaatcgtcgacaacgggtatgggtatgtcagtaacggctcagtgtacttcgacactgctaagttcgcgagcagtgagaagcactcttatggcaaactggtccctgaagccgtcggcgaccagaaggcgttgcaggagggcgagggcgatctgtcgataagcgcagatcgcctgagtgaaaagaggtcaccaaacgattttgctctgtggaaagcctctaaacccggtgagcccagctggccatgtccttgggggaaaggtcggccaggctggcatattgagtgtagtgccatggcagggaccttactcggtgccagtatggacatccacggtggtggcttcgatcttaggttccctcatcacgacaatgagttggcgcaaagcgaggcctacttcgaaaacgattgttgggttagatattttctccacaccggccatctaacaatagctggctgtaagatgtccaagagtctgaaaaacttcattaccattaaggacgctcttaagaaacatagtgctagacagctgcgactggcctttctgatgcattcctggaaggacacacttgactattccagcaacacaatggagtcagctttgcagtacgagaagttcctgaatgaattttttctgaatgtcaaggacatcctgcgagcccccgtcgacattacaggacagttcgaaaaatggggtgaggaagaggctgaattaaacaagaacttttatgacaagaaaacagctatccacaaagctctgtgtgacaacgtagacacaagaactgtcatggaggagatgagggccctcgtgagccaatgtaatttgtacatggcggctaggaaggctgtgcgcaagaggcccaaccaggctctgctggagaacattgccctctatctaacccatatgctcaagattttcggcgctgtggaggaggactcgagtctgggttttcctgtgggggggccagggaccagcctctccctcgaggctactgtgatgccgtatctgcaggttttatccgagttccgtgagggggtgagaaagattgcccgagaacagaaggtacctgaaatcttgcagctaagcgatgcactgcgcgacaatatactgcccgagctcggcgtaagattcgaggatcacgaggggctaccaactgtggtcaaacttgtcgaccgcaacacactgcttaaggaaagggaggagaagcgacgagtcgaagaggaaaaaagaaagaaaaaggaagaggccgctcggaggaagcaggagcaggaggcggctaagttagccaagatgaaaatcccgccctccgaaatgtttttaagtgagaccgacaaatacagcaaatttgatgagaacggcctgccgacacatgatatggaggggaaagaactctctaagggccaggcaaagaagttaaaaaagctcttcgaggcacaggaaaagctttacaaggaatacctgcagatggctcagaatggaagtttccagtag

SEQ ID NO: 184343 - DNA, 2217 bp, synthetic construct
  misc_feature 1..2217: note = Description of Artificial Sequence: Synthetic coding sequence
  source 1..2217: mol_type = other DNA
atgcagaccccccccctgcagcagccccaccaggagcaggtgttcctggcttttctcgtcatcgtgatcccatcctttttaaccaaagaggtctttatcccgcaggacggaaagaaggtgacctggtattgctgcggccctaccgtgtacgacgctagccacatgggacatgctcgctcctacatcagtttcgatatattgagacgggttttaaaggactatttcaagtttgatgtcttctactgcatgaatatcactgatatcgacgacaaaattatcaaaagggctcgacagaaccatttgtttgaacagtaccgagagaagaggccggaggcagcacagctccttgaggacgtccaggcagcactcaagcctttttcagtcaagctgaacgaaaccacagaccctgacaagaaacagatgctggaacggatccagcacgctgtgcagctagctacagaaccattagaaaaagcagtgcagagcagacttactggcgaagaagttaactcatgcgttgaggttctgcttgaggaagccaaagatttgctgagcgattggttagactccacactgggatgtgatgtcaccgacaactccatctttagcaagctccccaaattttgggaaggcgactttcacagggacatggaggcactcaatgtcctccccccggatgtcctgaccagagtgtccgagtatgtacccgaaattgtgaattttgtccagaagatcgtcgataacgggtatggatacgtctctaatggaagtgtgtattttgataccgcaaagtttgcttccagcgagaaacactcctatggtaagctggtgccagaagcggtcggcgatcagaaggccctccaggagggagagggtgatctgtccattagcgcagatagattgtctgaaaagagatcacctaatgacttcgccctttggaaggcaagcaaacctggtgaaccatcctggccttgtccctggggcaaaggcagaccgggttggcatatcgaatgtagtgccatggcgggcactctgctgggagcatctatggacatacacggcggcggcttcgatcttcgttttccccaccacgacaacgaactggcccagtctgaagcttattttgagaacgactgctgggtcaggtattttctgcatacaggacatctcacaattgcaggatgcaagatgtctaaatctcttaaaaattttatcactatcaaggatgccctcaaaaagcattctgcccggcaactgcgcttggccttcttaatgcatagctggaaggataccttggactactcaagtaacacaatggaaagcgcattacagtacgaaaagtttctgaacgaattttttctgaatgtgaaggacatactccgcgcacccgtcgatattacggggcagttcgaaaagtggggcgaggaggaggcggaattgaacaagaacttttacgacaaaaaaactgctatccataaggcactctgcgataacgtcgataccaggacagtgatggaggaaatgcgggcacttgtgtcgcagtgtaatttatacatggcggccaggaaagctgtcagaaaacgccccaaccaggccttgcttgagaacattgcactgtacctgactcacatgctcaagatcttcggtgccgttgaggaggatagctcactcggcttccctgttggtggacccggtacctctctgtcactggaagccactgtgatgccctacctgcaagtactgtcagagtttcgcgaaggggtacgcaaaatcgcaagagagcagaaggttcctgagatccttcagctgagcgacgctctgagggataacatcctgcccgaacttggcgtccggtttgaggaccacgaaggactgcccacagtggtcaagctggtggatcgaaatacgttgctgaaagagagggaggagaaacgcagagttgaagaagagaagcggaaaaaaaaagaagaggcagccaggagaaagcaggaacaggaggcagctaagttggcaaagatgaaaatccctccctccgagatgttcttgagcgagaccgacaaatatagcaagttcgacgaaaacgggctgcccacccatgatatggagggcaaggagctttcaaagggccaggccaagaaactgaagaagctgtttgaggcccaggagaaactgtacaaggagtatctccagatggctcagaacggatcttttcaatag

SEQ ID NO: 184344 - DNA, 2220 bp, synthetic construct
  misc_feature 1..2220: note = Description of Artificial Sequence: Synthetic coding sequence
  source 1..2220: mol_type = other DNA
atggagcccaccagcggccccttccggaccgacctgggctaccacttggtgggatgttcttctggtaaaggtagacgcgtgcagccgcagtggagtccaccagctggcactcagccgtgtcggctgcatttgtacaacagtctgactagaaacaaggaagtgttcatcccacaagatggaaagaaagtgacctggtactgctgcgggcctaccgtgtacgacgctagtcacatgggacacgctcgcagttatatctcgtttgacattctgaggagagtgcttaaagactacttcaagtttgatgttttctattgcatgaatattaccgacatcgatgacaagataattaagagggcccgtcagaaccacctcttcgaacagtaccgggagaaacggccagaggctgcccagctcctagaagacgtccaggcagcactgaaaccgttctctgtcaagctgaacgaaacaaccgatccagacaagaaacagatgctggagcggatacagcatgccgtgcagttggccactgagcctctcgaaaaagctgttcaatcacggctgactggggaggaagtcaattcttgtgtggaagtgctgctcgaagaggctaaggacctcctcagcgactggctcgacagcaccctgggttgcgacgtcaccgacaattcaatcttttctaaattacccaaattctgggagggggattttcaccgagacatggaggctcttaacgtgctccctccagatgtgctcacacgcgtgtcggagtacgtcccggaaatagtcaacttcgtacagaaaattgtcgacaacggatatggttatgtgtccaatggatcagtctacttcgatacagcaaaattcgcaagcagcgagaagcattcctatggaaagcttgttcctgaagccgtaggtgatcagaaggcattacaggagggggaaggggacctgtccatttcagccgatcggctgtctgagaaacgtagcccaaatgacttcgccttgtggaaagcttccaagcctggggagcctagttggccctgtccctggggcaaaggccgacctggatggcacattgaatgtagcgcaatggctggcactcttctgggggcctccatggatattcatggtggcggcttcgatttgcgctttccacatcatgataacgagttagcacagtctgaagcctattttgaaaacgattgttgggtgcgctattttcttcacacggggcaccttaccatagcaggttgtaagatgagcaaatcactaaagaactttattacgataaaagacgccctgaagaaacacagcgctcgccagttgcggttagcctttctcatgcacagttggaaggacaccctggactattcttccaacacaatggaatctgccctacagtatgagaagttcctgaatgaattctttcttaatgtaaaggacattctacgggcccccgttgatataacaggacagttcgagaagtggggagaggaagaggctgagttgaataagaacttctacgacaagaagaccgcaattcacaaggccctctgtgataatgtggacacacgaacagttatggaggagatgagggcgctcgtgagtcaatgcaacctgtatatggctgcccgaaaagccgtgaggaaaagacccaaccaagccctgctggagaacattgctctttacctcacccacatgctcaagatatttggagcggtggaagaggactcatctcttggattcccggtgggcgggccagggacctccctcagcctggaggctactgtgatgccttatctgcaggtgttaagcgagtttcgagaaggggtcaggaagattgccagagagcagaaagttccagaaattctgcagttgtccgacgccctcagggacaacatcctgccggagctgggtgtcagatttgaagaccatgagggattgcccaccgttgttaaacttgtagaccgcaacaccttgttaaaggaacgggaggaaaagcggcgagttgaagaagaaaaacgaaagaagaaagaggaagctgctcgccgcaaacaggaacaggaagctgcgaagttggccaagatgaagatccctcctagcgagatgttcctgagtgaaactgataagtattcaaagttcgatgagaatgtatcaatggtctgtccccacatgacttggagagctaaaagcagtgctaagggcaagcctcgctcctag

SEQ ID NO: 184345 - DNA, 1695 bp, synthetic construct
  misc_feature 1..1695: note = Description of Artificial Sequence: Synthetic coding sequence
  source 1..1695: mol_type = other DNA
atgctgcggaccacccggggccccggcctgggcccccccctgctgcaggcagcactgggcctaggccgcgccggatggcactggcctgcaggccgagctgctagcgggggccgtgggcgagcgtggctccaacctaccggcagagaaacaggagtccaggtctacaattccctgacgggaaggaaggagcctctcattgtcgcccacgctgaggccgcttcttggtactcttgcggccctactgtgtatgatcacgcacacctggggcacgcctgttcctatgtgagattcgatatcattcgaagaatactaactaaagtgtttgggtgtagtatagtgatggtaatgggaatcaccgatgtcgacgacaaaatcattaagcgagccaacgagatgaatatttcccctgcgagtctcgcctccctgtacgaggaggatttcaaacaagatatggccgccctgaaggtacttccccctaccgtgtatctgagagtcaccgaaaacattccccagattatcagctttatagagggcatcatcgcgagaggcaacgcttattccacggctaaagggaatgtttacttcgatctgaaaagccgaggtgacaagtacggcaaactggtgggagttgtgccaggacccgttggcgagcccgcagattctgacaaacgacacgcatcagacttcgctttgtggaaagctgccaagccacaagaggtcttctgggccagcccttgggggcccggtaggccggggtggcacattgagtgttccgcgattgctagcatggtgttcggatcacagctagacatccattccggaggcattgatctcgcctttccccaccatgagaatgaaattgctcagtgtgaagtgtttcaccaatgcgagcagtggggcaactatttcttgcacagtggtcatcttcacgccaaggggaaggaagaaaagatgagcaagtctctcaagaactacatcactattaaggacttccttaaaacgttcagcccagatgtgtttcgatttttttgcctgcggagttcttacaggtccgccatcgactattccgactccgccatgttacaggcacagcaactcctgctggggctgggcagcttcttggaagacgcgcgtgcatatatgaagggtcagctggcctgtggatcggtgcgagaggcaatgctttgggaaagacttagttccacaaagcgagccgttaaagcggccctcgctgacgatttcgacacgccccgggtggtggatgctatcctgggtctcgctcatcacggaaatggacaacttcgggcctctctcaaggagcctgagggccccagaagccccgcagtgttcggcgccattatatcatattttgaacagttcttcgaaaccgtgggtatttccctggccaatcaacagtacgtcagcggcgacgggtccgaggctactctccacggcgtcgtggacgaacttgtgcgctttcgccagaaggtccgccagttcgccttagcaatgcctgaagccactggcgatgccaggaggcagcagctacttgaacggcagcctctgctggaagcttgcgatacgcttcgtcgcggattaacagcccatggcataaacatcaaggatcggagctccacaacttccacctgggagctcctggaccaacgcaccaaggaccagaaatccgcaggctag

SEQ ID NO: 184346 - DNA, 549 bp, synthetic construct
  misc_feature 1..549: note = Description of Artificial Sequence: Synthetic coding sequence
  source 1..549: mol_type = other DNA
atggtgttcggcagccagctggacatccacagcggcggcatcgacctggcatttcctcatcatgagaatgagatagcgcagtgtgaagtctttcatcagtgtgaacagtggggaaattatttcctgcactcagggcacttacatgcaaaaggaaaggaggagaaaatgagcaaaagcttgaagaactacatcacaataaaagacttcctaaagacattctcgcctgatgtattcagatttttctgtctgcggtctagttatcgcagcgccattgattatagtgacagcgctatgttgcaggcccagcagctgctgctcggactggggtcctttctggaggatgctcgggcttatatgaagggccagttggcctgtggcagcgtgcgggaagccatgctgtgggagcggttgagcagcactaagagagccgtgaaggctgcgctggctgacgatttcgatacacctcgcgtggttgatgcaattttggggctggcccatcacggaaacggacagctccgcgcctcactgaagaagccaggctcagcctag

SEQ ID NO: 184347 - DNA, 441 bp, synthetic construct
  misc_feature 1..441: note = Description of Artificial Sequence: Synthetic coding sequence
  source 1..441: mol_type = other DNA
atggcccagaagcggcccgcctgcaccctgaagcccgagtgcgtgcaacagcttctggtttgctctcaggaggctaagaagagtgcctactgcccatacagccattttcctgttggcgcggccctgctgacacaggaagggagaatattcaaaggatgtaacattgagaacgcctgctaccccctggggatatgtgcagagagaactgccatccaaaaggcggtttcggagggttataaggactttagggccatcgctattgcctctgacatgcaggacgattttattagcccttgcggtgcttgcagacaggtaatgagagagttcggcactaattggcctgtgtacatgaccaagccggatgggacttacattgtcatgactgtgcaggagctcttgccatcttcgttcggacctgaagatttgcagaagacccagtag

SEQ ID NO: 184348 - DNA, 687 bp, synthetic construct
  misc_feature 1..687: note = Description of Artificial Sequence: Synthetic coding sequence
  source 1..687: mol_type = other DNA
atgctgagccggtgccggagcggcctgctgcacgtgctgggcctgagcttcctgctgcagacccgccggccgatactactctgcagtcctcggctgatgaaaccactggtcgtgtttgtgctaggcggtccgggagctgggaaagggacacagtgcgccagaatcgtggagaagtacgggtatactcacttgtcagccggcgagctgttacgcgacgaaagaaaaaatcctgatagccaatacggagagctcattgagaaatacattaaagagggtaaaattgtacctgtagagattacgatttcactgcttaaacgagagatggaccagacgatggccgcaaatgctcaaaagaataagtttttaatagacggattcccccgaaaccaggacaacttacaggggtggaataagactatggacgggaaagccgacgttagtttcgtcctattctttgactgtaataatgagatttgcatcgagcgatgcctcgagaggggtaagagctctggtaggtccgacgataaccgagaatcattagagaagcgcatacagacatacctgcaaagtaccaagcctatcattgatctctacgaggagatggggaaggtgaagaagatcgacgcaagcaaatccgtggatgaggtattcgacgaagttgtgcagattttcgataaggagggttag

SEQ ID NO: 184349 - DNA, 540 bp, synthetic construct
  misc_feature 1..540: note = Description of Artificial Sequence: Synthetic coding sequence
  source 1..540: mol_type = other DNA
atgctgagccggtgccggagcggcctgctgcacgtgctgggcctgtccttcctgcttcagactcgccgacccattctcctgtgtagtccccgactgatgaagccgctggtggtgttcgtcctgggggggcctggcgccggcaaggggacccagtgcgccaggatcgtcgaggagatggatcagacaatggccgccaacgctcagaagaacaagttcttaatcgacggatttccccggaaccaggacaatctgcagggctggaataaaaccatggacggcaaggctgacgtgtctttcgtgctgttcttcgactgtaacaatgagatttgcatagaacgttgtctcgagcgtggaaaatcctcagggcggagcgacgataacagggaatcactggagaagcgcattcaaacatacctgcagtccactaagcccataatcgatctgtatgaggaaatgggaaaggttaagaagattgacgcctcgaaaagcgtcgacgaggtgttcgatgaagtggtgcagatcttcgataaagagggctag

SEQ ID NO: 184350 - DNA, 1230 bp, synthetic construct
  misc_feature 1..1230: note = Description of Artificial Sequence: Synthetic coding sequence
  source 1..1230: mol_type = other DNA
atggccttcgcccggcggctgctgcggggccccctgagcggccccttactgggcagaagaggggtctgcgccggagctatggctccgccaaggcggtttgttttggaactaccggattgcaccttggcccacttcgcactgggtgccgacgctccaggagacgcagatgctcccgatccgcggttagcggctctgctcggaccacccgagcggagctactccctttgtgtgccggtcacccctgacgctggctgcggtgcacgcgttcgcgccgccaggctccaccaacggctactacatcagttgcgcagggggccattccagcggtgtcagctgttaagactactgtgttactgccccggaggccaagccggtggggcgcagcagggcttcctattgagggaccccctcgacgaccctgatacccgacaagccctactggaattgctcggagcctgccaggaggcacctcgccctcacctgggagagttcgaggctgacccaagaggtcaactgtggcaacggttatgggaggttcaggacgggcgtcgtctccaggtgggatgtgctcaagtagtcccagtccccgaacctcctttgcaccccgtggtccctgaccttccatcatccgttgtgtttcccgatcgagaagctgcccgggctgtgctcgaagaatgtacctctttcatccccgaggcccgtgccgttctggacctagtggatcaatgccccaaacagatccaaaaaggaaagttccaggtcgtggccatcgaaggactagatgcgacaggcaaaaccactgtgacccagtctgttgcagatagcctgaaagcggtgttgctgaaatcacccccatcgtgcatcggacagtggcgcaagatctttgacgatgagccaacaattatacggcgcgctttctactccttgggtaactacattgtcgcctccgagattgcaaaagaatccgctaaaagccctgtgatcgtcgatcgttactggcacagtaccgctacctacgctatcgccacggaagtctctgggggcctacaacacctgccacctgcgcaccatccagtgtaccagtggccagaggatttacttaaacctgatctgatattactgctaacagttagtcctgaggagagacttcagcggctgcagggtcggggaatggaaaaaacacgagaggaggcagagttggaggctaactcggttttccggcagaagtag

SEQ ID NO: 184351 - DNA, 1350 bp, synthetic construct
  misc_feature 1..1350: note = Description of Artificial Sequence: Synthetic coding sequence
  source 1..1350: mol_type = other DNA
atggccttcgcccggcggctgctgcggggccccctgagcggccccctcctgggaagacgcggggtgtgcgctggagctatggcaccaccaagacgcttcgtgttggagttaccggattgtacactggcacacttcgcactgggcgctgacgctcccggcgacgccgacgctcctgacccacgactcgctgcacttttgggtccacctgagcggtcgtactcgctctgcgtgccagtcaccccagatgctgggtgtggcgcccgtgtgagagccgcccgtctccaccagcgactgttgcatcagctcagaagaggccctttccagagatgccagctgctcagactcctttgctactgtccaggcgggcaggccggcggtgcacagcagggttttctgctccgagacccgcttgacgatccggatacgcgtcaggctttgctggagctgctaggcgcttgtcaggaggcgccaaggccacacctcggggagtttgaagccgatccaagaggacaactttggcaacggctgtgggaagtccaagatgggcggcggctccaggtcgggtgtgcgcaggtggtccctgtgcctgaaccccctctccatcccgtggtgcctgacctgccctcctctgtggtcttccctgaccgggaagctgcgcgggcagttctcgaagagtgtacctccttcattcctgaagcccgcgcggtactggacctcgtcgaccagtgtcccaaacaaatccagaaagggaagttccaagtggtcgcaattgaaggcctcgatgctaccgggaaaaccactgtgacacagagcgtcgccgacagcctcaaagccgtactcctgaagagccctccaagttgtatcgggcaatggcgcaaaattttcgacgatgaacctactataatcaggcgtgctttctatagcctagggaattacattgtcgcctccgagattgctaaggagagtgccaagtctcccgtgatagttgatcggtattggcactctactgccacatacgcaatagccacagaggtctctggaggtctgcaacaccttccgcccgcccaccacccagtttaccagtggccagaggatcttttgaagccagatctgatcctgctgcttaccgtatcacccgaggagcggcttcagcgtctgcagggcagaggtatggaaaagactcgggaagaggccgaactggaagccaactcggttttcaggcaaaaggtagagatgagctatcaaagaatggaaaatcccggatgccacgtcgtggacgccagtccttctcgcgaaaaagtgctgcagaccgttttgtccctgattcagaactcttttagtgagccctag

SEQ ID NO: 184352 - DNA, 1101 bp, synthetic construct
  misc_feature 1..1101: note = Description of Artificial Sequence: Synthetic coding sequence
  source 1..1101: mol_type = other DNA
atggccttcgcccggcggctgctgcggggccccctgagcggcccccttctagggaggcgaggcgtttgtgctggcgctatggcacctcccagaagattcgtactcgaactccccgattgcactctggcccattttgctcttggagctgacgctcctggggacgctgacgcccccgatccacgactcgccgccttgctgggacctccagaacgcagctacagcctttgcgtccccgttactccagacgctggttgcggcgcccgtgtgcgggctgcccgtttgcaccaaagactgctgcatcaactacgccgcgggccgtttcaaaggtgccagttgctccggctcctgtgctactgcccaggtggtcaggcaggcggggcacaacaaggattcttactccgcgacccccttgacgaccccgatactaggcaagcacttctggagttactgggagcctgccaggaagcaccacggcctcatcttggagaattcgaggcggacccccgcgggcagctctggcagcgattgtgggaggtccaagacggccgtagactccaggtcggctgtgcccaggttgtgcccgtgccagagccgccactccaccccgtggtacctgatctgccatctagcgtggtgtttccggatagggaagctgcgcgcgccgtgttagaagaatgcaccagcttcattcccgaggctcgagcggtcctggatctagtcgatcaatgccccaagcagatacagaagggaaaatttcaggtcgtggcaattgaggggctggacgccacaggcaagactactgttactcaatcagtggctgacagtctcaaagctgtactgctgaagagccccccctcgtgtattggacaatggcgcaagatctttgatgatgagcccactataatacggcgagcattttatagcttaggcaactacattgtggcctcagagatcgccaaggaatcagccaaatcacccgtgattgtagatcgctcacagctcggcggtacgctatatcaccccagcttacatctacttggctcagaggtctgtgggacaggtatactcgacagcagtcattcgtcccagggccttgagtag

SEQ ID NO: 184353 - DNA, 813 bp, synthetic construct
  misc_feature 1..813: note = Description of Artificial Sequence: Synthetic coding sequence
  source 1..813: mol_type = other DNA
atgggcaacaccagcagcgagcgggccgccctggagcggcacggcggacataaaacgcctcgaagggatagtagtggcggcactaaagacggggacaggcccaaaatcctgatggattccccagaggatgcagacctgtttcattccgaagaaattaaggctccggaaaaggaagagtttctggcctggcagcacgatctggaggtgaatgataaggcgcccgcacaggcacggcctactgtgtttagatggactggtggagggaaggaggtatatctgagcggcagctttaacaattggtcaaagctgcctctcaccaggagccacaacaacttcgtagctattttggacctgcccgagggcgagcaccaatataagtttttcgtcgatgggcagtggactcatgacccttccgagcccatcgtgacatcacagttgggtaccgttaacaacatcatccaggtgaaaaagaccgatttcgaggtttttgatgcgctcatggtcgacagtcaaaagtgctcagacgtgtccgagctgagttcttcaccccccggaccataccatcaagagccctacgtttgcaagcccgaagagcgcttccgggcaccccctatcttgcctccccatttgctgcaagtaattctgaataaggacacaggaatatcctgtgatccagccctgctgccggagcccaaccacgtcatgctcaaccacttgtatgccctgtcaatcaaggacggcgtcatggtcctcagcgctacgcatagatacaagaagaagtacgtcacgacacttttatacaaacctatatag

SEQ ID NO: 184354 - DNA, 588 bp, synthetic construct
  misc_feature 1..588: note = Description of Artificial Sequence: Synthetic coding sequence
  source 1..588: mol_type = other DNA
atgggccagatcgagtgggccatgtgggccaacgagcaggccctggcatccggcctgattctaattaccgggggtattgtggcgacagccgggcgttttacacagtggtatttcggggcttactctatcgtggctggagtattcgtctgtctcttagaatacccaagagggaaacgcaaaaagggcagcacaatggaacgctgggggcaaaaatacatgactgctgttgtgaagctcttcgggccattcaccagaaactactacgtccgcgctgtgctgcacttattgctgagcgtcccagctggctttttgctggccacaatcctgggcaccgcctgcctagccattgcctctggtatttatctactggccgctgttcggggagagcagtggaccccaattgagcccaagccccgcgagaggccacagatcgggggtacaattaagcagccgccatccaatccccccccgaggcccccggctgaggctcgaaaaaagccctctgaagaagaggcagccgtggccgctgggggccccccaggcggacctcaggtcaatccaatcccagttactgacgaggtagtctag

SEQ ID NO: 184355 - DNA, 1713 bp, synthetic construct
  misc_feature 1..1713: note = Description of Artificial Sequence: Synthetic coding sequence
  source 1..1713: mol_type = other DNA
atgggcaactgggccgtgaacgagggcctgagcatcttcgtgatcctcgtttggctgggcctcaacgttttcctgttcgtgtggtattatcgagtctacgatattccaccaaagttcttttacacacggaagctgttaggtagcgcactcgctttggctcgagcccccgctgcttgcctgaactttaactgcatgctgattctccttccagtgtgtcgtaatctactgtcatttcttagaggaagttccgcatgttgttctacccgtgtgaggcgacagctggacagaaacctgacattccacaagatggtcgcttggatgatcgctctgcactctgctattcacactattgctcacttgtttaatgttgaatggtgtgtgaatgcccgcgtgaacaacagtgacccttattccgtcgcgttgagcgaactgggagacaggcagaacgagtcctacctgaattttgcaaggaaacgcattaagaatccggagggcggtttgtacctggcagtaacactcctcgccggaatcaccggggtggtaattacactttgtctgatactcattatcacttccagcactaagactatacgtcgctcttactttgaggtgttctggtacacgcaccatctcttcgtcattttcttcatcggcctggcaatccacggcgctgagcggatcgttagaggacagacggctgagtccctcgccgtgcacaatattacagtgtgtgaacagaagatctccgagtggggaaagattaaggaatgtcccatccctcagttcgcaggtaacccccctatgacctggaagtggatagtaggcccgatgtttctctacctatgtgaaagactggtgcgcttttggagatcccagcagaaagtggttattaccaaggttgttacacacccctttaagaccatcgagctgcagatgaagaagaaggggtttaagatggaggtcggccagtacatcttcgtcaagtgccctaaagtgtccaagttggaatggcatccgttcacgctaacttcagctcctgaggaggacttcttctccatacacatcagaatagtgggcgattggaccgaaggtctgtttaacgcgtgcggatgcgataagcaggagtttcaggacgcctggaaactgcctaaaattgctgtggatgggccctttggcactgcctccgaagatgtgttctcctacgaggtagtgatgctcgtcggtgcagggatcggagtgaccccgtttgcttccatcctgaagagcgtgtggtacaagtattgtaacaacgccactaatctcaaacttaagaagatctacttttactggctgtgccgagatactcacgctttcgagtggtttgccgacttgctacaactgctggaaagtcagatgcaggagcggaataatgcagggttccttagttacaacatttaccttactgggtgggacgagtcccaggctaatcactttgccgtgcaccacgatgaagagaaggatgttattaccggactcaagcagaaaactctctacggcaggcctaactgggataatgaatttaagaccatcgcttcccagcatccaaacacgaggattggggtgttcctgtgtgggcccgaagccctggcggagacgctgtcaaagcagtccatttcaaattcagagtctggacccaggggcgtacacttcatctttaataaagagaacttctag

SEQ ID NO: 184356 - DNA, 912 bp, synthetic construct
  misc_feature 1..912: note = Description of Artificial Sequence: Synthetic coding sequence
  source 1..912: mol_type = other DNA
atgacctggaagtggatcgtgggccccatgttcctgtacctgtgcgaacggctggtccgcttctggcggtcacagcagaaagttgtgatcacaaaagtcgttacccatccatttaagaccattgagctgcaaatgaaaaaaaaggggttcaagatggaggttggccagtacatattcgtcaagtgtccgaaagtatccaagctggaatggcaccctttcactcttacgagcgcacctgaggaggatttcttctctattcacatcagaattgtcggcgattggactgaggggctgtttaacgcttgtggctgcgataaacaggaattccaggatgcctggaaactgcctaagattgctgtcgatggtcctttcgggacagcctccgaggatgtgtttagttacgaagtggtgatgcttgtgggagcaggtattggggtcaccccttttgcgtcaattcttaaatccgtgtggtacaaatattgtaataatgcgacgaacctgaagctaaagaagatatacttctattggttgtgccgcgacacccatgcgttcgagtggtttgcagacctgctccagctgctggagagtcaaatgcaggaaaggaacaacgccggatttttgagttataatatttatctgaccggttgggacgagtcccaggcaaaccattttgccgttcatcatgatgaagagaaagacgtaataaccgggttgaaacaaaagactctctacggccgccctaactgggacaacgagtttaagaccattgcaagtcaacatccaaataccagaattggagtctttctctgtggaccagaggcgttggctgaaaccctgagcaagcaaagtatatctaattccgaatcgggccctcggggggtgcactttatattcaacaaagagaacttttag

SEQ ID NO: 184357 - DNA, 1617 bp, synthetic construct
  misc_feature 1..1617: note = Description of Artificial Sequence: Synthetic coding sequence
  source 1..1617: mol_type = other DNA
atgggcaactgggccgtgaacgagggcctgagcatcttcgtgatctcggccttggccctggctcgagctcccgctgcctgcctgaacttcaactgcatgctgattttgttgcccgtgtgccgcaacctgctgagctttctgcggggcagcagcgcgtgttgctccacccgggtccgtagacagttagaccggaacctcacatttcataagatggttgcctggatgattgccctccacagtgctatccatacgatcgctcatctgtttaatgtcgagtggtgcgtgaatgcccgcgtgaataattcagatccttattctgtggctctgtctgagctgggcgaccgacaaaacgaaagctatcttaatttcgcgcgcaagagaatcaagaatcccgaaggggggctgtatttggctgtgactctactcgcagggatcaccggagtcgtgattaccctctgtttgatcttgattatcacatcaagcaccaagacaatacgtcgctcatattttgaggttttttggtatactcaccatctgttcgtcatcttctttatagggctcgccatccatggcgctgaaaggattgttcggggtcagacagccgagtctcttgctgtccacaacataacagtttgtgaacagaaaataagcgaatggggcaagattaaggagtgccctattccccagtttgctggcaatccgccaatgacctggaagtggattgtgggaccaatgttcctctatctttgcgagagattggtgcggttttggagaagccagcagaaagtcgtaatcaccaaagtggtgactcacccatttaagactattgaactgcagatgaaaaaaaagggcttcaaaatggaagtgggccagtacatttttgtgaaatgtccaaaggtcagcaagctcgaatggcacccttttacactgacctctgctcctgaagaggacttcttttcaatacacattagaatcgtgggagattggacggaggggctgtttaacgcgtgcggttgcgataaacaagagtttcaggatgcttggaagttgccaaagatcgccgtggatgggcctttcggaacagcgtcagaggacgttttttcatatgaggtcgttatgctggttggtgccggcatcggagtgacacctttcgctagcatccttaaatccgtgtggtataaatactgtaacaacgccaccaacctgaagcttaagaagatttacttttactggttgtgccgcgatacacatgcattcgagtggttcgctgacttgctgcagcttctggagagtcagatgcaggagagaaacaacgccggatttctaagctacaacatctatctcaccggatgggatgaatctcaggccaaccacttcgctgtgcaccatgatgaggaaaaagacgttattaccgggctaaagcaaaaaacgttatacggaagaccgaactgggataatgaatttaagacaatcgccagccagcatccgaatacccgcataggcgtgttcctgtgtggtcccgaggcccttgctgagacactatccaagcaatctattagtaatagcgagagtggtcctagaggagtgcatttcatttttaacaaagagaacttctag

SEQ ID NO: 184358 - DNA, 714 bp, synthetic construct
  misc_feature 1..714: note = Description of Artificial Sequence: Synthetic coding sequence
  source 1..714: mol_type = other DNA
atgaacagccggcggcgggagcccatcaccctgcaggaccccgaggcgaagtacccactgcccctcatcgaaaaggagaagatttcgcataacactagaagatttcgcttcgggcttcctagtcccgaccatgtgctaggacttcctgtaggtaactatgtacagcttctcgcaaagatcgataacgagcttgtggttagggcctacacacctgttagcagcgatgatgatcgtgggttcgtggatctcattataaagatctacttcaagaacgtgcacccccaatatccagagggggggaaaatgacccagtaccttgaaaatatgaaaattggcgaaacaatattcttccgaggaccccgcggtcgcctcttctatcacggcccaggaaatctggggattaggcctgaccagacttctgagccaaagaaaaccttggctgaccacctgggcatgatcgccggtggcaccggtataaccccaatgctccagcttattaggcacattacaaaggacccttccgacagaacccggatgtccctgatcttcgcaaaccagactgaagaggacatcctggtacggaaggaattggaggagattgcacgcactcatcctgatcaattcaacttgtggtatactctcgacagaccaccaatcggcccatggtccgccgaaggtgcaactctcttatctaattcagcgcaattccattag

SEQ ID NO: 184359 - DNA, 831 bp, synthetic construct
  misc_feature 1..831: note = Description of Artificial Sequence: Synthetic coding sequence
  source 1..831: mol_type = other DNA
atgaacagccggcggcgggagcccatcaccctgcaggaccccgaggcaaagtatcccctgcctctgatcgaaaaagagaaaatctcgcacaatacccgacggttccggtttggactgccctctcccgatcatgtgttggggctgcccgtcgggaattacgttcagttactggccaaaattgataatgagctagttgtgagagcatatactccagtgtcgtctgacgatgaccgggggttcgttgacttgataataaaaatctacttcaaaaacgttcacccacaataccccgagggcgggaaaatgacccagtacctggaaaacatgaaaattggagaaactatctttttccgggggcctcggggacgactgttctatcacgggccggggaatctgggcattagacccgatcagacatctgagcccaagaagactctggcagaccatctgggaatgatcgctgggggcactggaattacacctatgctccagctaattcggcacatcactaaagacccctctgaccgcacccggatgagtttgattttcgcaaaccaaactgaagaggacatcctggtcaggaaagagctcgaggaaattgccagaacccacccagatcagttcaatctctggtataccctggatagaccaccaattggctggaagtactcatctggcttcgttacggccgacatgattaaagagcatttaccacccccggcaaagtcaacgctgatcctcgtctgtgggcccccccccttgatccaaacagccgcacaccctaacttagaaaaattaggatatactcaagacatgatatttacttactag

SEQ ID NO: 184360 - DNA, 351 bp, synthetic construct
  misc_feature 1..351: note = Description of Artificial Sequence: Synthetic coding sequence
  source 1..351: mol_type = other DNA
atgaacagccggcggcgggagcccatcaccctgcaggaccccgaggcaaaataccccctccccctgattgaaaaagagaagatatcccataacacaagacgttttcgatttggcttaccctctcccgatcacgtcttgggattacccgtggggaattatgttcagctgttagcgaaaattgataatgagctggttgtaagagcctacacccctgtatcaagcgatgacgacagggggttcgttgaccttatcataaagatctatttcaagaatgtccacccacagtacccagagggggggaaaatgacacagtacctggagaatatgaaaatcggtgaaaccatcttttag

SEQ ID NO: 184361 - DNA, 714 bp, synthetic construct
  misc_feature 1..714: note = Description of Artificial Sequence: Synthetic coding sequence
  source 1..714: mol_type = other DNA
atgaacagccggcggcgggagcccatcaccctgcaggaccccgaggccaaataccccctcccgctgattgagaaagaaaagatttcacacaacacccggagatttcgcttcggcctgccatcccccgaccacgttctgggtttgccagtaggaaactacgttcagttgctggccaaaattgataatgagctggtcgtgcgggcatatactccagtatctagtgacgacgaccggggttttgtcgacttaatcattaaaatatatttcaagaatgtgcatccccagtatcctgaaggaggcaagatgacccaatatttggaaaacatgaagatcggggaaacaatttttttcagaggcccacgggggcgtctgttttaccacggtccaggaaatttagggatcagacccgaccagacgtctgagccaaagaagactctcgccgatcaccttggcatgatcgcgggaggcacaggcataacgccaatgctccagctgatcaggcacattacaaaggacccgagtgataggacaagaatgtctcttatcttcgccaatcagactgaggaagacattctcgtccggaaggaactggaagagatcgctaggacacaccctgaccagtttaacttatggtacaccctcgaccggccgcctattggaccctggagtgccgagggagctactctcctgtccaacagtgcccagttccattag

SEQ ID NO: 184362 - DNA, 441 bp, synthetic construct
  misc_feature 1..441: note = Description of Artificial Sequence: Synthetic coding sequence
  source 1..441: mol_type = other DNA
atgaacagccggcggcgggagcccatcaccctgcaggaccccgaggcgaaatatcccctacctttgatagagaaagaaaaaatttcccacaacacaaggagattccgtttcgggttgcctagtccggaccatgtgctcggcttaccagtggggaattatgtccagctcctggctaagatagacaacgagctggtagttagggcctacactcccgtgagctctgacgatgaccgcggattcgtggacctgatcatcaagatttactttaagaacgtgcacccacagtaccccgagggaggtaagatgacccagtatctggaaaatatgaagattggagaaaccattttcttccggggcccgcggggtcgcctcttttaccatggtccggggaacttgggaatccggcctgaccaaacgagcgaacccaaaaagactttatag

SEQ ID NO: 184363 - DNA, 516 bp, synthetic construct
  misc_feature 1..516: note = Description of Artificial Sequence: Synthetic coding sequence
  source 1..516: mol_type = other DNA
atgaacagccggcggcgggagcccatcaccctgcaggaccccgaggccaaatatcccctgcctctgattgaaaaggaaaagataagccacaatactcgccgtttcaggttcggcctccctagccccgaccacgttttagggctcccagtgggtaactatgtgcagctgcttgccaagatcgataacgagttggtggtcagagcctacactcctgtttcttctgacgacgatcgcggcttcgtggacctcattatcaagatttactttaagaatgtccatccacagtatcccgagggtggaaaaatgactcagtacttagagaacatgaagattggagaaacaatctttttccgcggaccacgtggtcggctgttctaccatggacccgggaatttggggattagacctgaccagacctctgagccgaagaagacactcgctgaccatctcggcatgatcgcgggcggcaccgggatcaccccaatgcttcagcttattcgacacataaccaagtag

SEQ ID NO: 184364 - DNA, 831 bp, synthetic construct
  misc_feature 1..831: note = Description of Artificial Sequence: Synthetic coding sequence
  source 1..831: mol_type = other DNA
atgaacagccggcggcgggagcccatcaccctgcaggaccccgaggcgaaatacccgttgcccctaattgaaaaggagaagatttcacacaatactagacgattcagattcggactcccaagccccgatcacgtgctgggccttcccgtggggaactatgtgcagttattggccaaaatcgataatgaactagtagtccgtgcctacacccctgttagcagcgatgatgatagaggatttgttgacctgattatcaagatctacttcaagaatgtccacccgcagtacccagagggaggcaaaatgactcagtacctggagaatatgaaaattggcgagaccatatttttccgggggccacgcgggcgcttgttttaccacgggcctggtaacctcgggatccggcctgaccagacttcagaacctaaaaaaaccctggccgatcacctaggcatgatcgctggtggaacaggcataacacccatgctccaacttatcagacacataacaaaagacccaagcgacagaacccgtatgtccctgattttcgctaaccagacggaggaggatatactcgtgcggaaggagctggaagaaatcgctcggactcatcccgatcagttcaacctgtggtataccctggacaggcctcccataggatggaagtatagttcaggatttgttaccgccgatatgattaaggaacacctccctcctcccgccaagtccactcttattttagtgtgtggccctccccccctcatacagacagcggcccacccgaatctggagaagctcggatacacgcaggacatgatatttacatactag

SEQ ID NO: 184365 - DNA, 906 bp, synthetic construct
  misc_feature 1..906: note = Description of Artificial Sequence: Synthetic coding sequence
  source 1..906: mol_type = other DNA
atgggcgcccagctgagcaccctgggccacatggtgctgttccccgtctggttcctctatagcctgcttatgaagctgtttcagcggagcacccccgcgatcactcttgagtctccagatattaaataccctctccggctgatagatagagaaattatcagtcatgacacaaggcgctttcgctttgctttgcctagtccacagcacattctaggtctccctgttggccaacacatctacctttcggcacgaattgacggcaacttagtggtcagaccctacacgccaatttctagtgacgatgataagggattcgttgatttagtgattaaagtctactttaaggacactcaccctaagtttcccgctggtggcaagatgtcacaataccttgaaagcatgcagattggcgatacaatcgagttcagggggccatctggcctgctcgtctaccagggcaagggtaaattcgctattaggcccgacaagaagagtaaccctatcatccgtaccgtgaaatcagtagggatgatagccggagggactggtattacacctatgttgcaggtgattagagcaattatgaaggatcccgacgatcacactgtatgtcatctgctctttgcgaaccagacagagaaagatatcctgctgaggcccgaattagaggagttgagaaacaagcattctgccagattcaagttatggtatacactcgacagggccccagaggcctgggattacggacagggcttcgtaaacgaggagatgattcgcgatcaccttccgccaccagaagaagaaccacttgtgctgatgtgcgggccgccccccatgattcagtatgcttgtctgccgaatctggatcacgtgggacatcctaccgaaaggtgttttgtgttttag

SEQ ID NO: 184366 - DNA, 1005 bp, synthetic construct
  misc_feature 1..1005: note = Description of Artificial Sequence: Synthetic coding sequence
  source 1..1005: mol_type = other DNA
atgaaccggagcctgctggtgggctgcatgcagagcaaggacatctgggggcgagaggagtcgatctgtgaaaggctcaaacaggacggactggacgtcgagcgagccgaaagctgggaactggggcacatggtgctcttcccggtgtggttcctgtattccctgcttatgaaactgtttcagagatctacccctgcgattaccctggaatctcctgacatcaagtaccccctgagactaatcgatcgggagattataagccatgataccaggaggtttaggttcgctttgccttcacctcagcacatactgggcttaccggtcggccagcatatttacctctcagcccgtattgacggtaatctagtcgtacgcccgtacactcctattagcagcgatgacgacaagggcttcgtggacctggtgatcaaggtgtattttaaagacacccatccaaagttcccggcgggcggtaaaatgagtcagtatcttgagagcatgcaaattggagatactattgagttcagaggcccatccggcctgcttgtttatcaggggaaaggaaaatttgccatcagaccagacaagaagagtaacccgatcatcagaaccgtaaagagtgtcggaatgatcgctgggggcacagggattacccccatgctgcaagtcattcgcgccatcatgaaggaccctgacgaccataccgtgtgtcatctgctgttcgccaaccaaacagaaaaggacatcctgctcagacccgagctcgaagagttacgaaacaagcactctgcgcgattcaagctgtggtacactttggatagagcaccggaggcctgggactatggtcaggggttcgtaaacgaagaaatgatacgtgaccaccttcctccacctgaagaggagcctctggtgttaatgtgtgggcctcctcctatgatccagtacgcctgccttcctaaccttgatcatgtgggacatccgaccgagcggtgtttcgttttctag

SEQ ID NO: 184367 - DNA, 837 bp, synthetic construct
  misc_feature 1..837: note = Description of Artificial Sequence: Synthetic coding sequence
  source 1..837: mol_type = other DNA
atgaagctgttccagcggagcacccccgccatcaccctggagagcccggatatcaaatatcctctacgattaatagatagagaaatcatcagccatgacacccgccgattccgctttgccctaccatccccacaacatatcctgggcctgcccgtggggcagcacatctatctgagtgcccggatagatgggaatttggtagtgagaccttataccccaataagttcagatgatgacaaagggtttgtggatctggttattaaagtgtatttcaaggacacgcatcctaaattccccgccggaggcaagatgtcgcagtatctggaatctatgcaaataggagacaccatagagtttcgcggtccctccggcctgttagtctaccaggggaaaggcaagtttgccattagacccgataaaaaatcgaatcctatcatcagaacggtaaagtccgtgggaatgatagcgggtggcactggaattacgcccatgctgcaggtgatcagagcgatcatgaaggatcctgacgatcacaccgtatgccatctgctgttcgcgaaccagacagagaaagacatcctgttaaggcctgaattggaagaactgcgcaataagcacagcgctcgcttcaaactttggtacacccttgacagagccccagaagcatgggactatggacaaggcttcgtgaatgaggagatgattcgtgaccacctccctccgccagaggaagaacccttggtcctgatgtgtgggccgccgcctatgatccagtatgcttgtctgccgaatctagatcacgtggggcatcctacagagcgatgttttgtgttctag

SEQ ID NO: 184368 - DNA, 837 bp, synthetic construct
  misc_feature 1..837: note = Description of Artificial Sequence: Synthetic coding sequence
  source 1..837: mol_type = other DNA
atgaagctgttccagcggagcacccccgccatcaccctggagagccccgacattaaataccccttgcggctgattgatcgagagataataagccacgacacccgccggtttagattcgcactgccgtcccctcagcatattctgggactgcccgtcggccagcacatctacctgagtgctcggatcgatgggaatctcgtcgtgagaccgtacacacctatctcaagcgacgacgacaaaggcttcgtggacctggtcattaaagtgtacttcaaagacacccatcctaaattccccgctgggggcaaaatgagccaatatttagagtctatgcagattggagacaccatagaattcaggggccctagcggcctcctggtgtaccagggtaaagggaaattcgccatccgacctgataagaaatccaacccgatcattcgaactgtgaaatcagtgggtatgatcgcgggcggaacaggaatcacgcccatgcttcaagtcatcagagctatcatgaaagatcccgacgaccatacggtatgccatttgctctttgctaaccagacagagaaggatattctcctacgtcccgagctggaggaattgcgcaataaacactctgcccgattcaagctctggtataccctggacagagcccctgaggcctgggactacggacaaggttttgtgaatgaggagatgattagggaccatctccccccgccagaagaagaaccgctggtgctgatgtgcgggcccccgcccatgattcagtatgcatgtctgcctaacttggatcatgtgggacacccaactgagcggtgctttgtgttctag

SEQ ID NO: 184369 - DNA, 837 bp, synthetic construct
  misc_feature 1..837: note = Description of Artificial Sequence: Synthetic coding sequence
  source 1..837: mol_type = other DNA
atgaagctgttccagcggagcacccccgccatcaccctggagagccctgacatcaagtacccgctgcggctgattgaccgggagatcatcagtcacgacacccgtcggtttcggttcgcactcccttccccacagcatatcctgggcctgcctgtcgggcagcatatttacctgagtgctagaattgatggaaacttagttgtaaggccatacacccccatatcaagcgacgatgacaaggggttcgttgatctggtgatcaaggtgtacttcaaagatacacatcctaaattcccagcaggaggtaaaatgtcccaatacttggaaagcatgcagattggagacacgattgaattcagagggccctccggcctcctagtttatcaaggcaagggcaagtttgcgattagacctgataaaaagtccaacccgattatacggaccgttaaatcagtgggcatgattgccggcggtaccgggatcaccccaatgctgcaggtgattagggccatcatgaaagaccccgatgatcacactgtctgtcacctactctttgctaaccagacggaaaaagacatcctccttaggccagaactggaagagctccgtaacaaacatagtgcacgctttaagctctggtacacacttgatagagcgccggaggcctgggactacggccagggctttgtcaacgaagaaatgatccgcgatcatctaccaccaccggaggaagaacccttggtcctgatgtgtggacctcctcccatgatccagtacgcttgccttccgaatctggaccatgtgggccatccaacagagaggtgttttgtcttttag

SEQ ID NO: 184370 - DNA, 837 bp, synthetic construct
  misc_feature 1..837: note = Description of Artificial Sequence: Synthetic coding sequence
  source 1..837: mol_type = other DNA
atgaagctgttccagcggagcacccccgccatcaccctggagagcccagacataaagtaccctcttcgacttattgatagagagattatctcccatgacactcggcggttccggttcgctttgccaagcccacagcacattctcggcctcccagttggtcaacacatctatctgtcagcacgcatcgacggcaatctcgtggtaaggccttacactccaatctcctccgatgatgacaaaggctttgtcgatctggtgattaaagtgtatttcaaagacactcacccaaagttccccgccggaggaaagatgtcacagtatctggagtctatgcagataggggacaccatagagtttagggggccctccgggctgctggtgtaccaaggcaaagggaagttcgccatcaggcctgataaaaaaagtaatcccatcataaggacagtgaagtccgttgggatgatcgccggcggcaccggcatcacacctatgctgcaggtcattcgcgccatcatgaaagacccagatgaccacacggtgtgtcacctgctcttcgcaaaccagaccgagaaggacattctgctgcgccccgagctggaggaactgcgtaataaacacagtgctcgtttcaaattgtggtatacactggaccgcgcgccagaggcctgggactatggacaggggttcgtgaacgaggagatgatcagagaccatctccctcccccagaggaggaaccgctcgtgctcatgtgtggacctccccccatgattcagtatgcttgcttgccgaatctagatcatgtggggcacccaactgaaagatgttttgtcttttag

SEQ ID NO: 184371 - DNA, 444 bp, synthetic construct
  misc_feature 1..444: note = Description of Artificial Sequence: Synthetic coding sequence
  source 1..444: mol_type = other DNA
atgaagctgttccagcggagcacccccgccatcaccctggagagcccagatattaagtatcccctgagattgatcgatcgcgaaatcatcagccatgatacaagacgtttccggtttgcattgccctcaccccagcatatactggggctgcctgtgggtcagcatatctacctgagcgcccgcatcgacggtaatctagttgtgcggccatacaccccaataagttccgacgatgacaaaggattcgtggacctggtgatcaaggtgtatttcaaggatacccacccaaagtttcctgccggtggcaagatgtcccagtacctggaaagtatgcagatcggggacaccatagagttccggggccctagcggcctgctggtctaccaaggtaagggcaagtttgccattcggccagacaagaagtccaacccaatcatccgttag

SEQ ID NO: 184372 - DNA, 330 bp, synthetic construct
  misc_feature 1..330: note = Description of Artificial Sequence: Synthetic coding sequence
  source 1..330: mol_type = other DNA
atggactggatccggctgaccaagagcggcaaggacctgaccggcctgaagggacgtctgattgaggtaaccgaggaggagcttaagaagcacaataagaaagacgactgttggatctgtatccgcggttttgtgtacaacgtatctccatatatggagtaccatcctggaggtgaagacgaactgatgcgcgctgctggtagcgatggtaccgagctgttcgatcaagtgcaccggtgggttaactatgagtccatgctgaaggagtgcctagtgggaagaatggccataaagcccgctgttctgaagggtaaactttggcatttgtag

SEQ ID NO: 184373 - DNA, 1566 bp, synthetic construct
  misc_feature 1..1566: note = Description of Artificial Sequence: Synthetic coding sequence
  source 1..1566: mol_type = other DNA
atgctgaacgtgcccagccagagcttccccgccccccggagccagcagcgggtcgcctctggcgggagatccaaggtgccactgaagcagggccgctcacttatggattggattagactgacaaaatctgggaaagacttgactggactaaaaggccgcttaatcgaagttaccgaagaggagctgaagaaacacaacaagaaggatgattgctggatatgcatccgtgggttcgtttacaatgtgtccccctatatggagtatcatccgggcggggaagacgagctcatgcgggccgctggatccgacggtaccgagcttttcgatcaggtgcatcgctgggtcaattatgaatctatgctcaaagaatgcctcgtagggagaatggccattaaaccagcagtgcttaaagactaccgcgaagaggaaaagaaggtcctcaacggtatgctcccgaagtcacaggtgaccgatacgctcgccaaggaaggtcccagctacccgtcgtatgactggttccagaccgactctctggtgactatcgcaatatacacaaaacagaaagacatcaatctcgactccattatcgtagaccatcagaacgacagcttccgtgcggaaaccatcatcaaggattgtctatacctgattcatatcggtctgagccacgaggtgcaggaagatttctcagtgagggtggtggagagtgtggggaagattgagattgtattgcagaagaaagagaacactagttgggactttctaggccatcccctgaagaatcataatagtttgattccgcggaaagatactggcctttactatcggaaatgtcagttgatcagtaaggaagatgtgacacacgatactcgtcttttctgcctgatgctccccccaagcacacatctgcaggtccccataggccagcacgtttatctcaaactccctattactggcactgaaatagtgaaaccatataccccagtgtccgggagcctactgtccgaatttaaagaacccgtactgccgaataacaaatatatatatttccttatcaagatttaccccacggggctgtttacaccagagctggatagactgcagatcggagactttgtcagcgtctctagcccggaaggaaactttaaaattagtaagttccaggagttagaagacctgtttctgcttgctgcaggaacagggtttacaccaatggttaagatcctgaattacgctctcaccgacatcccctctcttaggaaggtcaaactgatgttctttaacaaaactgaggatgacattatttggagaagtcagctcgagaagcttgctttcaaagacaaaagactggatgtcgagtttgttctttcagcacctattagcgagtggaatggcaaacagggtcacattagtccggccctcttgagtgagtttcttaagagaaatctggataaaagtaaggtactggtctgcatttgcggtcccgtccccttcaccgaacaaggggttagacttctgcacgacttaaacttctccaagaacgaaattcattccttcacagcttag

SEQ ID NO: 184374 - DNA, 297 bp, synthetic construct
  misc_feature 1..297: note = Description of Artificial Sequence: Synthetic coding sequence
  source 1..297: mol_type = other DNA
atggccgagcagagcgacgaggccgtgaagtactacaccctggaggagatccaaaagcataaccacagcaaatccacatggctgattttacaccataaggtgtacgatctcactaagtttctggaagagcatccgggcggagaagaagtcctgagagaacaggccggcggcgatgccacagagaattttgaggacgtgggccattccacggatgcccgcgagatgagcaaaaccttcataatcggcgaactccacccggacgaccggcctaaactgaataagcctcccaagccttag

SEQ ID NO: 184375 - DNA, 405 bp, synthetic construct
  misc_feature 1..405: note = Description of Artificial Sequence: Synthetic coding sequence
  source 1..405: mol_type = other DNA
atggccgagcagagcgacgaggccgtgaagtactacaccctggaggagatacagaaacataaccatagcaagtcaacctggctgatcctgcaccacaaggtgtatgatcttacaaagtttcttgaggagcacccgggaggagaagaggtgttgagggaacaggccgggggggatgccaccgagaatttcgaggacgttggtcactctaccgatgcccgggaaatgtccaaaactttcattataggtgagctccatcctgacgacaggcccaaattgaataaacctccagagaccctcataaccaccattgatagcagctcgtcttggtggacaaattgggtgatccctgctatatctgcggttgcagttgctttgatgtataggctgtacatggccgaagactag

SEQ ID NO: 184376 - DNA, 375 bp, synthetic construct
  misc_feature 1..375: note = Description of Artificial Sequence: Synthetic coding sequence
  source 1..375: mol_type = other DNA
atggccgagcagagcgacgaggccgtgaagtactacaccctggaggagatccagaagcacaatcactctaagagtacctggctgatcctccatcacaaagtttacgatcttacgaagtttctggaggaacatcccggaggggaggaagtcctcagagagcaggcagggggcgacgcaacagagaacttcgaggatgtggggcactccacagacgctcgagaaatgtcgaagacttttatcattggcgagctgcaccccgaaacgttgatcacgaccatcgatagctcgtccagttggtggacgaattgggtgatacccgccatcagtgctgtggcagttgcgctgatgtatagactgtatatggcggaggattag

SEQ ID NO: 184377 - DNA, 297 bp, synthetic construct
  misc_feature 1..297: note = Description of Artificial Sequence: Synthetic coding sequence
  source 1..297: mol_type = other DNA
atggccgagcagagcgacgaggccgtgaagtactacaccctggaggagatccaaaaacataatcactcaaaatcaacttggctcatcctgcatcataaagtttatgatcttactaagttcctcgaggaacatcctggcggtgaggaggtgctccgggaacaggctggcggcgatgctacagagaacttcgaagacgtggggcacagcaccgacgcacgtgagatgtcaaaaacttttataataggcgagctacacccagatgatcgacctaagcttaacaagccccccgagccttag

SEQ ID NO: 184378 - DNA, 453 bp, synthetic construct
  misc_feature 1..453: note = Description of Artificial Sequence: Synthetic coding sequence
  source 1..453: mol_type = other DNA
atgagcggcagcatggccaccgccgaggccagcggcagcgacggcaaagggcaggaagtggagacgtctgtgacttattatcgactggaagaagtggccaaaaggaactcactgaaagagctgtggttggtcatacacgggcgcgtttatgacgtcacccgctttctaaatgagcaccctgggggggaagaagtcctgctggagcaagccggcgtggatgcttcggaatctttcgaggacgtcggacactcgagcgatgctcgggagatgctgaaacaatattatatcggagacattcacccgagcgatttgaaacctgagtcaggctccaaggatccttcaaagaatgacacgtgcaagtcctgctgggcctattggatcctgccaataataggcgccgtgttgctggggtttctgtacaggtactataccagcgagtccaaatcatcttag

SEQ ID NO: 184379 - DNA, 441 bp, synthetic construct
  misc_feature 1..441: note = Description of Artificial Sequence: Synthetic coding sequence
  source 1..441: mol_type = other DNA
atggccaccgccgaggccagcggcagcgacggcaagggccaggaggtggaaacttctgtcacatactatcggttagaagaagttgctaaaagaaattcattaaaggaactgtggctcgtaatccatgggcgggtgtacgatgtcacgcggtttcttaatgagcaccccggtggcgaagaggttctgcttgagcaggctggagttgacgcctcagagtcatttgaggatgtgggtcacagctctgacgctagggagatgctgaagcagtattacattggggacatccatccttccgacctgaagcccgaatctggtagcaaagatccctctaaaaatgacacttgcaagtcctgttgggcctattggatacttccaatcatcggggcagtgcttttggggttcctatacagatactacacctccgaatcaaagtccagttag

SEQ ID NO: 184380 - DNA, 756 bp, synthetic construct
  misc_feature 1..756: note = Description of Artificial Sequence: Synthetic coding sequence
  source 1..756: mol_type = other DNA
atggagggcggcgccgccgccgccacccccaccgccctgccctactatgtggcctttagtcagttgctagggcttactctagtggcaatgaccggcgcgtggctgggcctttacaggggcggaatcgcttgggaaagtgatctgcagtttaacgctcaccccctgtgtatggtgattggactgatctttctccagggtaatgcgttacttgtgtatcgcgtttttcgtaatgaagctaaacgaacgaccaaggtgttgcacggtctgctccacatttttgctctagtgatcgccctggtgggtcttgtggccgtctttgactaccataggaaaaaaggttacgcagatctgtatagcctacattcatggtgcgggatcctggtgttcgtactttattttgtgcaatggcttgtaggctttagtttctttctgtttccaggtgcatccttttctctgcgatcaagatatcgaccccagcacatcttctttggagctacaatttttctcctctctgtcggcactgccttgctggggctcaaggaggccttgctgttcaatctcggaggtaaatacagtgcgttcgagcccgaaggagttctggctaacgtgttgggtctactgctggcatgcttcggtggtgcagtattatatatactgacccgagcagactggaagcggccatctcaggccgaggagcaggcactcagcatggatttcaagactctgacagagggcgactctccaggatctcagtag

SEQ ID NO: 184381 - DNA, 756 bp, synthetic construct
  misc_feature 1..756: note = Description of Artificial Sequence: Synthetic coding sequence
  source 1..756: mol_type = other DNA
atggagggcggcgccgccgccgccacccccaccgccctgccctactacgttgcgttcagtcagctactcggtctgacactggttgccatgaccggagcttggttgggcctgtatcgagggggcatcgcctgggaaagtgatctgcaatttaatgcgcaccctctctgcatggttatcggacttatattcctgcagggcaacgcccttctggtttaccgtgtgttcagaaatgaagccaagagaacaacaaaagttctccatggattattgcacatttttgccctcgtcatcgcactggtcggattggttgccgtttttgactaccaccgaaagaagggatacgctgacctctacagcctgcacagctggtgcggcatcctagtgttcgtcctgtattttgtccagtggttggtcggtttctccttctttctgttcccaggtgccagcttcagcttgaggagccgctacagaccacagcacattttttttggcgccaccatcttcctcttgagcgtggggacagccctgcttggcctgaaagaggccctgctgtttaatttgggaggtaagtactccgccttcgaaccggagggggttttggcaaacgtccttggccttcttcttgcttgttttggcggtgccgttttatacatacttacgcgggcagactggaagcgtccgtctcaggctgaggaacaagcactttcaatggacttcaagacattgaccgagggcgattcacctggtagccagtag

SEQ ID NO: 184382 - DNA, 756 bp, synthetic construct
  misc_feature 1..756: note = Description of Artificial Sequence: Synthetic coding sequence
  source 1..756: mol_type = other DNA
atggagggcggcgccgccgccgccacccccaccgccctgccctactacgtggctttcagccagttactcggactcacgctcgtggccatgacaggagcctggctcggactttaccggggaggcattgcttgggagtccgaccttcagttcaacgcgcatcccctgtgcatggtgattggcctgattttcctgcaagggaatgcactgctagtgtatagagtgttcaggaatgaggccaagagaaccactaaggtcttgcacggcctgcttcacatcttcgcactcgtcattgcactggtagggctggtggcagtctttgactaccaccgaaaaaagggctatgcggatctgtactcactccatagttggtgcggcattctcgtttttgttctgtatttcgtgcaatggctggttggcttcagtttctttctgtttccaggagccagcttttccctgagaagccggtacagacctcagcatattttcttcggcgccaccatcttcctgctcagcgtaggtacagctttgctgggactgaaggaggccctcttatttaacctgggcgggaaatacagtgctttcgagcccgaaggagtgctggccaatgtgctgggcctgctgttggcgtgcttcggcggcgctgtcctttacatcctgacccgtgcagactggaagcgcccctcacaggcagaggaacaggcgctgagcatggacttcaagacccttaccgagggcgacagccccggaagccaatag

SEQ ID NO: 184383 - DNA, 417 bp, synthetic construct
  misc_feature 1..417: note = Description of Artificial Sequence: Synthetic coding sequence
  source 1..417: mol_type = other DNA
atggagggcggcgccgccgccgccacccccaccgccctgccctactatgtggccttctctcaacttctgggtttaactctggtggccatgaccggtgcatggctgggcttgtatagaggcggaatcgcttgggagtctgaccttcaattcaacgcccacccactttgcatggtcattggactcatttttctgcagggaaacgccctgctggtttacagggtgtttcgcaacgaggcaaaacgcacaactaaggtgctccacgggttgcttcacatttttgctctagtgatcgccctggtgggtttggtcgccgtgttcgactaccaccgcaagaaggggtacgcggatttatactctctccatagctggtgtggcatcttggtgtttgtgctatatttcgtgcagggccaggtttag

SEQ ID NO: 184384 - DNA, 957 bp, synthetic construct
  misc_feature 1..957: note = Description of Artificial Sequence: Synthetic coding sequence
  source 1..957: mol_type = other DNA
atgaagcagaagaccaagcccggcaccggccccctgagcagcctggagttcggcgtgagtttcttagcgccatctccccacatggagttgctggcttcatgcccccggagccggttgagcccttggggcggatgggcccctcctcctagccacagccgcgatctgcggcccttacctcaggacgacggagtgtgcctgagcatggaggggggagcagcagccgccacccccacagctctaccctattacgtggcattttcacagctcttgggcttgacgctggtcgccatgactggagcttggctgggactctatagaggtggtatcgcctgggagtcggatctccagtttaatgcgcatccactttgcatggtcattggattaatatttctgcaggggaacgctttgctggtgtatcgagtgttcagaaacgaggcaaagcggaccactaaggtgctccacggattgctccacatattcgcgctcgtgattgcattggtcggcttggtcgctgtctttgattaccaccgcaagaagggctacgccgacttgtattcgctccacagctggtgtggcattctggtgttcgtactctatttcgttcagtggctcgttggattctctttttttttatttccaggcgcaagtttctctttacggtcgcggtaccgcccacaacacattttcttcggagcaaccattttcctgctgagcgtcggaactgcactgttgggtcttaaagaagcattactctttaatctcggaggcaagtatagcgcatttgaacccgagggggttctggctaatgttctagggctcttgctggcatgctttggcggcgcagtcctgtacatcctcaccagagcggattggaagaggcctagccaggcggaggagcaagccctcagcatggatttcaagacactcaccgagggcgactctcccggttcccaatag

SEQ ID NO: 184385 - DNA, 1143 bp, synthetic construct
  misc_feature 1..1143: note = Description of Artificial Sequence: Synthetic coding sequence
  source 1..1143: mol_type = other DNA
atgggcagcggctgccggatcgagtgcatcttcttcagcgagttccaccctacacttggaccgaagattacctatcaggttcctgaggattttatatctcgggagctgttcgacactgtccaagtgtacatcatcacgaagccagagctgcagaataagctcatcacagtcacagcaatggaaaagaaactcataggatgccctgtctgcatagagcacaaaaagtacagccggaatgctctgctgttcaatttaggatttgtgtgcgacgcccaggctaagacatgcgccctggagcctattgtgaagaagctagctggttacttgactacccttgaactggagtcttccttcgttagcatggaggaaagcaaacagaagctggttcccattatgaccatactcctcgaggaattgaacgctagtggccggtgtactttgcctatcgatgaaagtaacactatacacctcaaggtaatagagcagcgcccagaccctcccgtagcacaagaatacgatgtcccagtttttacaaaagataaggaagatttcttcaacagccagtgggacttaaccactcagcaaattttgccttacattgacggctttaggcacatccagaagatctcagctgaagcggatgtcgagctgaacctggtccggatcgctatccaaaatctgctctattatggagtggtcaccttggtgtcaatcctgcagtactccaatgtgtattgtcccacccccaaggttcaggatttggtggatgataaaagccttcaggaggcctgcttgagttacgtgaccaaacagggccacaaacgcgccagcctgagagatgtgttccagctgtactgttccctgagccccggtacgacagttcgagacctcatcggccgtcaccctcaacagctgcagcacgtggacgagagaaaactcatacaattcggtctgatgaaaaacctgatcagacggctgcagaagtacccagttagagtcactcgggaggagcagtcacatcctgctcgcctgtataccgggtgccacagttacgatgagatctgctgcaagacgggcatgtcctaccacgaactggacgagcggttagaaaacgatcctaacattataatttgttggaaatag

SEQ ID NO: 184386 - DNA, 669 bp, synthetic construct
  misc_feature 1..669: note = Description of Artificial Sequence: Synthetic coding sequence
  source 1..669: mol_type = other DNA
atggccctgagcgccgagaccgagagccacatctaccgggccctgcgcaccgcctcaggtgccgccgcccacttggtggctcttggctttactatcttcgtggcagtcctcgccaggcctgggtccagtctcttttcttggcaccccgtgttgatgagcctcgcgttttccttcctgatgaccgaagcactgcttgttttcagcccagagtcttccctgctccactcactgagccggaaaggccgagccagatgtcactgggtcctccaattgttggccctcttgtgcgccctactgggactgggtctggtgatcctccacaaagaacagttgggaaaagcccatctggtcacgaggcacggccaagcggggttactggccgtgctgtgggcgggtctgcaatgctccggcggtgtgggactcctgtacccaaagctgcttccccgatggcccctcgccaaactgaagttgtatcatgccacatccgggctagtcggataccttctgggatctgcgtcactcttacttggtatgtgtagtctctggttcacagcctctgtcacaggggcagcgtggtatctcgcggtcctttgcccggtactgactagtctggttataatgaatcaggttagcaacgcctatctgtaccgtaaaagaatccaaccttag

SEQ ID NO: 184387 - DNA, 669 bp, synthetic construct
  misc_feature 1..669: note = Description of Artificial Sequence: Synthetic coding sequence
  source 1..669: mol_type = other DNA
atggccctgagcgccgagaccgagagccacatctaccgggccctgcggaccgcctcgggggccgcagcccatctcgttgctctcgggtttaccattttcgtggccgtattggctcgccccgggtcctctttattctcgtggcaccccgtgctaatgtccctggctttctctttcctaatgactgaggcacttctggtattttcccccgagagtagcctcctgcacagcctcagccgaaaaggtagggctcgttgtcattgggtcctacagctattggctcttctttgcgccctactgggcctgggccttgtgatcctacataaagaacaactcggcaaggcccatctagttactaggcatgggcaggcaggtctgctagcagtgctgtgggcaggtcttcaatgtagcggtggggtcggccttctgtaccctaaactgctccctcggtggcccttggcaaaacttaagttgtatcacgccacctccggcctggtggggtatcttctggggagcgctagcctactgctggggatgtgtagcctatggtttactgcatccgtgaccggcgctgcttggtacctggctgtgctttgcccggtgctaacaagtctggttataatgaatcaggtgtccaacgcatacctgtatcggaaaaggatccagccctag

SEQ ID NO: 184388 - DNA, 669 bp, synthetic construct
  misc_feature 1..669: note = Description of Artificial Sequence: Synthetic coding sequence
  source 1..669: mol_type = other DNA
atggccctgagcgccgagaccgagagccacatctaccgggccctgcgcactgctagcggcgccgcggcacacttagtcgcccttgggtttaccatctttgtggccgtactcgcacgaccggggagcagcttgttctcctggcacccagttctgatgagcctggccttctccttcctgatgacagaagccctcctagtgtttagtccagaatccagtcttctgcatagcttgagccgaaaggggagagcccgatgccactgggtccttcaactcctcgccctgttatgcgcacttcttggcctgggcttggtaattctgcacaaagagcagctaggcaaggcccacctggttaccaggcatgggcaggccggattgctggcagtgctttgggccggattacagtgctcaggcggtgttgggctcctctatcccaagctacttccaaggtggccgctggctaagcttaaactctatcacgccacatccgggctcgttggatacttgttgggctctgcttctctcctgcttgggatgtgctcgctttggtttaccgccagcgtgactggagctgcttggtacctggccgttctgtgtcccgtgctcacatccctggttataatgaatcaggttagcaatgcctacctctatagaaagcgcatccaaccatag

SEQ ID NO: 184389 - DNA, 696 bp, synthetic construct
  misc_feature 1..696: note = Description of Artificial Sequence: Synthetic coding sequence
  source 1..696: mol_type = other DNA
atgggcggcctgtggcggcccggctggcggtgcgtgcccttctgcggttggcgctggatccacccaggttcacccacaagggccgccgaacgcgtcgaaccgtttctgcggcccgagtggtctggaacaggaggagctgaacgcggactccgatggttgggtacctggaagagatgcagtctgagggctagacaccctgcactgcagccaccaaggagacctaagagttctaaccccttcacaagagcccaggaggaggagaggcggaggcagaataagactactctcacatatgtggccgcagtggctgttggaatgctgggggcctcgtacgccgccgtcccattatatcgcttatattgtcaaaccaccggactgggaggcagcgccgtagccggacacgcctcggataaaatcgaaaatatggtccctgtgaaagaccggattattaagatctctttcaacgccgacgttcacgcgtcattgcagtggaacttccggccccagcaaaccgagatatacgttgtccccggtgaaaccgccctggccttctaccgagccaaaaatccaaccgataagccagtcatagggatttctacctataacatagtcccctttgaagccgggcagtattttaacaaaatacaggcatccaaactccatcgcgtgtacgtgctggagtcttggcacctgtag

SEQ ID NO: 184390 - DNA, 510 bp, synthetic construct
  misc_feature 1..510: note = Description of Artificial Sequence: Synthetic coding sequence
  source 1..510: mol_type = other DNA
atgctggccacccgggtgttcagcctggtgggcaagcgggccatcagtacaagcgtgtgcgtgagggcccatgagtctgtggtcaaaagcgaagacttttcgctccccgcttatatggatcgccgcgaccatcctctgccagaagtggcccacgttaagcatctttctgcctcgcaaaaggccctgaaggaaaaggagaaggcatcctggtcaagtctttctatggatgaaaaagtagagttgtataggataaaatttaaagaaagcttcgccgagatgaatcgtggatccaatgagtggaaaactgtcgttggcggtgctatgttttttattggattcactgcccttgtgattatgtggcagaaacattacgtttatggccccctcccccaatcattcgacaaagagtgggttgctaaacagaccaagaggatgttagacatgaaagtcaacccaatccaaggactggcaagtaaatgggactatgaaaaaaatgagtggaagaaatag

SEQ ID NO: 184391 - DNA, 516 bp, synthetic construct
  misc_feature 1..516: note = Description of Artificial Sequence: Synthetic coding sequence
  source 1..516: mol_type = other DNA
atgctgccccgggccgcctggagcctggtgctgcggaagggcggcgggggacgtaggggtatgcactctagcgaggggacaacccgcggcggtggtaagatgagcccttatactaactgttacgcccaaagatattacccaatgcccgaggaaccgttctgcactgaactgaacgcagaagagcaggcgctgaaagagaaagagaagggcagctggacgcagttgacccacgccgagaaggtagccctctatcgcttgcaattcaacgagacattcgcggagatgaatcgacggagcaacgaatggaaaaccgtgatgggctgcgtgttcttttttattggatttgcagcccttgtcatctggtggcagcgcgtgtatgtgttcccccccaaaccaattacgctgaccgatgagaggaaggcacagcagcttcagagaatgctggatatgaaggtcaacccagtccagggcctggcctctcgctgggactacgagaagaaacagtggaagaagtag

SEQ ID NO: 184392 - DNA, 390 bp, synthetic construct
  misc_feature 1..390: note = Description of Artificial Sequence: Synthetic coding sequence
  source 1..390: mol_type = other DNA
atggccagccggctgctgcggggcgccggcaccctggccgcccaggctctgcgtgcacgggggccttctggtgccgccgccatgagaagtatggcctccggcgggggtgtgcccactgacgaagagcaagctaccgggctcgagcgtgaaataatgctggctgcgaaaaaaggtctcgatccttataacgtcctcgcccctaaaggagccagcggcacacgcgaggaccctaacttagtaccatcaatatccaacaagcggattgtgggatgcatctgcgaggaggataacacatccgtcgtgtggttctggctgcacaagggggaagcccagagatgtccaaggtgcggtgcgcactataagctcgtgccgcagcagctggcgcactag

SEQ ID NO: 184393 - DNA, 606 bp, synthetic construct
  misc_feature 1..606: note = Description of Artificial Sequence: Synthetic coding sequence
  source 1..606: mol_type = other DNA
atggcccgggactacgaccacctgttcaagctgctgatcatcggcgattctggagtgggaaaaagcagcttgcttctgcggtttgccgacaacacattttctgggtcgtacataaccacaatcggggtcgatttcaagattcgcacagtggaaatcaacggggagaaggttaagcttcagatttgggacacagctggtcaggaacggttcagaaccatcacttcaacttactacagaggtacccacggagttatcgttgtctatgatgttaccagcgccgagagtttcgtcaatgtgaagcgatggttgcacgagatcaatcagaactgcgatgatgtgtgccggattctcgtcggaaataagaatgatgaccctgagcgaaaggtcgttgagactgaggacgcttacaagtttgcgggccagatgggtatccagcttttcgagacgagtgccaaggagaatgtaaatgtggaggagatgttcaactgcatcaccgagttggttctgcgagcaaagaaggataatctggctaagcagcaacagcaacagcaaaacgacgtggtcaagctgaccaaaaacagcaagaggaagaaaagatgttgttag

SEQ ID NO: 184394 - DNA, 261 bp, synthetic construct
  misc_feature 1..261: note = Description of Artificial Sequence: Synthetic coding sequence
  source 1..261: mol_type = other DNA
atggccgaggacatggagaccaagatcaagaactacaagaccgcccctttcgactcccggtttcccaaccagaatcaaacacgcaactgttggcagaattatttggatttccatagatgtcagaaggccatgaccgccaaggggggagatatttccgtgtgcgagtggtaccaaagagtctatcagtctctttgtcccacatcttgggtgacagactgggacgagcagcgtgccgaaggtactttccccggtaaaatctag

SEQ ID NO: 184395 - DNA, 312 bp, synthetic construct
  misc_feature 1..312: note = Description of Artificial Sequence: Synthetic coding sequence
  source 1..312: mol_type = other DNA
atgcacccccacccccagatccccggccgggacctggccggcttcagtactatggcagaagatatggaaaccaagatcaagaactataagactgcgcccttcgactcacgcttccccaaccagaaccagactaggaactgctggcagaactatctggattttcacagatgtcagaaggctatgacggctaaaggaggtgatatctccgtatgcgagtggtatcagcgggtgtaccagtcgctctgtccaaccagctgggtgaccgattgggacgaacagcgggcagaaggcacctttccagggaaaatttag

SEQ ID NO: 184396 - DNA, 228 bp, synthetic construct
  misc_feature 1..228: note = Description of Artificial Sequence: Synthetic coding sequence
  source 1..228: mol_type = other DNA
atggcccccgaggtgctgcccaagccccggatgcggggcctgctggcccgccggctgagaaaccatatggcggtggcatttgtgctgtccctaggcgtggcagccctgtacaaatttagggtggctgatcagcgcaagaaagcgtatgctgacttctacaggaactacgacgttatgaaggacttcgaggagatgaggaaagccggcatcttccagtccgttaagtag

SEQ ID NO: 184397 - DNA, 228 bp, synthetic construct
  misc_feature 1..228: note = Description of Artificial Sequence: Synthetic coding sequence
  source 1..228: mol_type = other DNA
atggcccccgaggtgctgcccaagccccggatgcggggcctgctggcccgccggcttagaaaccacatggccgtggcgtttgtcttaagcctgggcgtagcagcgttgtacaaattcagggtggccgaccaacggaagaaggcttatgcggatttctatagaaattacgatgtcatgaaagactttgaagagatgcgaaaggccggcatttttcagtctgtaaagtag

SEQ ID NO: 184398 - DNA, 228 bp, synthetic construct
  misc_feature 1..228: note = Description of Artificial Sequence: Synthetic coding sequence
  source 1..228: mol_type = other DNA
atggcccccgaggtgctgcccaagccccggatgcggggcctgctggcaagacgattgcgcaatcacatggccgtggcatttgtgctctcgcttggcgtggccgccttgtacaaatttagagttgcggatcagaggaagaaggcctacgccgatttttataggaactatgacgtgatgaaggatttcgaagagatgcggaaagccgggatcttccagtcagttaagtag

SEQ ID NO: 184399 - DNA, 228 bp, synthetic construct
  misc_feature 1..228: note = Description of Artificial Sequence: Synthetic coding sequence
  source 1..228: mol_type = other DNA
atggcccccgaggtgctgcccaagccccggatgcggggcctgctggcccggcgactccgcaatcacatggccgttgcttttgtcctcagcctcggcgttgccgcgctctacaaatttagagttgctgatcaaaggaaaaaagcttatgcggacttttacagaaattacgatgtgatgaaggattttgaagaaatgcgcaaagctggcatcttccagtccgttaagtag

SEQ ID NO: 184400 - DNA, 228 bp, synthetic construct
  misc_feature 1..228: note = Description of Artificial Sequence: Synthetic coding sequence
  source 1..228: mol_type = other DNA
atggcccccgaggtgctgcccaagccccggatgcggggcctgctggcgcgaaggctgagaaatcacatggccgtggccttcgtattgagcttaggcgtggcagcgctctacaagttcagagttgctgaccagagaaagaaagcttatgctgatttctatcggaactacgatgtcatgaaagattttgaagagatgcgcaaggccggaatctttcagagcgttaaatag

SEQ ID NO: 184401 - DNA, 228 bp, synthetic construct
  misc_feature 1..228: note = Description of Artificial Sequence: Synthetic coding sequence
  source 1..228: mol_type = other DNA
atggcccccgaggtgctgcccaagccccggatgcggggcctgctggccagaaggctgcgcaatcacatggccgttgcttttgtgctgtctctgggagtggccgctttgtataaatttagggtggcagaccagcgcaagaaagcctatgctgacttttatcgcaattatgatgtgatgaaggacttcgaggaaatgagaaaagctggtatcttccagtctgtaaagtag

SEQ ID NO: 184402 - DNA, 228 bp, synthetic construct
  misc_feature 1..228: note = Description of Artificial Sequence: Synthetic coding sequence
  source 1..228: mol_type = other DNA
atggcccccgaggtgctgcccaagccccggatgcggggcctgctggcgaggcggcttcgcaatcatatggctgttgcattcgtgctctccctcggcgtcgccgcactctataagtttagagtggcagatcaacggaagaaagcctatgccgatttttaccgtaactatgatgtgatgaaggatttcgaggagatgcgcaaggcaggcatcttccaaagcgtgaagtag

SEQ ID NO: 184403 - DNA, 228 bp, synthetic construct
  misc_feature 1..228: note = Description of Artificial Sequence: Synthetic coding sequence
  source 1..228: mol_type = other DNA
atggcccccgaggtgctgcccaagccccggatgcggggcctgctggccagacgcctgcgaaaccacatggcggtggccttcgtgttatcactcggggttgcagccttgtacaaattccgggtagcagatcagcgcaaaaaagcctatgctgacttttatcgaaactatgatgtcatgaaagacttcgaagagatgagaaaagctggtatcttccaaagtgtcaaatag

SEQ ID NO: 184404 - DNA, 228 bp, synthetic construct
  misc_feature 1..228: note = Description of Artificial Sequence: Synthetic coding sequence
  source 1..228: mol_type = other DNA
atggcccccgaggtgctgcccaagccccggatgcggggcctgctggcacgacggctgaggaatcacatggcggttgcgttcgtccttagtctgggagtggcggctctgtacaagttccgcgtcgccgaccagagaaaaaaggcgtacgccgacttctatcgaaattacgacgttatgaaagatttcgaagagatgagaaaagctggtatttttcagtcagtgaagtag

SEQ ID NO: 184405 - DNA, 228 bp, synthetic construct
  misc_feature 1..228: note = Description of Artificial Sequence: Synthetic coding sequence
  source 1..228: mol_type = other DNA
atggcccccgaggtgctgcccaagccccggatgcggggcctgctggcccggcgactgagaaaccatatggccgtagccttcgtcctttctctcggtgtggctgccctttataagttccgcgtagccgaccagcgcaaaaaagcctatgctgacttctacaggaactacgatgtgatgaaagactttgaagagatgagaaaggctggaatattccagtcagtgaagtag

SEQ ID NO: 184406 - DNA, 240 bp, synthetic construct
  misc_feature 1..240: note = Description of Artificial Sequence: Synthetic coding sequence
  source 1..240: mol_type = other DNA
atgcaggccctgcgggtgagccaggccctgatccggagcttcagcagcactgcccggaatagattccagaatcgagttagagagaagcagaagctctttcaggaggataatgacatccccttatacctgaaagggggcattgtggacaatattctgtaccgagttacaatgacgttatgtttaggcggcacagtttattctttgtatagcctcgggtgggcctcttttcctagaaattag

SEQ ID NO: 184407 - DNA, 330 bp, synthetic construct
  misc_feature 1..330: note = Description of Artificial Sequence: Synthetic coding sequence
  source 1..330: mol_type = other DNA
tgaagcttctgggtgctgagcctgcccggccccagccggcagcccggacacccacaagctcgtcttcagggcgaaagtcctcccaaccctgcgggttcatcgagagtgtcccaggccctcatacgcagcttcagctctaccgctcgcaatcgcttccagaacagggtccgcgagaagcagaaactgtttcaggaagacaatgacattccactctatctgaagggagggatagtagacaacatcttatatcgtgttacaatgacactttgcctcggagggacagtgtacagcctatactcccttgggtgggctagttttcctcggaactag

SEQ ID NO: 184408 - DNA, 2775 bp, synthetic construct
  misc_feature 1..2775: note = Description of Artificial Sequence: Synthetic coding sequence
  source 1..2775: mol_type = other DNA
atgagccggagccggcagccccccctggtgaccggcatcagccccaacgagggcatcccatggaccaaggtgaccattcgaggggaaaacctgggtacggggcccaccgacttgatcgggctcacgatatgcgggcacaattgcctgttaaccgctgagtggatgagcgcttccaagatcgtgtgtcgcgtcggccaggccaagaatgataaaggcgatatcatcgttaccaccaaatcaggaggacgtggcaccagcacagtaagctttaagctgctcaagcccgagaagataggcatcctcgatcagtctgccgtgtgggtggacgagatgaattattacgacatgcggaccgacaggaataaaggaatcccgcctctgtctctgcggccagctaacccactcgggattgagattgaaaaaagtaagttttcccagaaagacctcgagatgttatttcacgggatgtctgcagatttcactagcgagaatttttccgccgcatggtacctaatcgaaaatcactctaatacatctttcgagcaactgaaaatggccgtgaccaacctaaaaaggcaggccaataagaaatcagagggatccctggcgtacgttaagggaggtctgtcgacttttttcgaggcccaggacgcactgtctgctatacatcaaaaattagaagccgacggcaccgagaaggtggagggttctatgacacaaaaactggaaaatgtgctcaaccgtgcatcgaacacagcggatactctgtttcaggaggtgctgggacgtaaagataaggctgactcaacacgcaatgccttgaatgttctacagcgcttcaaattcctttttaacctcccgttgaatatcgagagaaacattcaaaaaggcgactatgatgttgtgattaatgattatgagaaggctaagtctcttttcgggaagaccgaggtccaggtttttaaaaagtactatgccgaggttgagacccggatcgaagctctccgtgaactgctgttagacaaactcttggagaccccctctaccttgcacgatcagaagaggtatatcagatacttgtctgacttgcatgcaagcggcgatccagcgtggcagtgtattggagcacagcacaagtggatcctccaactaatgcatagttgtaaggaggggtacgtgaaagatcttaaagggaacccgggacttcactccccaatgctggatctcgataatgacacccggccgtccgtgttggggcatctgagccaaaccgcctctctgaaacgcgggagtagctttcagagcggaagggacgacacctggaggtataaaacgccacatagggtagcctttgtcgagaagctcactaagcttgttctgagccaactacccaatttctggaaactctggatctcctatgtaaacggaagcctgttctctgaaacagctgagaagagcggccaaattgaaagaagtaaaaacgtgcggcagaggcagaacgacttcaagaagatgatccaggaagtgatgcatagcttagtgaaactgacgcggggcgctctgctgcccctgtccatacgagacggcgaagcaaagcaatacggcggctgggaggtcaagtgtgagctgtctggccagtggctggcccacgcaatacagacggtgcgcctaactcacgagtccctaacggcccttgagatacccaatgacttgctgcagaccatccaggatcttattctcgatctgagggtgaggtgcgtcatggccactctgcagcacactgcggaagagataaagagactggccgagaaggaagactggattgttgataatgagggcctaacctccttgccttgtcagtttgagcagtgtatcgtatgtagccttcaaagccttaagggagttctggagtgtaaaccaggcgaggcgtccgtgttccagcagccaaagacccaggaagaagtgtgtcagctgagtatcaacattatgcaggtcttcatttactgtctcgaacagctgtccactaagcctgatgctgacattgatactacccacctatcggttgacgtttctagcccagaccttttcggttctatacacgaagatttcagcttgacctccgaacagcgactcctgattgtgctcagcaactgctgctacctcgagaggcatacttttttaaatatagcagaacactttgagaaacacaactttcagggcatcgagaaaattactcaggtatccatggcgagcctgaaggaactggaccagcgcctgttcgagaactacatcgaactcaaagctgaccccattgtaggcagtcttgagccagggatttatgccggttatttcgactggaaagattgcctgcctcccaccggggtccgcaactacttgaaagaagcactcgtgaatattattgctgtgcacgccgaggtcttcaccattagcaaagagttagtccctcgagttttgagcaaggtgattgaggcagtgtccgaagagctgtcgaggctcatgcaatgcgttagctctttcagcaaaaatggggccctacaggctcgcctcgaaatctgcgctttacgggacaccgtcgcggtgtacctgactcctgaatccaagagctctttcaaacaggccctggaggccctgccacagctgagttccggggccgacaagaaacttctggaagaactgcttaataagttcaagtcttcaatgcatttacaattaacttgttttcaggcagcctcatctacgatgatgaaaacttag

SEQ ID NO: 184409 - DNA, 348 bp, synthetic construct
  misc_feature 1..348: note = Description of Artificial Sequence: Synthetic coding sequence
  source 1..348: mol_type = other DNA
atgcacacccaggacagcgaggtggtgcccgtgcccgcctggccctttagtttggttgttttctcttgtggaggatgttggtccgtgacagcaaaaatgctcagaaatctcctggcgctccggcagattggacaacgaaccatttccacagcgtcaaggcgacacttcaagaataaagtgcccgaaaagcagaagctgttccaggaagacgatgaaatacccctgtacctgaagggcggagtggctgacgcgctgctatatcgtgctactatgattcttactgtgggtggaaccgcatacgcaatctacgaactagctgtggccagctttccgaagaagcaggaatag

SEQ ID NO: 184410 - DNA, 348 bp, synthetic construct
  misc_feature 1..348: note = Description of Artificial Sequence: Synthetic coding sequence
  source 1..348: mol_type = other DNA
atgcacacccaggacagcgaggtggtgcccgtgcccgcctggcccttttccttggtagtttttagttgtggcggatgttggtcagtgactgctaagatgctcaggaatctgctggccttgagacagatcgggcagcgaactatttcaaccgccagccggcgacactttaagaacaaagttcctgagaaacagaaactattccaggaagatgacgaaatacccttgtatttgaaggggggggtcgccgatgctctgttgtatagagccacaatgatcctgaccgtgggtggaaccgcatacgcaatttacgagctcgccgtggcctcgtttccaaaaaaacaggagtag

SEQ ID NO: 184411 - DNA, 1734 bp, synthetic construct
  misc_feature 1..1734: note = Description of Artificial Sequence: Synthetic coding sequence
  source 1..1734: mol_type = other DNA
atgagcaagcccgagctgaaggaggacaagatgctggaggtgcacttcgtgggggacgacgatgtcctaaatcacatcctcgacagagaggggggagccaaacttaagaaggagcgtgctcagctgctggtgaaccccaagaagatcattaaaaaacctgagtacgaccttgaagaagatgaccaagaggttttgaaggatcagaactatgtggaaattatggggcgcgatgttcaagaatcactgaagaacggtagcgccaccggcggtggcaataaggtgtatagcttccagaatcggaaacacagcgaaaagatggccaaactggcttctgaactggccaaaaccccacaaaagagcgtgtcatttagcttgaaaaacgaccctgagatcaccattaatgtcccacagagtagcaaagggcacagtgcctccgacaaggttcaaccgaagaataatgacaagtccgagttcctctctactgctcctcggtcattgcgtaagaggttgattgtgccccgaagccacagtgacagcgaaagcgagtacagcgcctccaacagcgaggacgatgagggtgttgcccaggaacatgaggaggataccaacgccgtaatcttctcacagaaaatccaggcacagaatagagtcgtaagcgccccagtagggaaggagactccatccaaaaggatgaagagagacaagacatccgatctggtggaggaatacttcgaagcccactcctccagtaaggttttgaccagtgacagaaccttgcagaagttaaagcgcgctaagttagatcaacaaaccttacggaatttactgtccaaagtttcgccatctttttcagctgagttaaagcagctaaatcaacaatacgaaaaactttttcataagtggatgctccaacttcatctgggattcaacatagtgttgtacgggcttggctcaaaaagagacctactcgaaagattccggaccactatgctacaggatagcatacacgtggtgatcaatgggttcttcccaggcataagtgtcaagtcagtgctgaacagcatcaccgaagaagtccttgatcatatgggcacttttcgcagcattctggatcaactggactggatcgtgaataaattcaaggaagatagctccttggagctgttcctgctgattcacaaccttgacagtcagatgttaagaggagagaagtcccagcaaataatagggcagttgtccagtttacataatatatatttaatcgcatcaattgaccatctaaacgcccccctcatgtgggatcatgcaaagcagtccctattcaactggttatggtacgaaacaaccacgtattccccatacaccgaggaaacatcttatgagaattccctgctggtgaagcagagtggcagtttgccactgtcttcgttaacccacgtcctccgatcgctgacgccgaatgcccggggcatcttccggttgctgatcaaataccagttggataaccaggacaatccttcgtatattgggttgagcttccaggatttctaccagcagtgtcgcgaagcgtttcttgttaattcagacctgacattacgggcgcaactcaccgagttcagagatcataagctgattaggaccaaaaaagggacggacggtgtagagtatctgctcattcctgtggataacgggaccctaacagactttctcgagaaagaggaagaggaagcctag

SEQ ID NO: 184412 - DNA, 345 bp, synthetic construct
  misc_feature 1..345: note = Description of Artificial Sequence: Synthetic coding sequence
  source 1..345: mol_type = other DNA
atgtactacaagttcagcggcttcacccagaagctggccggcgcctgggcctccgaggcctactccccccagggacttaagccagttgtatccacggaggcacccccaatcatctttgccactcctacaaagctcacgtccgattctacagtctacgactatgccggaaagaataaagtgccagagctgcagaaattctttcagaaagcagatggtgtgcctgtttacttgaaaagggggcttcctgaccagatgctttacaggactacgatggccttaacagtgggtggcaccatatactgcctaattgctctgtatatggcctcccaacctaaaaacaagtag

SEQ ID NO: 184413 - DNA, 246 bp, synthetic construct
  misc_feature 1..246: note = Description of Artificial Sequence: Synthetic coding sequence
  source 1..246: mol_type = other DNA
atgatgttccccctggcccggaacgccctgagcagcctgaagatccaatccatcctgcagagcatggctagacacagccacgtcaaacattcccccgactttcatgacaagtacggaaatgctgttttggcctctggaactgccttctgcgttgcgacatgggtgttcactgcaacacaaatcggtatagagtggaacttgtcccccgttggtagggtcacacctaaggagtggaaacaccagtag

SEQ ID NO: 184414 - DNA, 246 bp, synthetic construct
  misc_feature 1..246: note = Description of Artificial Sequence: Synthetic coding sequence
  source 1..246: mol_type = other DNA
atgatgttccccctggcccggaacgccctgagcagcctgaagatccagagcattctgcaaagcatggcccgtcattctcacgtaaagcacagtccagactttcacgacaagtacggcaacgccgttctggcttccggcacagccttctgcgtggctacatgggtatttacagctactcagatcggaatcgaatggaatctgtctccagtcgggagggtgacccccaaagaatggaaacaccagtag

SEQ ID NO: 184415 - DNA, 246 bp, synthetic construct
  misc_feature 1..246: note = Description of Artificial Sequence: Synthetic coding sequence
  source 1..246: mol_type = other DNA
atgatgttccccctggcccggaacgccctgagcagcctgaagatccagtctattctgcaatccatggctaggcattcacatgtaaagcattcccccgacttccacgataaatacggcaacgcagtattagccagcggcaccgcattctgcgtagccacctgggtgttcaccgccactcagattgggattgaatggaatctgtcccccgtgggaagagttacaccaaaggaatggaagcaccagtag

SEQ ID NO: 184416 - DNA, 99 bp, synthetic construct
  misc_feature 1..99: note = Description of Artificial Sequence: Synthetic coding sequence
  source 1..99: mol_type = other DNA
atgatgttccccctggcccggaacgccctgagcagcctgaagatccagtccatcctccagagcatggcccgtcacagtcacgtaaagcactctccgtag

SEQ ID NO: 184417 - DNA, 243 bp, synthetic construct
  misc_feature 1..243: note = Description of Artificial Sequence: Synthetic coding sequence
  source 1..243: mol_type = other DNA
atgttccccctggcccggaacgccctgagcagcctgaagatccagtctatcttgcaatctatggccaggcactcccacgtgaaacacagtcccgactttcacgataagtatgggaacgctgtgctcgcctctggcacagcattctgtgtggctacttgggtattcacagcaacacaaattggaatcgagtggaacctttcccctgtcggacgggtgactccaaaagaatggaagcaccagtag

SEQ ID NO: 184418 - DNA, 192 bp, synthetic construct
  misc_feature 1..192: note = Description of Artificial Sequence: Synthetic coding sequence
  source 1..192: mol_type = other DNA
atgctgggccagagcatccggcggttcaccaccagcgtggtgcggcggtcacactatgaggagggaccggggaaaaatctgccctttagtgtagagaacaagtggagcctgttagccaaaatgtgtctttatttcggctcagcttttgctaccccgtttctcgtagtgaggcaccaactgctgaagacgtag

SEQ ID NO: 184419 - DNA, 192 bp, synthetic construct
  misc_feature 1..192: note = Description of Artificial Sequence: Synthetic coding sequence
  source 1..192: mol_type = other DNA
atgctgggccagagcatccggcggttcaccaccagcgtggtgcggcgctctcattacgaggagggtcccggcaaaaacttgcctttctctgttgagaacaaatggagtctgctcgcgaaaatgtgcttgtatttcggaagtgcgttcgccacaccttttctggtcgtacgccaccagctgttaaaaacgtag

SEQ ID NO: 184420 - DNA, 978 bp, synthetic construct
  misc_feature 1..978: note = Description of Artificial Sequence: Synthetic coding sequence
  source 1..978: mol_type = other DNA
atggccgccgccgccgccagcctgcggggcgtggtgctgggccccagaggtgccgggttgccaggtgcgcgagcacggggactgctctgctccgcacgtcccgggcagttacctctgaggacaccccaggccgtcgctttatcctctaaatcggggttgagtcgagggagaaaggtaatgttgtcagctctgggtatgctggctgctggtggggccggtctggccatggccctccactctgctgtctcagcaagcgacttggagctccatccacctagctacccttggagccataggggtttgttatcatcgctcgaccatacttcaattcgccgagggttccaggtgtataagcaagtatgcgcctcatgccattccatggatttcgtcgcttaccggcatcttgtaggggtgtgttataccgaggatgaagcgaaagaactagcggctgaggtggaagtacaggacggccccaacgaggacggagaaatgttcatgagaccaggtaaacttttcgactatttccccaagccttatccaaactccgaggccgctcgcgctgcaaataacggcgcactgccacccgacttgtcctacatagtgcgcgcccgccacggaggcgaggactacgtcttcagcctccttactggatactgtgagccccccacgggcgtatcattacgagagggactttacttcaatccctatttccctggccaggccatcgctatggccccgccaatctacactgatgttttggagttcgatgatggcacccctgccactatgtctcagattgccaaggatgtctgcacctttttgaggtgggcaagtgaaccagaacatgaccatcggaagaggatggggctgaaaatgttgatgatgatggccctgctggtccccctagtttacaccatcaaaagacacaagtggagtgtactcaaatccaggaagctggcatatcgaccccctaagtag

SEQ ID NO: 184421 - DNA, 252 bp, synthetic construct
  misc_feature 1..252: note = Description of Artificial Sequence: Synthetic coding sequence
  source 1..252: mol_type = other DNA
atggagcccttcgtggtgctggtgctgtgcctgagcttcatgctgctatttagcctgtggcgccagagttgcagaagaagaaaattgccaccaggtcctactccactgccgatcatcggcaacatgctgcagatcgacgtcaaggacatctgtaagtcatttacaaatgtatctctgccatatgtaccacctgccaactgtaagggaagtcagaaatccatggtgctctgctcgccctgcatcctcgcttag

SEQ ID NO: 184422 - DNA, 219 bp, synthetic construct
  misc_feature 1..219: note = Description of Artificial Sequence: Synthetic coding sequence
  source 1..219: mol_type = other DNA
atggagcccttcgtggtgctggtgctgtgcctgagcttcatgctgctcttcagcctttggaggcagtcctgtcgccgcagaaagctcccgcccggtcccacccccttacccattatcgggaacatgctgcagatcgacgttaaggatatttgcaaatcttttactaacgtgtcattgccatatgtcccgcctgcgaattgcaaaggcgttttgctttag

SEQ ID NO: 184423 - DNA, 423 bp, synthetic construct
  misc_feature 1..423: note = Description of Artificial Sequence: Synthetic coding sequence
  source 1..423: mol_type = other DNA
atggacctgatccccaacctggccgtggagacctggctgctgctggccgttagtctcgtgctgttgtacctgtatggaacacgtacccatgggctctttaaacggctagggattcccgggcccacccctctccctttgctcggcaatgttctgagctatcggcaagggctgtggaaattcgatacggagtgttataagaagtatggcaagatgtgggggacttatgagggacagttgccagtcctggctatcaccgaccccgatgtcattagaaccgtgttagtgaaagagtgttattccgtcttcaccaatcgaagaatctgcgcaactactagtacaatcaaaatgcagacacattctgtcaccatgtggctacccccagctgttttgcaatcccagcatggcgtttgcttgttcctgtag

SEQ ID NO: 184424 - DNA, 1563 bp, synthetic construct
  misc_feature 1..1563: note = Description of Artificial Sequence: Synthetic coding sequence
  source 1..1563: mol_type = other DNA
atgccccagctgagcctgagcagcctgggcctgtggcccatggccgcaagtccatggctattgctcctgctggtgggcgcaagttggctgctggccaggattctggcatggacttatactttttacgacaattgctgccgcctgcgctgctttccacagcctccaaaacggaactggttcttagggcacttggggctggtgacccctacagagcagggaatgcgagtactcacacaactggtggctacctatccccagggattcaaagtatggatgggcccaattttcccggttatccggttctgccatccaaacattatccgaagtgtgatcaacgcctccgctgcaattgtgcccaaggataaggtgttttatagtttcctcaaaccctggctgggagacggtttgctgctgtccgcaggggagaagtggtccaggcatcgccggatgcttaccccagcctttcattttaatattctcaaaccttatatgaaaatcttcaatgaatctgtcaatatcatgcacgccaaatggcaattgctggcatctgagggatcagcccgactggatatgttcgagcacatcagcttgatgaccctggatagtctgcagaaatgcgtgttcagcttcgacagccattgtcaggaaaaaccgtcagagtacattgccgcaatcctcgagctgtcagccctggtgacgaagcggcatcagcagatcctcctgtacattgacttcctttactacctcacaccggacggacagaggtttagacgcgcctgtaggttagtgcacgacttcacagacgcagtaatccaggagagacgcaggaccttacctagccagggggtggatgattttcttcaggctaaagctaagtccaagacgttagattttatagacgtgttactgctttcaaaagacgaagatggtaagaaactgtccgacgaggatatccgcgccgaagcagatacattcatgtttgaaggccacgatacgaccgcatccggactgtcctgggtcttgtatcacttggctaaacaccctgagtaccaggaaagatgcagacaggaggtgcaggagcttctgaaggaccgagagcccaaggaaattgagtgggacgatctcgctcaactcccctttctcactatgtgtatcaaggaatcattaaggctccatccacccgtacccgccgtcagcagatgctgcacccaggatatcgtgctgcctgacgggagggtgatccctaagggtattatctgcctgatttctgtgtttggcactcaccacaacccagccgtttggcccgatcctgaagtctatgatcccttccgcttcgaccccaagaacattaaagaacgctctcctttggcgttcataccctttagcgcggggcctcggaactgcattggccaggcctttgcaatggccgagatgaaggtggtgcttggtctgaccctgctccggttcagagtactgccggaccacaccgaacctcgtagaaaaccagagctagtgcttcgcgctgagggcggtctgtggttgcgtgtggagcctctcagttag

SEQ ID NO: 184425 - DNA, 1455 bp, synthetic construct
  misc_feature 1..1455: note = Description of Artificial Sequence: Synthetic coding sequence
  source 1..1455: mol_type = other DNA
atgctgttccccatcagcatgagcgccaccgagttcctgctggcctctgtcattttctgccttgtcttttgggttattagagcctccagacctcaagtgccaaaaggcctgaagaaccctccaggcccatggggctggccattgatcggccacatgcttacgttgggaaaaaatcctcacctcgctctctctcggatgtcccagcaatatggagacgtactgcaaatccggataggatccacccccgtggtagtgctgtcggggctagacaccattagacaggccctcgttcgacagggggacgatttcaaaggcaggccagatctgtacaccttcacgttaatttctaacggtcagtcaatgtcctttagtccagattccggccctgtctgggctgcgagacgtagactggcgcagaacggattgaagagtttctccattgcctcagatcccgcatcctcaacatcatgttatcttgaggaacatgtgtctaaggaggccgaggtgctcatttctaccctccaagaactcatggctggtccaggacacttcaacccttacagatacgtagttgtatctgtgaccaatgtgatctgtgcaatatgtttcggacgccggtacgatcacaatcaccaggagttgctgtccttggtcaacctgaacgcctttaaagacttgaacgaaaagttttactcttttatgcaaaaaatggtgaaagaacattataagaccttcgaaaagggccacatccgcgatatcaccgatagcctgatcgagcattgtcaggagaagcagctcgatgaaaatgcaaatgttcaactgtccgacgagaagattattaatatcgttctcgacctgttcggtgcagggttcgacaccgtgacaactgcaatttcatggtcattaatgtatctggtcatgaatccccgagtccaacgtaaaattcaggaagagctggacactgtgatcggacgctcccggcgtccacggttgtccgatagaagtcaccttccgtacatggaggctttcattttggaaaccttccgccactcttcctttgtccccttcaccatccctcattcgacaacacgcgatacttctttgaaagggttttacattcccaagggtcgttgtgtgtttgtcaaccagtggcagatcaaccatgatcaaaagctttgggtaaaccctagcgagttccttccggaacgatttcttacacccgatggagctatagataaggtgctatctgagaaagtaatcatctttggaatgggcaagagaaaatgcataggtgaaacaattgcacgatgggaggtatttctgtttcttgccatcctgttacagcgggtggagttttctgttccactcggtgtcaaggtggatatgacgcctatttatggcctgacaatgaagcatgcttgttgtgaacactttcaaatgcagctgaggtcatag

SEQ ID NO: 184426 - DNA, 1539 bp, synthetic construct
  misc_feature 1..1539: note = Description of Artificial Sequence: Synthetic coding sequence
  source 1..1539: mol_type = other DNA
atgctgttccccatcagcatgagcgccaccgagttcctgctggcctccgtaatattctgcctggtcttctgggtgatccgtgctagccgaccacaggttcccaagggactgaagaatcctcccgggccatggggctggcccctgatcgggcatatgctgacacttggcaaaaacccccacctggccttatcccggatgagccagcagtacggcgatgttcttcagattcgcatagggagcacacccgttgtagtgttatctggcctggatacgatccgccaggcactcgttaggcagggagacgacttcaaagggagacccgatctctatactttcaccttaattagcaacggccagagcatgtcattctccccagacagcggacctgtctgggctgccagaaggcggctggcacagaacggacttaaatcttttagcattgcctcggatcccgccagctctacctcatgctatctggaagaacacgtgtctaaagaggcggaggtactgatctctacgttacaggagcttatggctggacctggccattttaacccgtacaggtacgtggtggtgagcgtcactaatgttatctgtgccatctgttttggtagaagatacgatcacaaccatcaagaattgttgtcccttgttaatctcaacaacaacttcggcgaggtcgtcggatcaggcaacccagcggatttcataccaatactgaggtacctgcccaaccccagtctgaacgcgttcaaggatctgaatgagaagttctacagtttcatgcaaaagatggtgaaggagcattataaaaccttcgaaaagggtcacatccgggatatcaccgacagcctgatcgaacactgccaagaaaagcagctggacgagaatgcaaatgtacaactaagcgatgagaagattatcaacattgtgctcgatctgttcggcgcagggtttgatactgtgacaacagccatcagctggagcctgatgtatctggttatgaatccgagggtccagcgcaagattcaagaagagttagataccgtcatcggccgaagcaggcgcccccggctaagcgataggtctcacctcccatacatggaggcttttatcctcgagacattcaggcactcttctttcgtgccatttactatcccccattcgactaccagggacaccagcctcaaagggttctacattccgaaaggccgatgtgtgtttgtgaatcagtggcaaatcaatcacgaccaaaagctgtgggtcaatcctagcgagtttcttccagagaggtttttgacaccagacggtgcgattgataaagtgctgtctgagaaggtgattatcttcgggatgggaaaaagaaaatgtattggggagaccatcgctcgctgggaagtgttcctgttcttagctatcctgctgcaacgcgttgaattctcagtgcctctaggcgtgaaagtagatatgactcctatctatgggttgacaatgaaacacgcatgctgtgaacactttcaaatgcagcttagatcttag

SEQ ID NO: 184427 - DNA, 1539 bp, synthetic construct
  misc_feature 1..1539: note = Description of Artificial Sequence: Synthetic coding sequence
  source 1..1539: mol_type = other DNA
atgctgttccccatcagcatgagcgccaccgagttcctgctggcctcagtcattttctgcctcgtgttttgggtgatacgggcctcccgccctcaggtccccaaggggcttaaaaacccaccggggccctggggttggcccctgattggccatatgctgaccctgggaaaaaatcctcaccttgctctcagtcgcatgtcacagcaatatggcgatgtcttgcagattcgcatcggatcgacccccgtcgtggtgctatctggactggacactatacggcaggcgcttgtgaggcagggcgacgactttaaaggtcgtcctgacctctatacattcacactgatctcaaatggccagtccatgtcattttcacccgacagcggccccgtttgggctgcccggcgccgtttagcgcaaaatggccttaagagcttcagcattgctagcgaccccgcaagttctactagttgttacctggaggagcacgtgagcaaggaggcagaagttcttatttcaaccctgcaagaactaatggccggcccagggcacttcaatccttaccgctacgtggtggtgtccgttacaaacgtaatctgtgccatttgcttcgggcggcgttatgatcacaaccatcaggagttgttgtccctcgtgaatctgaacaacaatttcggggaggtggtcggctcaggaaacccagccgattttatcccaatcctgcgctacttaccaaacccttccctgaatgctttcaaagatctcaatgaaaaattttacagtttcatgcagaagatggtgaaggagcactataaaacttttgagaagggtcatatccgtgatatcaccgactccctgattgagcattgccaggagaagcagcttgacgagaacgctaacgtgcaactgagcgatgaaaagatcatcaacatagttttggatttattcggggctggatttgacacggtgacgaccgccatctcttggtcactgatgtatctcgtgatgaatccccgagtacagagaaaaatccaggaagagctggacactgtcattggcagatccagacggcccaggttgagtgatcgatcccatcttccatacatggaggcgttcatcctggagacctttaggcattcttccttcgtgcctttcaccatcccacattctactacgagagacacatcgttaaaaggtttctatattcccaaagggaggtgtgtttttgttaatcagtggcaaatcaaccacgaccagaaattgtgggtgaatccttccgagttcctcccagagagattcctgacacctgacggggctatcgataaggtgctcagcgagaaggtgatcatcttcggtatggggaagagaaagtgcattggggaaaccattgcaagatgggaggtcttcttatttcttgcaatcttgctgcagagggttgaatttagcgtaccgctcggtgtcaaggtggatatgactcccatttatggcttgacaatgaaacacgcctgctgcgagcacttccaaatgcaattgcgaagttag

SEQ ID NO: 184428 - DNA, 1452 bp, synthetic construct
  misc_feature 1..1452: note = Description of Artificial Sequence: Synthetic coding sequence
  source 1..1452: mol_type = other DNA
atgctgttccccatcagcatgagcgccaccgagttcctgctggccagtgtgatcttctgtctggtgttctgggtgatccgggcctcccgacctcaagtccccaaaggactcaaaaaccctcctggcccctggggctggcccttaattggacatatgctgacactcggcaagaacccccacctagccctttcccgcatgagccagcagtacggtgacgtcctgcagatccgaataggtagtacacctgtggtcgtgctgtctgggctagacaccattcgccaggccctcgttcggcagggggatgattttaagggacgaccagacctctatacgttcaccctcataagtaatggccaatcaatgtctttctcccccgactctggtccagtatgggccgctagaagacgcctggctcagaacgggctgaagtccttctcaatcgccagcgatcccgcatccagcacatcctgttacctggaagaacatgtatccaaagaggccgaagtactgatatccaccctgcaggaactgatggctgggcctgggcacttcaacccttataggtacgtggtagtatctgtgactaatgtgatttgcgctatatgctttggaaggcgttatgatcataaccatcaagaactgctgagtctggtgaacctcaacaacaactttggcgaggtggtggggagtggcaacccggcagattttatcccaattcttcggtacttgcctaatccatctcttaacgcattcaaggacctgaacgagaaattctacagtttcatgcaaaaaatggtgaaagaacactacaaaactttcgagaaaggacacatccgagatatcaccgattccttgatagagcactgtcaagaaaaacagctggacgaaaacgctaatgtgcagttgagcgatgagaagatcatcaacattgtgctggacctgttcggcgccgggttcgacacagtcacaactgcaatttcgtggtcccttatgtatttggtcatgaacccacgcgtacaaaggaaaatccaggaagaactggacacagtcattggtcggtctcgccggcccagactgtcagatagatcacatctgccctacatggaggcctttatactcgaaaccttcaggcacagctcctttgtcccctttaccattccgcatagaaaattgtgggtaaatccctccgagtttctgcctgagcgatttttaacaccagatggcgcgatagacaaggtgctctccgaaaaagtgattatcttcggtatggggaagagaaagtgcattggcgagacgatcgccaggtgggaggtcttcctgttcctcgcaattttactccagcgcgtcgagtttagtgtacccttaggtgtaaaagtagacatgacaccaatctatggcttgaccatgaagcacgcctgctgcgaacacttccaaatgcaactgagatcatag

SEQ ID NO: 184429 - DNA, 1551 bp, synthetic construct
  misc_feature 1..1551: note = Description of Artificial Sequence: Synthetic coding sequence
  source 1..1551: mol_type = other DNA
atggccctgagccagagcgtgcccttcagcgccaccgagctgctgcttgcctctgctatcttctgccttgtgttttgggtgctgaagggactcagacctcgggtacccaagggcctaaagtcccctcccgagccatggggttggcctctgctcggccacgtattgacactcggtaaaaatccccaccttgcgttatcccggatgtcacagaggtacggtgacgttcttcagatacgcattggctctactccggttcttgtcctctccagacttgacacgatccggcaggcgctcgtccgacaaggcgatgactttaagggccggcctgacctttatacctcaaccctcatcactgacggtcagtctctgacctttagcaccgattccggtcctgtttgggctgctcgccgacgcctggcacaaaacgcccttaacaccttctcaatcgcaagtgaccctgcctcaagttcgtcttgctacctcgaggagcacgtttcaaaggaggccaaggctctgatcagcagactccaagagcttatggccggacccggacactttgatccctacaatcaggtggtggtctcggtggccaacgtgatcggagccatgtgttttggccagcattttcctgagagtagtgatgaaatgctttctctcgtgaagaatacacacgagttcgtagaaaccgcctcctctggcaacccattagactttttccctatcctgagatacctcccaaatccggctcttcagaggttcaaagcgttcaaccagaggttcttgtggtttctgcagaaaaccgtgcaggagcattatcaagatttcgataaaaattctgtgcgggacatcactggggcgctgttcaagcactccaagaaggggcctcgagcatctggtaacctgatcccgcaggagaaaatcgtaaatcttgtcaacgatatctttggtgctggcttcgacaccgtgacaacagccatttcatggagcctcatgtatttagtaacaaaacctgaaatccagagaaaaatacaaaaagaactggatactgttatcggacgagagagaaggccacgtctgtccgatcgcccccaactgccatatctggaggctttcatattggaaacttttagacactccagtttcttaccatttactatccctcatagcacgacacgagacactacgcttaacggattctacatacccaagaaatgttgcgtgtttgtgaaccagtggcaggtgaaccacgacccagaactgtgggaggatccaagcgagtttcgacctgaaagatttctgacagcggatggcacagccattaataaacctttgtcggaaaagatgatgctcttcgggatgggaaagaggcgatgtataggagaagtgctcgctaagtgggaaatctttctctttctcgcaatcttgcttcagcagctggagttctccgttcctccaggggtgaaggtagacttaactcccatatatggcttaacgatgaaacatgccagatgtgaacacgtgcaggccaggttgcggttcagtatcaactag

SEQ ID NO: 184430 - DNA, 1512 bp, synthetic construct
  misc_feature 1..1512: note = Description of Artificial Sequence: Synthetic coding sequence
  source 1..1512: mol_type = other DNA
atggccctgcgggccaaggccgaggtgtgcatggccgtgccctggctgtcccttcagcgagctcaagccctcggcacccgggcagcacgggtgccccgtacagtcctgcccttcgaggctatgccaagacgtcccggcaatagatggctgaggctcctacagatttggagggagcaaggttacgaagatttgcatctcgaggtgcatcagaccttccaggaactcgggcctattttccgctatgatctggggggggccgggatggtctgcgtcatgttaccggaggatgtggaaaagttgcagcaggtggacagcctgcacccacaccggatgtcgctcgaaccttgggtggcatacagacagcaccggggtcacaaatgcggtgtgttccttcttaacggacccgaatggagatttaatcggctgaggttgaaccctgaagtgttgtctccaaacgccgtccagaggttcctgcctatggtcgacgccgtggcacgagatttttcgcaagccctgaaaaagaaagtgcttcagaatgcccgcggttccctcactctcgatgtccaaccctcgatcttccactataccattgaggcaagtaacctggccctcttcggggagagactgggccttgtcggccattctccaagttccgcctcactgaatttcctgcatgctctcgaagtgatgttcaagagcaccgtgcagctcatgttcatgcctaggtccctctcacgatggactagccccaaggtgtggaaggagcactttgaggcttgggattgcatctttcagtacggcgataactgcatacagaaaatttaccaagagctcgccttttcccgccctcaacagtacacctccatcgtggctgagctgttgctgaatgcggagctgtctcccgatgcgatcaaggccaacagtatggagttaacggcaggctctgtcgatacgactgtgttcccactgctaatgacattatttgaactggctcgtaacccaaatgttcagcaagccctcagacaggaaagcctggccgccgcagcctccatctcagagcatcctcagaaggccaccacagaactccctctcttaagggccgccctgaaagagactctcaggctgtaccccgttggtctattcctggaacgggtggcatcatctgacctggttctccagaattatcacatcccggcaggcacactggtgagagtttttttgtatagcctcggtaggaaccccgcgctttttcccagacctgaaaggtacaaccctcagcgctggctcgacatccgcggatcagggcgaaatttctaccatgtcccattcggctttgggatgcggcaatgtctagggcgtagactggctgaggctgagatgctgctactcttacaccacgttctgaagcacctgcaggtggagactctgacacaggaagacattaagatggtgtactcctttatactgcggccttccatgtttcctctgctgactttcagggccattaactag

SEQ ID NO: 184431 - DNA, 1314 bp, synthetic construct
  misc_feature 1..1314: note = Description of Artificial Sequence: Synthetic coding sequence
  source 1..1314: mol_type = other DNA
atggccctgcgggccaaggccgaggtgtgcatggccgtgccctggctgtcactgcaacgagcacaagccctcggtacgagagcagcgagagtgcctcgcacagtgctccccttcgaagccatgccaaggagacccgggaaccgctggctgcgcctgctccaaatttggcgggaacaggggtacgaagacctacatctcgaggtgcaccagacatttcaagaacttggacccatttttcgttacgatctgggaggcgctggcatggtctgtgtcatgcttcctgaagatgtggagaagttacaacaggttgacagcctgcaccctcatcggatgagccttgagccatgggttgcttatagacagcaccgcggccacaagtgcggagtctttctcctcaacggccctgaatggcgattcaatagactgagacttaacccggaagtgctctcccctaatgccgtccagcggtttctacctatggtagacgccgtagcaagagattttagccaggcgctgaagaagaaggtgcttcagaatgcgcggggaagccttactctggacgtccaaccaagtatcttccactacacgattgaggctagcaacttagccctctttggcgaacggttaggcctagtcggccacagccccagctcagcgagcctaaatttcctgcacgccctggaggtcatgttcaagagcacagttcagcttatgttcatgccccgttccctttctcggtggacatccccgaaggtctggaaggaacacttcgaagcatgggactgcattttccagtatggcgacaattgcattcagaagatctatcaggagctggcctttagtcggccccagcagtacacgagtattgtggccgagctgttgctgaatgctgaactgtcacctgatgccatcaaagcgaactctatggaattgactgccggtagcgtggatacaaccgtttttccactgctgatgaccctcttcgagcttgcccggaaccccaatgtgcaacaggctttgcggcaagagtccttggccgcagccgccagcatcagcgagcacccacagaaggccacaactgagctccccctgcttcgagcagcgctgaaagagactctcagactatatcctgttggcttatttttagagcgggttgcctccagtgacctggtgctacagaattatcacattcctgcaggcgtgctcaagcacctgcaggtggaaacactcacgcaagaagacatcaagatggtgtatagctttatccttagaccatcaatgttccccctgctgacttttcgagcaatcaactag

SEQ ID NO: 184432 - DNA, 1512 bp, synthetic construct
  misc_feature 1..1512: note = Description of Artificial Sequence: Synthetic coding sequence
  source 1..1512: mol_type = other DNA
atggccctgcgggccaaggccgaggtgtgcgtggccgccccctggctgagcctccagcgcgctagggctctgggcacaagagctgccagggcccccagaaccgtgctcccgttcgaggcgatgccacaacaccccggaaacagatggctgcgtctgcttcagatctggagagaacaaggatatgagcacctacatctcgaaatgcatcagacattccaggaactgggcccgatcttcagatacaatctgggcggaccccgcatggtgtgtgtgatgctaccagaggacgtcgagaagctacaacaggtcgatagcctgcatccttgtaggatgatcctggagccttgggtggcctaccggcagcaccgtggccacaaatgtggtgtctttttgcttaatggcccagaatggcgttttaatcgcctcaggttgaatcccgacgtattgtctccgaaagccgttcagcgctttttacccatggttgatgcagtagcccgcgattttagccaggcgcttaagaagaaggtcctccagaatgctcgaggctctctcactctggacgttcaaccttccattttccactatactatcgaagcgtccaacctggccctgtttggcgaacgactggggcttgtcggacattctcctagttctgcttcactgaattttcttcatgcattagaggtgatgtttaaatccaccgtgcagttgatgttcatgcccagatctctgagccggtggatctccccgaaagtctggaaggagcactttgaggcctgggactgcatctttcagtatggcgacaattgtattcagaagatataccaagagctcgcatttaaccgaccgcagcactacacaggtatcgttgctgagcttctgctcaaagccgagctcagcctggaagctataaaggcaaactcaatggagcttacagcggggtccgtcgataccacggctttccccttgctcatgacactgttcgagttagcccgtaaccccgatgtgcagcagatcctaaggcaggaaagtcttgcagccgctgcatcaatttccgagcacccacagaaagctacaaccgagctgcccctgttacgggccgcattgaaagaaaccttgaggttgtaccctgtaggcctatttttggagcgagtcgtcagcagtgacttggtactgcagaattatcatatccccgctgggactctcgtgcaagtctttctctattctcttggtaggaatgctgccctgttccccagaccagagagatacaatccccaaaggtggctcgatattcgcggttcagggagaaattttcatcacgtccctttcggattcgggatgcgtcagtgtctcggacgacgcttggcagaagccgaaatgttgctcctgctgcatcatgtgcttaagcatttcctagttgagactctcacgcaggaagatattaaaatggtgtattctttcatccttcggccaggtacaagtcctttgctgacctttagggccatcaactag

SEQ ID NO: 184433 - DNA, 1527 bp, synthetic construct
  misc_feature 1..1527: note = Description of Artificial Sequence: Synthetic coding sequence
  source 1..1527: mol_type = other DNA
atgtgggagctggtggccctgctgctgctgaccctggcctacctgttttggcctaaaaggagatgccccggcgcaaaatatccgaaaagcctgcttagcctccccctcgtgggatcactgccctttcttcctcgacacgggcatatgcacaacaatttctttaaactccagaaaaagtatggtccaatctacagcgttagaatgggcaccaagacgaccgtgatagtgggacaccaccagctggccaaggaggtgctgattaagaaagggaaagacttctccggccgcccccaaatggccactctggacatcgccagtaacaatcgcaagggcattgcattcgctgactctggcgcgcactggcagttgcacaggagactggctatggctacatttgccctctttaaagatggagatcagaaactcgaaaagatcatctgtcaggagatctctactctgtgtgatatgctggccactcataatggacagtcaattgatatctcctttcccgtctttgtcgccgtgaccaatgtgatttccctcatatgcttcaacacttcctataaaaatggcgacccagagctcaatgtgatacagaactacaacgagggaatcatagataatttgagcaaggactcattggtggacctggtcccttggcttaaaatctttcccaacaagacattagaaaaacttaagagccacgtcaagatcagaaacgacctgcttaacaaaatcctcgagaactacaaagagaagtttcgatcagattccatcactaacatgttggacactttgatgcaggcgaagatgaattccgataacggtaacgccggaccagatcaggattcagagctgctgagtgacaaccacattctcacaactattggtgacatctttggtgctggggttgaaaccacaacatccgtggtgaagtggactctggcctttctcctccataaccctcaggtcaaaaagaaactctacgaagaaatcgaccaaaatgtcggcttttcccggacacccaccatctctgacaggaatagactcttgctgctggaggctactattcgtgaggtgttgcgactgcggcccgtggccccaatgctcatcccccataaggcaaatgtcgacagttcaattggagaatttgctgtcgataaagggaccgaggtgattatcaatttgtgggccttgcaccataatgagaaagagtggcatcagcctgaccagttcatgccggagcggttcctgaaccccgccggcacacaactgatctccccctcagtgtcttatctgcccttcggcgccgggccccgtagttgcattggcgagatcttggcccggcaggaactattcctcatcatggcctggctgcttcagaggttcgacctggaagtcccagatgacggccagctaccttcactcgaaggcattcccaaggtcgtttttctgatagatagcttcaaggtcaaaattaaggtaaggcaggcctggagggaagcccaagccgagggctcgacgtag

SEQ ID NO: 184434 - DNA, 1512 bp, synthetic construct
  misc_feature 1..1512: note = Description of Artificial Sequence: Synthetic coding sequence
  source 1..1512: mol_type = other DNA
atggtgctggagatgctgaaccccatccactacaacatcaccagcattgtgccagaggcaatgcctgcagctactatgccagtactgctgctcaccggcctgttcctgctggtctggaactacgaaggcactagttccatccctgggccagggtactgcatgggtatcggccccctgatcagccacgggaggttcctctggatgggcatagggtccgcatgtaactattataatcgcgtctacggcgagttcatgagagtctggatcagcggggaagagactctaataatcagcaaatcttcttcaatgtttcacattatgaaacacaaccattatagtagcagattcggcagtaaactgggcctgcaatgtatcgggatgcatgagaagggaataatctttaacaataacccagagctctggaaaaccaccaggcccttctttatgaaggcactttccgggccaggattggtaaggatggttacagtttgtgctgaatcacttaagacacatctcgacaggctggaggaggtgaccaacgagagcggatatgtggatgtgctgacactacttcggcgcgttatgctagacacatcaaacactctgtttctgcgaatccccctggacgagtccgccatcgttgtcaaaattcagggctattttgacgcctggcaagcactgcttatcaaacccgatattttctttaagatctcctggctttacaagaagtacgagaaatctgtgaaggaccttaaggatgccatcgaagttcttattgctgagaaaagacgaagaatctctaccgaagagaaactggaggagtgcatggatttcgctaccgagttaattttagccgaaaaacgtggagatctaacacgggagaacgtcaaccagtgcatcttagaaatgcttatagccgctcccgatacgatgagcgtctccttattttttatgctcttcctgatcgcaaaacaccctaacgttgaggaagccattattaaagagattcagacggtgatcggagaacgcgacatcaagatcgatgacatacagaagctgaaggttatggagaatttcatctatgagagtatgcggtatcagcccgtggttgatctcgtaatgcgtaaagcactggaagacgacgttatcgacggctatccagttaaaaaaggcacgaatatcatcctgaacatcggacgtatgcacagactcgagtttttccccaagcctaacgagtttacgttggagaattttgctaagaatgtgccctacagatatttccagccctttgggttcggaccccgtggatgcgcaggtaagtatatcgcaatggttatgatgaaagctatccttgtaacactgttgagacgctttcacgtgaaaactcttcaggggcaatgcgttgagtctatccaaaaaatccacgacctatctttgcatcccgacgagaccaagaacatgctcgagatgatatttacccctcgcaattcagaccgctgtttagagcactag

SEQ ID NO: 184435 - DNA, 1512 bp, synthetic construct
  misc_feature 1..1512: note = Description of Artificial Sequence: Synthetic coding sequence
  source 1..1512: mol_type = other DNA
atggtgctggagatgctgaaccccatccactacaacatcaccagcattgtgcctgaggctatgccagctgcgacgatgcccgttctgctactcaccggcctgtttctgctcgtgtggaactatgagggcaccagctcgatccccggacccggctattgcatggggattggacccttgatatcccatggaagatttctctggatggggatcggctctgcctgcaactattacaacagagtgtacggggagttcatgagggtctggataagcggggaagaaacactgattatttcaaaatcttctagcatgtttcatattatgaagcacaatcactatagctcacgtttcggaagcaagcttggattgcaatgcattggaatgcacgagaaaggtattatttttaacaacaatcctgagctgtggaagactacaaggcccttctttatgaaggccctttccgggcccggactcgtacgcatggtgacggtctgtgccgaatcgttaaagactcatctggaccggctagaagaagtcacaaatgaaagcggctatgtcgacgttcttactctactccgacgggtgatgctcgacacaagtaacactctgtttctgcgcattcccctggatgaatccgccattgtagtcaagatccaaggttacttcgatgcttggcaggctctcttgattaaaccagatattttctttaagatcagctggctgtacaagaagtacgaaaaatccgtgaaagatctcaaggacgcgatcgaggtgctgatagccgagaagcgccgtaggatatcaaccgaggagaagcttgaggagtgtatggacttcgctacagagctaatcttagccgagaagagaggggatctgactcgagaaaatgtaaaccaatgcatactggagatgttaatagcggctcccgataccatgtcggtctccctgtttttcatgcttttccttattgccaaacaccccaacgtcgaggaggctattataaaggagattcagactgtgattggtgagcgtgatataaaaattgacgatatccagaagttgaaggtaatggaaaattttatctatgaatcgatgcggtaccaaccggtcgtggatctagtcatgagaaaggcactggaggacgatgtaatcgacggctaccccgtaaagaaaggtaccaatatcattcttaacataggtcgtatgcatcgactggagttcttcccaaagccgaacgagttcacactggaaaatttcgctaagaatgtgccataccgttattttcaaccgttcgggtttggtccgcgcggatgcgctggtaagtatatcgcgatggtgatgatgaaggccatcctcgttacgctgttgagacggttccatgtgaaaaccctgcaggggcagtgcgtggagtccatccagaaaatccatgatctgtctcttcaccccgacgagactaagaacatgcttgagatgattttcactccccgtaattcggatcgctgcctggagcactag

SEQ ID NO: 184436 - DNA, 1512 bp, synthetic construct
  misc_feature 1..1512: note = Description of Artificial Sequence: Synthetic coding sequence
  source 1..1512: mol_type = other DNA
atggtgctggagatgctgaaccccatccactacaacatcaccagcatcgtgccggaggcaatgccggcggccactatgcccgttttgctgctcaccggactatttctgctggtctggaactacgagggcaccagttccatacccggtcctggatattgcatgggaattggacctcttattagccacggccgcttcctctggatgggaatcggcagcgcgtgtaattactacaaccgggtctacggcgagttcatgagggtgtggattagcggcgaagagacactgatcatatctaagagctccagcatgtttcatatcatgaagcacaaccattatagctctaggttcggttctaaattggggcttcagtgcatcggaatgcacgaaaagggtattattttcaacaataacccagagctgtggaagacgacccggccttttttcatgaaagctctcagcggacctgggcttgttcggatggtgacggtctgtgccgaatccctgaagacgcatctggaccgcctggaagaggtaactaacgagagtggttatgtggatgtgctcaccctactgaggagagttatgctagacacctccaatactctatttctgcgtatccctttggacgagagcgcaattgtagtgaaaatccaaggctactttgacgcatggcaggccctgctcatcaagccagatatcttctttaaaatctcgtggttgtacaagaagtacgagaagagtgtaaaggacctcaaagatgccattgaggtgctgattgctgagaaacgtaggcggatctccactgaggagaagctggaggaatgcatggattttgcaactgagctgatcctggccgagaagcgcggagacttgactcgcgagaatgtcaatcagtgtatcctggaaatgctgattgctgcccctgacacgatgtctgtgagcctgttttttatgctttttctgatcgctaagcacccgaacgtcgaggaggccattatcaaagaaattcagactgtaattggcgaacgtgatataaagatcgatgatatccaaaaactcaaagtgatggaaaacttcatctacgagtccatgagataccaacctgtcgttgatctggtcatgcggaaggctctggaggacgatgtgatcgatgggtaccccgtgaagaagggaaccaatataattttaaacataggcaggatgcaccgtctggaatttttcccaaaacctaacgaatttacactggagaatttcgcaaaaaacgtgccatacaggtattttcagcccttcggatttggccctagaggatgcgcaggcaagtatattgcaatggttatgatgaaggctattttagtgaccctcctgcggagatttcacgtcaagactcttcaggggcagtgcgtcgaaagcatccagaaaatccacgacctcagtctgcatccggacgagacgaaaaatatgttggagatgatctttaccccacggaattcggatcgctgtcttgaacactag

SEQ ID NO: 184437 - DNA, 501 bp, synthetic construct
  misc_feature 1..501: note = Description of Artificial Sequence: Synthetic coding sequence
  source 1..501: mol_type = other DNA
atggtgctggagatgctgaaccccatccactacaacatcaccagcatcgtgccggaagcaatgccagccgcaacgatgcctgttttattgcttactggactgttcctgctggtctggaactatgaagggacgtctagcatcccaggacctggttactgtatgggcatagggcctcttatcagtcacggacgcttcctctggatgggaatcggaagcgcttgtaactactacaatagggtgtacggtgaatttatgcgggtgtggatctctggggaggaaacactaattatcagtaagtcgtcaagtatgtttcacataatgaaacacaatcattattctagcagattcgggagcaaactgggtctacagtgtatagggatgcatgaaaaaggcatcatatttaataacaatcccgagctctggaagacaacaagaccgttctttatgaaagctctgagcggtcccggcttggtgcgaatggtgaccgtgtgcgcagagtag

SEQ ID NO: 184438 - DNA, 657 bp, synthetic construct
  misc_feature 1..657: note = Description of Artificial Sequence: Synthetic coding sequence
  source 1..657: mol_type = other DNA
atggtgctggagatgctgaaccccatccactacaacatcaccagcatagtgcccgaggcgatgcccgctgcgacaatgccagttctgctcctaacaggcctcttcctgctagtgtggaattacgaagggacgagcagtatcccaggacctggctattgtatggggatcgggccactgatttctcacggccggttcctttggatggggattggctcagcttgcaactattacaatagggtttacggggagtttatgcgcgtctggatctccggcgaagaaactctcataatcagcaagagcagtagcatgtttcacatcatgaagcacaaccactattcctctagattcggctcgaaactcggtctccagtgcattgggatgcacgaaaaaggaatcatctttaacaataaccctgaactctggaagacgacaaggccctttttcatgaaagccctgagcgggccaggtttggtcagaatggtcacagtctgcgccgagagcttgaagacgcacctggatcggctcgaggaagtgactaatgaatccgggtatgtggatgtgctgacattgttacgcagggttatgctcgacacatccaacaccttatttctaaggattcccctggatggaaccgagatcttcacattgacaagttag

SEQ ID NO: 184439 - DNA, 1080 bp, synthetic construct
  misc_feature 1..1080: note = Description of Artificial Sequence: Synthetic coding sequence
  source 1..1080: mol_type = other DNA
atggtgctggagatgctgaaccccatccactacaacatcaccagcatcgtgcccgaagcaatgcctgctgcaactatgcccgttttgttactgaccggtctgtttctgctggtgtggaactacgagggcacttcttctataccaggccccggttactgcatgggtataggccccctgattagtcacgggcgattcctgtggatgggcatcgggtccgcatgcaactattacaacagggtttatggagaattcatgcgcgtgtggatctccggtgaggagacgctgattattagcaaatcttcctccatgttccacatcatgaagcacaatcattattcttctcgattcggttctaaactgggactccagtgtatcgggatgcacgagaagggaatcatttttaacaataatccagagctgtggaaaacaacccgcccctttttcatgaaggccctttctggccccggattggtgaggatggtgactgtctgcgccgagtctctgaaaacccacttggacaggctggaagaggtaactaatgagtctggttatgtagatgtcctgacactgctgagaagggtcatgctggacaccagcaataccctgttcctccgcatcccgctcgatgagagcgctatagtcgtgaagatccagggttactttgatgcctggcaagctttgctgatcaaaccagatattttcttcaagatcagctggctgtacaagaaatacgagaagtccgtcaaggatctgaaagacgccattgaggtcctgatagctgagaagagaagacgcatctctaccgaagaaaaactcgaggaatgcatggattttgcgactgaactaatattggcagagaagagaggggatcttacacgggagaacgtgaaccaatgcattttggagatgcttatcgctgcaccagatactatgagcgtatccctgttctttatgttattcctaatcgccaagcaccccaatgttgaggaagctatcatcaaggagatccagaccgtgattggtgagagggacattaagatcgacgatatacaaaaactgaaaaagcatgacgctaagtag

SEQ ID NO: 184440 - DNA, 1059 bp, synthetic construct
  misc_feature 1..1059: note = Description of Artificial Sequence: Synthetic coding sequence
  source 1..1059: mol_type = other DNA
atggtgctggagatgctgaaccccatccactacaacatcaccagcatcgtgcccgaggccatgccagctgctaccatgcccgtgctcctgctgacagggctatttcttctggtgtggaactacgagggcacatcttcaatccctggccccggctattgcatgggaattggccctctcatcagtcacggacggttcctatggatgggcatcggcagcgcctgtaattactacaatagggtgtacggagagtttatgcgggtgtggatcagcggcgaagaaacattgattatctccaaaagcagctccatgttccacatcatgaagcacaaccattattcctctcgtttcggctctaaactgggactgcagtgtatcggcatgcatgaaaagggtatcatctttaacaacaatcccgagctgtggaagactacacgccctttcttcatgaaagccctctcaggaccagggttagtgagaatggtgactgtgtgcgcggagtcgctaaagactcacctcgaccgcctcgaagaggtgacaaatgagagcggctatgttgacgtactgaccctcctgaggagggtgatgctggacacatctaacacactttttttgagaatacctctcgatgagtccgccattgtggttaaaatccaggggtattttgacgcctggcaggcactattaattaaacctgacattttcttcaagataagctggctgtataagaaatatgagaaatcggtcaaagatttgaaagatgcaatagaagtgcttatcgctgagaagcgcagaagaatctcaactgaggagaagttggaagaatgtatggatttcgcaactgaattgatcctggcagagaaacgtggggacctcacccgggagaatgtcaatcagtgcattctcgagatgctcatagctgctccggacacgatgtcagtatccctctttttcatgctgttcctcattgccaagcaccctaatgtggaggaagctattatcaaggagatccagactgtcatcggggaaagggacatcaagattgatgacatccagaaatag

SEQ ID NO: 184441 - DNA, 729 bp, synthetic construct
  misc_feature 1..729: note = Description of Artificial Sequence: Synthetic coding sequence
  source 1..729: mol_type = other DNA
atggtgctggagatgctgaaccccatccactacaacatcaccagcatcgtacccgaggccatgccagccgcgacaatgccagtcctgctgctgaccggactgttcctgctagtctggaactatgagggcacaagttccatccccgggcccggttactgcatgggaatcggacccctgatctcccacggccgattcttgtggatgggtatcgggagcgcatgcaactattacaatcgggtctacggggagttcatgcgcgtttggataagtggagaggagacacttatcatttccaagagctccagcatgttccatatcatgaagcacaatcattactcaagcaggtttggctccaaactggggctccagtgcatcggcatgcatgagaaggggatcatttttaacaataatcccgagttatggaaaactacaaggccattctttatgaaggccctgagtggcccaggcctggtgcggatggtgaccgtatgtgcagagtccctgaaaacacacctggatagactggaagaagtgacgaatgaaagcggatacgtggatgtccttaccttactgcgtagggtgatgctcgatacttctaatactctgttcctgagaatcccattggacgagagtgccattgtggtcaagatccagggttacttcgacgcctggcaagctttgctgatcaaacctgacatcttctttaagataagttggctctataaatag

SEQ ID NO: 184442 - DNA, 546 bp, synthetic construct
  misc_feature 1..546: note = Description of Artificial Sequence: Synthetic coding sequence
  source 1..546: mol_type = other DNA
atggtgctggagatgctgaaccccatccactacaacatcaccagcattgttcctgaggctatgccggcagcgaccatgcccgtgcttcttctgacggggctgttcctcttggtctggaattacgagggcacatcttctataccaggcccgggctattgcatgggaattggccccctaatttcccacggccgtttcctatggatggggattggctctgcctgtaattactacaacagggtgtatggagagtttatgagagtgtggatctcgggggaggagaccctgattattagcaagtcttctagcatgttccatataatgaaacataaccactacagttcccggttcggaagtaaactggggttgcaatgcatcggcatgcacgaaaagggtattatcttcaataacaaccccgagctgtggaagaccaccagaccctttttcatgaaggcactgtcaggccctggattggtacggatggtcaccgtttgcgcggaatctcttaagacccatcttctgttgtttacgcccgcttccgtgaactag

SEQ ID NO: 184443 - DNA, 657 bp, synthetic construct
  misc_feature 1..657: note = Description of Artificial Sequence: Synthetic coding sequence
  source 1..657: mol_type = other DNA
atggtgctggagatgctgaaccccatccactacaacatcaccagcatcgttccagaagcaatgccagccgccacaatgcccgtgctgcttctcacaggactgtttctgctggtgtggaactacgaggggacttcctccattccaggccctggctattgcatgggcataggacctctgattagccatgggagattcctgtggatgggtattgggtctgcctgtaactactataatcgagtctacggtgaatttatgcgcgtgtggatctcgggggaggaaacgctgatcatatctaagtctagctccatgtttcacatcatgaagcacaatcactatagctcccgcttcggaagcaaactcggtctccagtgtatcggaatgcatgagaaggggatcatctttaacaacaaccctgagctgtggaaaaccacacgcccgtttttcatgaaggcactaagtggtcctgggcttgtaagaatggttaccgtgtgtgcggagagcctgaagactcatttagaccgactggaggaagtcactaatgagtcaggctacgtggacgtgctcactctgctacgacgtgttatgctcgatactagcaacactctgttcctgcgcattcccttagacggcacagaaatattcaccttgactagctag

SEQ ID NO: 184444 - DNA, 1059 bp, synthetic construct
  misc_feature 1..1059: note = Description of Artificial Sequence: Synthetic coding sequence
  source 1..1059: mol_type = other DNA
atggtgctggagatgctgaaccccatccactacaacatcaccagcatcgtcccagaagctatgcccgccgcaaccatgccggtgctcttgttgactggactgttcctgttggtctggaattatgagggcaccagcagcatccccggacctggctactgcatggggatcggccctttaatcagtcatggacgctttctctggatgggaataggcagcgcctgtaattactacaaccgggtttatggagaattcatgcgcgtgtggatttcgggagaggagacgctcattatttctaaatcgagcagcatgttccacatcatgaaacataatcactactcatctcgatttggctcaaagctcggacttcagtgcatagggatgcacgagaaaggcatcattttcaataataatcctgagctgtggaagaccactcggccgttcttcatgaaggcactgagcggccctgggttggtgcggatggttaccgtgtgtgccgagtccctgaaaacccacctggaccgcctggaagaggtgaccaacgagtccgggtacgtcgacgtcctgacattactccgcagagtgatgctcgacacctcaaataccctattcctccgcattccactggacgaatccgccatagttgtcaagattcaagggtatttcgacgcctggcaagccctcttgatcaagccagatatattttttaagatatcctggctatacaaaaaatatgaaaaaagcgtgaaggacctcaaagacgcaattgaagtgctcatcgctgagaagaggcggcggatcagcaccgaggagaagttggaagagtgtatggactttgccactgaactcatactggcggaaaaacgaggcgatcttactagagaaaatgttaaccagtgtattctcgaaatgttaattgcagcccccgatacaatgtctgtctccctgttctttatgctctttctcattgcaaagcatccgaacgtcgaagaagccattatcaaggagatccaaactgtcatcggagagcgagatatcaagatcgacgatattcagaagtag

SEQ ID NO: 184445 - DNA, 852 bp, synthetic construct
  misc_feature 1..852: note = Description of Artificial Sequence: Synthetic coding sequence
  source 1..852: mol_type = other DNA
atggtgctggagatgctgaaccccatccactacaacatcaccagcatagtgccggaggccatgcctgccgctacaatgcccgttctgctgctcactggtctcttcctgctggtgtggaattacgaaggcacgagttcaatccctgggccaggttactgtatgggaattgggcctctaatctcccacggcaggtttctctggatgggtatcgggtcagcctgtaattactataacagggtctacggggaatttatgcgtgtgtggattagcggtgaggaaactctcatcattagtaagagttcctccatgttccatataatgaagcacaaccattatagctcacgatttgggagcaagctaggacttcaatgcattgggatgcacgaaaagggcattatttttaataacaatcccgaattatggaagacaacgagaccattttttatgaaggctttgtcaggccctggcctggtccgcatggttaccgtgtgcgcagaatctcttaaaacacaccttgatcggctggaagaagtgacaaacgaatcggggtatgtggacgtgttgaccttgttgagacgggtgatgctcgataccagcaacacactattcttgagaataccactcgacgagtctgctatcgtggttaaaatccaaggctattttgacgcatggcaagccctcctcattaaaccggatatcttctttaagatttcgtggctctataagaagtacgaaaaaagcgtgaaagatctcaaggacgctatcgaagtgctgatcgcagaaaagcgcaggcgaatatccaccgaagagaaattagaggagtgcatggactttgctaccgaacttatctag

SEQ ID NO: 184446 - DNA, 498 bp, synthetic construct
  misc_feature 1..498: note = Description of Artificial Sequence: Synthetic coding sequence
  source 1..498: mol_type = other DNA
atggtgctggagatgctgaaccccatccactacaacatcaccagcattgtgccagaagccatgcctgccgctaccatgcccgtgctgctactgaccggcctttttcttctcgtttggaactacgaagggacatctagtattcctggaccggggtactgtatgggcattgggccactgatatctcacggccggtttttatggatggggattggcagcgcatgcaattactataacagggtgtatggagagttcatgagagtttggatttctggcgaggagaccctgatcatctccaagagttcttccatgtttcacatcatgaagcataaccactacagttcaagattcggttctaagttaggtttacagtgcatcgggatgcacgaaaagggaatcattttcaacaataaccccgagttatggaagacaacccgtccgtttttcatgaaggcactgtcagggcctggcctggtgagaatggtgaccgtttgcgcctag

SEQ ID NO: 184447 - DNA, 1512 bp, synthetic construct
  misc_feature 1..1512: note = Description of Artificial Sequence: Synthetic coding sequence
  source 1..1512: mol_type = other DNA
atggtgctggagatgctgaaccccatccactacaacatcaccagcattgtgcccgaggccatgccggcagctacaatgcctgtgctgctcctcacaggtcttttcctgctggtttggaactacgaggggacctctagcatacctggtcctggttactgtatggggataggacccctcatctcccatgggcggttcctctggatggggattggatccgcttgtaattactataatcgggtgtacggcgagttcatgagggtgtggatctccggagaggagacactgatcatctctaagtcatccagtatgtttcatattatgaagcacaatcattacagtagccgattcggcagtaagctgggcctgcagtgtatcgggatgcatgaaaaggggatcatcttcaacaataatcccgagctttggaagacaactcgtcccttttttatgaaagccttgagcggaccaggattggtccgcatggttaccgtgtgtgcggaatccttaaaaactcacctggaccgtctggaggaggtgacgaatgaaagtgggtatgtcgacgtcctgactttgctgcggagagttatgctggatacttctaacacactattccttcggattcctttggatgaatcagcaatcgtcgtgaagatacagggctacttcgatgcctggcaggcactgttgatcaagcccgacattttttttaaaatcagttggctgtataagaagtatgagaaatctgtgaaggatttaaaggacgcaatcgaggtcctcatcgctgaaaagagaaggcgtatctccactgaggagaaactcgaagagtgcatggatttcgctaccgaactgatactcgcagagaagaggggcgacctgacccgggaaaacgtgaatcaatgtattctggagatgctgatcgctgcccccgacactatgagtgttagtctgtttttcatgctttttctgattgcaaaacacccaaatgtggaagaagcaatcataaaggaaatccagacagttatcggcgaaagagacatcaaaatagacgacattcagaagttgaaagtgatggagaactttatctatgaaagcatgaggtatcagcccgtggtcgacttagtcatgaggaaagcactggaagatgatgtcatcgatgggtaccccgtgaaaaaaggtacaaacataattctcaatatcggccggatgcacagactggagttcttccccaagccgaacgaattcacactggagaatttcgctaaaaatgtcccctaccggtacttccagccattcggattcgggccccggggctgtgcgggtaaatacattgcgatggttatgatgaaagccatcctggtaactctacttaggaggtttcacgtcaaaactctgcaaggtcagtgcgtggagtcgatccagaagatccacgatctctctctgcaccccgatgagaccaagaatatgttggaaatgatcttcaccccaaggaactccgaccgctgtctcgagcactag

SEQ ID NO: 184448 - DNA, 519 bp, synthetic construct
  misc_feature 1..519: note = Description of Artificial Sequence: Synthetic coding sequence
  source 1..519: mol_type = other DNA
atggtgctggagatgctgaaccccatccactacaacatcaccagcattgtgcccgaagccatgccggccgctaccatgcccgtcctgctattgaccggtcttttcctcctggtctggaattacgagggcaccagcagtatcccggggccaggctactgtatgggcatcggcccccttatcagtcacggaaggttcctgtggatgggtatcggttccgcctgtaattattataatcgcgtgtatggagaatttatgcgggtttggatcagcggcgaggaaactttaatcatttctaaatcctcttccatgttccatattatgaagcacaaccattactcatcaagattcggctcaaaactagggctgcagtgcattggaatgcatgaaaagggaatcatcttcaataataatcctgaactttggaagacaacacgaccttttttcatgaaggccttgtctggcccggggttagttcggatggtcactgtgtgcgctgagagtctgaaaactcacctatag

SEQ ID NO: 184449 - DNA, 735 bp, synthetic construct
  misc_feature 1..735: note = Description of Artificial Sequence: Synthetic coding sequence
  source 1..735: mol_type = other DNA
atggtgctggagatgctgaaccccatccactacaacatcaccagcattgtacctgaagccatgccagcggccactatgcctgtcctcctgctgacagggctgtttctgctcgtctggaactatgaggggacatcttccattcctggtccgggctattgtatgggaatcggaccgctaatctctcacggaagattcctgtggatggggatcggatcagcttgcaattactacaatcgcgtctatggcgaatttatgcgggtatggatctctggagaagagacactgattatttctaaatccagttctatgtttcatattatgaagcacaatcattacagctctagattcgggtcaaaacttgggctacaatgtatcggaatgcatgaaaaaggaataattttcaacaataatccagagctttggaagaccacccgacctttttttatgaaagaatcagcaatagtcgtcaaaatacagggatactttgacgcctggcaggctttgctgataaaaccagatatctttttcaagatttcatggctctataagaagtacgaaaagtccgtgaaagacttgaaagacgccatcgaggttctgattgctgagaagcggcgccgaatatctaccgaagaaaagctggaagagtgtatggactttgctacagagttgatactggccgaaaagcggggcgatctcacccgagagaatgttaaccagtgcatcttggagatgtag

SEQ ID NO: 184450 - DNA, 1485 bp, synthetic construct
  misc_feature 1..1485: note = Description of Artificial Sequence: Synthetic coding sequence
  source 1..1485: mol_type = other DNA
atgctggccagcggcctgctgctggtgaccctgctggcctgcctgacagtgatggtacttatgtccgtgtggcggcagagaaagagtagaggcaagttaccccctggcccaacccctctgccatttataggaaattatttacagctgaataccgaacagatgtataacagcttaatgaagatctctgaacggtacggccctgtgtttaccatacatctgggacctagaagagtcgtggttctgtgtggccacgatgcagttaaggaggcactggtggatcaggctgaggagttctctgggcggggggagcaggctacttttgactggctctttaagggatacggtgttgcattttccaatggcgaaagggcaaagcagctgagacgcttctcaattgccacacttcgcggatttggggtggggaagagagggattgaggagaggatccaggaggaggctggattcctgatcgacgccctgcgcggaacccatggagccaatattgatccgaccttctttctgtccaggacagtctctaatgtgatttcatccatcgtgttcggcgatagatttgattacgaggacaaagagttcctcagtttgctgcggatgatgctgggtagttttcagttcactgcaacttcgacaggccagctctacgaaatgtttagctcagtaatgaagcatctccccggccctcagcagcaggctttcaaggagctgcagggcttagaggactttattgccaagaaagttgagcacaatcagcggaccctggatcccaactcccctagggactttattgatagttttctcataagaatgcaggaagaggagaaaaatccgaataccgagttttacctgaagaatcttgttatgaccaccttgaacctatttttcgcggggactgagactgtttccaccactctgcgatacggattcctgctcctgatgaagcacccagaggtcgaggcaaaggtccatgaggaaatcgatcgcgtgatcggaaaaaacagacagccaaaatttgaggaccgggctaagatgccatacactgaggcggtgatccacgaaatacaaagatttggcgacatgctgcctatgggcctggcacatagagtaaacaaggacacaaaatttcgtgattttttcctgccaaaggggactgaggtgttccctatgcttggaagcgtgttgagagatccgagattcttctcgaacccacgagacttcaaccctcagcacttccttgacaagaaggggcagtttaaaaaatccgacgcatttgtgccgttttcgatcggaaagagatattgcttcggggaggggctggctcgaatggaattgtttttgttcttcacaactatcatgcagaacttcaggtttaagagccctcaatctcctaaggacatagacgtgagcccaaagcacgtgggcttcgctaccattccacgaaattacaccatgagctttcttccacggtag

SEQ ID NO: 184451 - DNA, 1485 bp, synthetic construct
  misc_feature 1..1485: note = Description of Artificial Sequence: Synthetic coding sequence
  source 1..1485: mol_type = other DNA
atgctggccagcggcatgctgctggtggccctgctggtgtgcctgacagtaatggtactcatgtctgtctggcagcagcgcaagagtaaaggaaaactccctcctgggcccacaccgctgccatttatcggaaactatctccagctgaacaccgagcagatgtataacagcttgatgaagataagtgaacgatacgggcctgtgttcacaattcatcttgggcctagacgcgttgtggtcttgtgtggccatgacgcagtgagggaggcccttgtagatcaggccgaggagttctcgggccggggcgagcaggctacattcgattgggtgtttaaggggtacggtgttgtctttagtaatggtgaacgcgctaagcagcttagaaggttctctattgccaccttacgcgactttggagtgggcaagagaggaatcgaggagcgcatacaggaagaagccggtttcctcattgatgcactgcgcgggaccggcggtgctaatattgaccccacattcttcctgagcaggactgtgtcgaacgtgatctcatcaatagttttcggagatcggttcgactacaaggacaaggagtttttaagcttattgcggatgatgctggggatctttcaattcacaagcacatcaaccgggcagctgtatgaaatgttttccagtgttatgaaacatttgcccgggcctcagcagcaagccttccaactgttacagggtctggaagattttatcgctaagaaagtggaacacaatcagagaacccttgatcctaacagcccccgcgactttatagactccttcctgatcagaatgcaggaggaagaaaaaaacccaaacactgagttttatctaaagaatctggtgatgacgacattgaacctgttcattgggggaactgaaaccgtaagcaccacccttcggtacggctttcttttgttgatgaagcaccccgaggtggaagccaaggtgcacgaagaaatcgaccgcgtgattggaaagaacagacagccaaaatttgaagaccgcgcgaaaatgccctacatggaagctgtgatccatgagatccagaggttcggcgacgtgatccctatgagcctggcgaggagagtgaagaaagacacgaagtttagagattttttccttcctaaggggacagaagtgtttcccatgttgggttcagttcttagagatccatcgttcttttccaatccccaggactttaaccctcagcattttctgaacgagaaaggccagtttaagaaaagcgatgccttcgtccctttcagtattggaaagcgcaattgttttggcgaggggctggcaaggatggagttgttcctgttttttaccaccgtgatgcagaactttcggctaaagtctagtcaatcacctaaggacatagatgtgtctcctaagcacgtgggattcgcaactatccctagaaattacacaatgtctttcctgcctagatag

SEQ ID NO: 184452 - DNA, 1332 bp, synthetic construct
  misc_feature 1..1332: note = Description of Artificial Sequence: Synthetic coding sequence
  source 1..1332: mol_type = other DNA
atgctggccagcggcctgctgctggtggccctgctggcctgcctgactgtaatggtgctgatgagcgtgtggcagcaacgcaaatctcgcggcaaattgccgcccggcccaacacctctgccctttattggcaactacctgcagctgaatactgagcacatctgtgatagcatcatgaaagtatctcaaggagtggcattcagcaacggcgagagagcaaaacagctcctgcgatttgccatcgctacattaagggacttcggagtgggtaagcggggaattgaagagaggattcaagaggaaagcgggtttttaattgaggcaatcagatctacacatggggccaatattgatcccacattcttcctgtcccgaactgtctctaatgtgatctcttccatagtgttcggagacaggttcgactatgaggacaaggaatttttgtccctcctatccatgatgctgggaatttttcagttcacttctaccagtacaggccaactctacgagatgttcagctcagttatgaagcacttgccaggccctcaacagcaagcctttaagctattgcaggggctggaggacttcatagccaaaaaggtggagcataatcagcggaccctggatcccaatagcccccaagacttcatcgactcttttctcatccacatgcaagaggaggaaaaaaatcctaataccgagttctatttaaaaaatctgatgatgagcacactcaacctctttattgctggaaccgagacagtgtcgacaactctaaggtatgggtttctcctgttgatgaaacacccggaggtggaggcaaaggtgcacgaagaaatcgaccgtgtaatcggaaaaaacagacaacccaagttcgaggatcgaactaagatgccatacatggaagccgtgatacacgaaatacagagatttggcgacgttataccaatgtcgcttgctaggagggtgaaaaaagacacaaagttccgggactttttcctaccgaaaggcacagaggtgttccccatgctgggatccgtgttaagggatccatcattcttctctaatccgcaagacttcaatccacaacacttccttgatgacaaggggcagttcaagaaatctgatgcctttgtcccgttctctatcggtaagagaaattgttttggggaggggcttgcgcggatggaacttttcctgtttttcacaaccgtgatgcagaacttccgattgaagtcttctcagtcccccaaggacatcgacgtgtcccccaagcatgtggtattcgccacaatccctcgaaattatacaatgagcttccttcccagatag

SEQ ID NO: 184453 - DNA, 1485 bp, synthetic construct
  misc_feature 1..1485: note = Description of Artificial Sequence: Synthetic coding sequence
  source 1..1485: mol_type = other DNA
atgctggccagcggcctgctgctggtggccctgctggcctgcctgaccgttatggtgctaatgtcagtgtggcagcagagaaagtcccgaggtaagctccctcctggccccacccccctcccttttatcggtaattatctgcagctgaacacagaacacatatgcgactcaattatgaagttcagcgagtgttacggacctgtcttcacaatccacctaggccctaggcgggtcgttgttctctgcggacatgacgctgtgagggaagcattggtggatcaagctgaagaattctctggccggggggaacaggcaacattcgactgggtgttcaagggctacggggttgccttttccaacggagaacgcgctaagcagttgttaaggtttgccatcgctacacttcgggatttcggcgtgggcaaaaggggtattgaagaacgcatccaggaagaatccggctttctgattgaggctattcggtcgactcatggcgccaatatagatccgacgtttttcttatcgagaaccgtttccaatgtgatctcctctattgtctttggggatagattcgactacgaagataaggagttcctgtccttgcttagtatgatgctaggcattttccagtttacatcgaccagcacagggcagctctacgaaatgttttcgagtgtgatgaagcacttgcccggcccgcaacagcaagcctttaaactcttgcaagggctggaggatttcattgcaaagaaggtggagcacaaccagcggacgctggaccccaactccccacaggatttcatagacagttttctgatccacatgcaagaggaagagaagaatcctaacactgaattttacctgaaaaatttaatgatgtctaccctgaatctgttcatagccgggacagaaactgtgtctactaccttaaggtatggcttcctgctgctgatgaaacatcctgaagtggaagcaaaggtccatgaggagatcgatcgtgtgatcggcaagaacagacaaccaaaattcgaggacaggaccaagatgccgtacatggaagcggtgattcatgagattcagaggtttggcgatgtcattccaatgagcttggcccgaagggttaaaaaggatactaagttccgggactttttcctcccaaagggcacagaggttttccccatgcttggatcagtgctgagggacccgtcattttttagtaacccacaggatttcaatccacaacatttcctggacgacaagggccagtttaagaagtctgatgcctttgtacctttttccatcggcaagcgtaattgtttcggagaggggctcgctcgtatggagctttttttattttttaccacagtgatgcagaactttaggttgaagtctagccaatcacctaaggatatagatgtctctcccaaacatgtcgtctttgccaccatcccacgcaattacacaatgtcctttcttcccagatag

SEQ ID NO: 184454 - DNA, 1476 bp, synthetic construct
  misc_feature 1..1476: note = Description of Artificial Sequence: Synthetic coding sequence
  source 1..1476: mol_type = other DNA
atggagctgagcgtgctgctgttcctggccctgctgaccggcctgctgctgctgttagtacagaggcaccccaacacgcacgaccggttgcctccaggaccacgtcccctgcccttgttgggtaacctgctgcaaatggatcgccgcggcctcctaaagtcgttcctgcgcttccgagagaaatacggagacgtgttcactgtccatctaggaccacgccccgtcgtgatgctttgtggagtcgaagcgatccgggaagcccttgtggataaggccgaagcgttttcaggccgaggaaagattgcaatggtggacccatttttccgcggttatggcgtcatctttgcaaacgggaaccgctggaaagttctgcggcgattttctgttactaccatgagggatttcggtatgggaaaacgatccgtggaagagagaattcaggaggaggcgcaatgtctgattgaagagcttcgcaagagcaaaggagccttaatggatccaacatttctgtttcagtccatcaccgcgaacataatctgttccatcgtcttcgggaaaagattccattaccaggaccaagagtttctaaaaatgcttaatctgttttatcagacattttccttgatatcctctgtctttggccaactgttcgaactgttttccggatttctcaagtactttcctggggcgcacaggcaggtgtacaagaatctgcaggagattaatgcctacattggccatagtgtggaaaaacacagagagacgttggaccccagtgcgccgaaggatctgattgatacatacctcctgcatatggaaaaagagaaatcgaatgctcactccgaattttcccaccagaacttgaatctgaacaccttgagcctgttcttcgcaggcaccgaaaccacgtctaccactcttcgctacggcttcctgctaatgctcaaatacccgcatgttgccgagcgagtttatagggagatcgaacaggtgatcggaccccacagacccccggagctccatgatcgggcgaaaatgccgtatacagaggctgtaatatatgagatccaacggttcagcgaccttttgccaatgggggttcctcacattgtcacacagcatacctccttccgcggctatattatccctaaggatacagaggtatttctaatcttgtcgactgcacttcatgatccccactactttgaaaaacctgatgcattcaatccagaccacttcttagatgccaatggcgccttgaagaagactgaggctttcattcccttctctctggggaagcgcatatgcctgggagagggtattgcgcgagcagaactgtttctgttcttcacaacgatcctacagaacttcagcatggcttcccccgtcgcaccagaggatatcgacctgacccctcaggagtgcggcgttggaaaaatacctccaacatatcagatcagattcctgcctcgctag

SEQ ID NO: 184455 - DNA, 876 bp, synthetic construct
  misc_feature 1..876: note = Description of Artificial Sequence: Synthetic coding sequence
  source 1..876: mol_type = other DNA
atgcggtgcatgctgaccaacagccacccctggtgcggctgcgactggcaatttcgtgagaagtacggagacgttttcacggtccacctcgggccccgccccgtggtaatgctgtgtggcgtcgaagccattagagaggctctcgtcgacaaggctgaagcattttccggtagaggaaaaatcgctatggtcgaccccttttttcggggatatggcgttattttcgccaatggcaatagatggaaagttctgcgaaggttcagcgttactactatgagggacttcggtatgggaaagaggtccgttgaggaaagaatccaggaggaggcccagtgcctgatcgaagagctgcggaagtctaaggagcgagtttacagagaaatagagcaggtgatcgggccccataggcctccagaactgcacgatcgggccaagatgccatataccgaggccgtaatctacgaaatccagcgttttagtgacctactgcctatgggtgttccgcacatcgtaacccagcacacctcattccgaggttatatcatccccaaggacactgaagtgttcctgatcctaagcacagctctgcacgatcctcactatttcgagaaacccgacgcattcaacccggaccactttttggacgccaacggggctttaaaaaagaccgaggctttcataccgttttctctcggaaaaagaatatgtcttggcgaaggaatcgcacgcgctgaactgtttctgttttttaccaccatccttcagaatttcagcatggcgtcccccgtggctcctgaggatatcgatcttaccccccaagagtgcggggtcggcaagatcccccctacctaccagatccggtttttgcccaggtag

SEQ ID NO: 184456 - DNA, 1473 bp, synthetic construct
  misc_feature 1..1473: note = Description of Artificial Sequence: Synthetic coding sequence
  source 1..1473: mol_type = other DNA
atggaccccttcgtggtgctggtgctgtgcctgagctgcctgctgctgcttagcatctggcgtcagagcagcggtcgcggaaagctgccacccggacccaccccattgccagtgataggcaacattcttcaaatcgacatcaaggacgtttccaaatccctgacaaacctgtccaagatctacggccctgtatttaccctatacttcggactggaaaggatggtggtgcttcacgggtacgaagtggttaaggaggctttaattgacctgggcgaagagtttagcggccgcgggcattttcctctcgccgagagggctaatagaggcttcggtatcgtctttagcaacggaaagcgctggaaggagataagacgcttctccctcatgacactccggaacttcgggatgggcaagagatccattgaggacagagtgcaggaagaagcccgatgcttggtggaggaactgcgcaagaccaaagctagcccatgcgatccaacttttattctgggatgtgcgccctgcaatgtgatctgctctattattttccaaaaacggttcgattacaaggatcagcagtttttgaatctcatggaaaagctgaatgagaacattcgcatcgtgtccaccccttggatccagatctgcaataatttccctaccataatcgattacttcccaggaacacacaacaaactgctcaaaaacctggctttcatggagtccgacatattggagaaggtgaaggaacatcaggaatcaatggacataaacaacccgcgggatttcatagattgttttctgatcaaaatggagaaagaaaagcagaatcagcagagcgaattcacaatagaaaacctggttatcacagccgcagacctcctgggggctggtacggagaccacaagtactactctgcgctatgccttattgctgctgctgaagcaccccgaggtgaccgctaaggtgcaagaagagatagaacgcgtggtagggcgtaaccgttctccatgcatgcaggatcgaggccatatgccctatacagacgccgtcgtgcatgaggtgcagcgctatatagacctgattccaacaagtcttccccacgccgtaacttgcgatgttaaattccgaaattatttgattcccaagggcaccaccatcttgacttccctaacttcagtgttacacgacaacaaggagttccccaatcctgagatgtttgatcccaggcacttcttggatgaaggtgggaattttaaaaaatccaattactttatgccttttagtgccgggaagaggatttgcgtcggggaggggttggctagaatggaactctttctgttccttaccttcattcttcagaacttcaacctcaaaagcctcatcgaccctaaagaccttgacaccacaccagtcgtgaatgggtttgcctccgtgccccccttctatcagctttgttttatcccagtttag

SEQ ID NO: 184457 - DNA, 1473 bp, synthetic construct
  misc_feature 1..1473: note = Description of Artificial Sequence: Synthetic coding sequence
  source 1..1473: mol_type = other DNA
atggagcccttcgtggtgctggtgctgtgcctgagcttcatgctgcttttcagcctctggcggcaaagctgccgcagaaggaagttgcccccaggacctacccctctacctatcatcggtaacatgcttcagattgacgtaaaagacatttgcaagtccttcactaatttctctaaagtttacggccccgtgtttaccgtctatttcggaatgaacccaattgtggtatttcatggatatgaggctgtcaaagaagccttgatagataacggcgaagaattcagcggccggggcaactcacccatcagtcagagaatcactaagggactgggcattatatccagcaacggaaaaagatggaaagaaatccgaagattcagtttgacaaccctgaggaatttcgggatgggaaagcgctccattgaagaccgagtgcaggaggaggctcactgccttgtggaggaacttagaaagaccaaagccagcccttgtgatccaacctttatacttggctgtgccccatgtaacgtaatttgctctgttgtttttcagaagcgcttcgattacaaggaccagaattttttgaccctgatgaagagatttaatgaaaacttccgaatactcaattccccctggatccaggtgtgcaacaattttccgctgttaatagactgtttccctgggactcacaataaggtgctgaaaaatgtggcgctcactaggagttacatccgggagaaagtgaaagaacatcaagccagcttggatgtgaacaacccaagagactttatcgattgcttcctgatcaagatggaacaggaaaaggacaatcagaagagcgaattcaacatcgagaatttagtagggacagtggctgacttgttcgtcgccgggacagaaaccacaagcaccactctacgctacggactgttgcttctgttgaagcatccagaagtcactgctaaagtgcaggaagaaattgaccacgtgattggcagacatcgttctccctgcatgcaggatcggagtcacatgccctacacggatgcggtcgttcacgaaattcaacggtattccgatcttgtacctacaggcgttccccatgctgtaaccaccgatacaaaatttcggaactacctgatccctaagggaactaccattatggccctcctcacctccgtccttcatgatgacaaggagtttccaaaccccaacatcttcgatcccggacatttccttgacaagaacggaaacttcaagaagagtgactatttcatgccgttctcagccgggaagaggatttgtgccggagagggattggcacgcatggaattattcctcttcttaacgaccatccttcaaaactttaatctgaagtctgtggatgatttgaaaaacctaaacacaacggccgtgactaaaggtattgtgagcctacctccttcataccagatttgttttattcccgtctag

SEQ ID NO: 184458 - DNA, 1374 bp, synthetic construct
  misc_feature 1..1374: note = Description of Artificial Sequence: Synthetic coding sequence
  source 1..1374: mol_type = other DNA
atggagcggagcttcctggaggaggccatcccccagtacctgaaggagctgttaaaggacctggtgggcgcacatatctcagtttctgcactcgtaacgggagtgagaggaatggagaatagggccctgaaaagtttttccgctgagctaagcttgagtgcatggctgcctagcgttgccgctctgtctagcctggctgttaattcaccaagtttttgccccttctttctcggaatcatcagctctaatggtaaaagatggaaagaaatccgccgctttagtctcaccacattacgaaactttggtatggggaaaagatcgatcgaagatagggttcaggaagaggctcactgcctggtcgaagagctcagaaaaacgaaggcttcgccttgcgaccctacttttatcctcggatgtgccccttgcaacgtgatatgctccgtggtcttccagaaacggttcgactacaaggatcagaattttctcactcttatgaagcgatttaatgagaacttccgcattctaaactccccttggatccaggtgtgcaacaattttcctctgctaatcgactgcttccccggaacccacaacaaggtgctgaaaaacgtagccctgacccggtcgtacatccgagaaaaagtcaaggagcaccaggcttccctggacgttaataacccgcgcgactttatagattgttttcttattaagatggagcaagaaaaggataatcagaagagcgaattcaatattgagaacctcgtggggacagtggcagatctcttcgtagccggtaccgagactaccagcaccacacttcggtatggcctattgctcctgctgaaacatcccgaggtaaccgccaaagtccaggaagagatagaccacgttatcgggagacaccgcagcccctgcatgcaggatcgatctcacatgccgtatactgacgccgtggtccacgagattcagcgttattctgacttggtccccaccggagtgccacatgctgtcacgaccgatactaagtttcgcaactatctgatccctaaaggcacaaccattatggcactgttgacttcagtactccacgacgataaggagtttccaaatcccaatattttcgaccctggccactttctggataagaatggaaatttcaaaaaatctgactatttcatgccattctcggcgggcaagaggatatgtgcaggtgaagggctggcgcgcatggagctctttctgttcctgacaactatcttgcagaactttaatttgaagagtgtggacgacctcaaaaatctcaacaccacagccgtgaccaaaggaatcgtgtctttgccaccttcttatcagatttgtttcattcctgtgtag

SEQ ID NO: 184459 - DNA, 1167 bp, synthetic construct
  misc_feature 1..1167: note = Description of Artificial Sequence: Synthetic coding sequence
  source 1..1167: mol_type = other DNA
atgttcctgcagcccatcgccaagggcatcatcagcagcaacggcaaacgttggaaagaaatccgcaggtttagcttaacaaccctgcgcaactttggcatgggaaaacggagtatagaagatcgggttcaggaggaggcccattgcctggtagaagaattgcgaaagacaaaagcatcgccttgtgatcccaccttcattttggggtgcgccccgtgcaatgtcatctgtagcgttgtattccagaagcggttcgactacaaggaccagaatttcttgaccctcatgaagcggtttaacgagaatttccgcatactaaactccccgtggattcaggtttgtaacaacttccccttactgatcgattgttttccaggaacccacaataaggtgctgaagaacgttgccctgactcgttcatacatccgggagaaagttaaggaacaccaagcctctcttgacgtcaacaacccgcgggattttattgattgtttcctgatcaagatggagcaggagaaagataaccagaagtccgagtttaacatcgagaatcttgtgggaaccgtcgctgatctgttcgttgctggcactgaaacaacctctaccacactgcgctatggactgttactgctgctgaagcatcccgaagtcactgctaaagtccaggaagagatagaccacgttattggacgacacaggagcccgtgtatgcaggacaggagccatatgccgtacaccgatgcggtcgtgcatgaaattcagaggtactcggatctagtgcctactggtgtccctcatgctgtgacaactgacaccaaatttcgcaattacctcatccccaagggcactacaataatggcccttctgacttctgtgctgcacgacgacaaggagttccctaacccaaacatcttcgaccctgggcattttctggataaaaacggaaatttcaaaaaaagcgattatttcatgccattcagtgcgggtaaacgtatctgcgccggcgaaggtctggcaaggatggaattattcctgttcctgaccacaatcctacagaacttcaatctaaagtctgtcgatgacctgaagaacctcaatactaccgcagtcacaaaagggattgtttccctacccccctcataccaaatatgcttcattcctgtatag

SEQ ID NO: 184460 - DNA, 924 bp, synthetic construct
  misc_feature 1..924: note = Description of Artificial Sequence: Synthetic coding sequence
  source 1..924: mol_type = other DNA
atggccgccaagtgctgcagcaccttcttcctgggctgcgagttctctcagttcctgccactgttccttttgggaataatctctagcaatggcaagaggtggaaagaaatccgtcggttttccttgactacactccgcaacttcgggatgggcaaaagatctattgaagatagggttcaagaggaagctcattgtctggttgaggagctgcgcaagaccaaggccagcccttgcgatcccactttcatccttggctgcgcaccatgcaacgtgatttgctccgtggttttccagaaacgctttgactataaagatcagaactttctgacgctcatgaagaggttcaacgagaatttccgcatcctgaattcaccttggatccaggtttgtaataatttccccttgctcatcgactgctttccgggtacccataataaggtgctgaaaaatgtagctctgacacgttcctacatcagggagaaggtgaaggagcatcaagcatctcttgacgtcaataatccccgcgactttatagactgcttccttataaaaatggaacaggagaaggataatcagaagtccgagttcaatatagagaacttagtcggaactgtggctgacctttttgtggcgggcacagagacaactagtaccacactgcggtatggcttgctcctcctcctgaagcaccctgaagttactgccaaagttcaggaggaaatcgaccatgtcattgggcgacacaggtcgccctgtatgcaggatcgcagccacatgccctacaccgatgcagttgtacatgaaatacagcgttactctgaccttgttcctaccggcgtcccccacgccgtgaccacggataccaaattccgaaattaccttatcccgaagtccttcgacaacaaaatcatgctggccgcctag

SEQ ID NO: 184461 - DNA, 1473 bp, synthetic construct
  misc_feature 1..1473: note = Description of Artificial Sequence: Synthetic coding sequence
  source 1..1473: mol_type = other DNA
atggacagcctggtggtgctggtgctgtgcctgagctgcctgctgctgctgtctttatggcgtcagagttccgggcgaggaaaactccccccagggcccacaccgcttcctgtcatcggaaacatccttcaaatcggtataaaagacatttctaagagcctgacgaacctgagcaaagtgtacggaccggtgtttacgctgtattttggcctcaagcccatcgtagtacttcacgggtacgaggctgtgaaggaggccctgattgacctgggagaggagttctctggaaggggaatcttcccactggcagagagagctaatcggggattcggcatagttttttccaacggcaaaaaatggaaggaaattaggcgattcagtcttatgacacttcggaatttcggcatgggcaagcgaagcattgaggatagagttcaggaagaggcacgctgcctcgtggaggagcttaggaagaccaaggcttctccctgcgatccaacatttatactcggttgcgctccctgcaatgtaatctgtagcataatctttcataagcggttcgattacaaggaccagcagtttctcaaccttatggaaaagttaaatgaaaatatcaagattctctccagcccctggatacagatttgtaacaacttctccccaattatcgactattttcctggcacccataataaactcctaaaaaatgtggcctttatgaagtcctatatcttggagaaggtaaaggaacatcaggagtcaatggatatgaataacccccaagatttcatcgactgctttttgatgaaaatggagaaagagaagcataaccagccttctgagtttacaatcgagtcgctcgagaataccgctgttgacctgttcggtgccggaaccgagaccaccagcaccactttacggtacgcgctgctgttattactcaagcatcctgaggtcaccgccaaggtgcaggaagaaatcgagcgcgtgattgggagaaatcgctcaccatgtatgcaggatcggtctcatatgccttacacagatgcagtcgtgcacgaggttcagcgctatatcgacctgcttcctacctctcttcctcacgctgtcacttgtgacattaagtttagaaactatctaatcccaaagggaacaacaatcctcatctctctgacaagtgtgttacatgacaataaggagttcccaaaccctgaaatgttcgacccccatcatttcttggatgaaggaggcaacttcaaaaaaagtaaatactttatgccgtttagcgccgggaagcggatttgtgtgggcgaagctcttgccgggatggaactctttttgttcttaactagcattctgcagaactttaaccttaagagccttgttgatccaaagaacctggacaccacacccgtggtgaatggtttcgcttcagtgcctcccttctaccaactgtgtttcattccagtgtag

SEQ ID NO: 184462 - DNA, 1362 bp, synthetic construct
  misc_feature 1..1362: note = Description of Artificial Sequence: Synthetic coding sequence
  source 1..1362: mol_type = other DNA
atggacagcctggtggtgctggtgctgtgcctgagctgcctgctgctgttgagtctttggagacagtcaagcgggcggggcaaattgccccctggacctactccactccccgtgataggcaatattcttcagatcgggatcaaggatatatccaagtccctcacaaatctgtcgaaagtatatgggccagtattcactctttacttcggactaaagcctattgttgtgttgcatggctacgaggccgtgaaagaggctctaatcgacctgggagaagaattttccgggcgcgggatttttcccttagctgaaagggctaacagaggattcggcattgtcttctctaacggcaaaaaatggaaagagatccgcagattttcccttatgacactgagaaatttcggaatgggcaaacgcagtattgaggaccgcgtccaagaggaagcaaggtgtctggtggaggagctaaggaagactaaggcgtccccctgcgacccaaccttcattctggggtgtgccccttgtaatgtcatttgctcaataatttttcataagcgattcgattataaagatcaacagttcctgaacctgatggaaaagctcaatgagaatatcaagatcctctcaagtccttggatacagatctgtaacaacttcagtccgatcattgactacttcccaggcacacataataagctgctcaaaaacgtcgctttcatgaagtcttatattcttgagaaagtgaaggagcaccaagaatctatggacatgaacaacccccaggatttcattgactgtttccttatgaaaatggagaaggaaaaacacaatcagccctcggagttcactatagaatccctggaaaataccgccgtggatctgttcggggctggtactgaaaccacatctacgaccctccgctacgccctgctgcttttacttaagcaccccgaggtcaccgcgaaggtgcaggaagaaattgaacgcgtgataggacgaaatcgatcgccatgtatgcaggacaggtctcacatgccttatactgatgccgtggtgcatgaagtacagagatatatcgatctgctgcctactagtctcccccacgctgtcacatgcgacattaagttcaggaactacctgatcccgaagggcaccaccattctcattagcctaacaagtgttctgcacgataataaggagtttccaaacccagaaatgtttgatccacaccattttctagatgagggtggaaactttaaaaaaagtaagtacttcatgttggttcttaagatgatccggaccgagcgaactaagcgtaagcgtgtaggcaagctgttttgggttagtgtgagagtcacctag

SEQ ID NO: 184463 - DNA, 1341 bp, synthetic construct
  misc_feature 1..1341: note = Description of Artificial Sequence: Synthetic coding sequence
  source 1..1341: mol_type = other DNA
atgggcctggaggccctggtgcccctggccgtgatcgtggccatcttcttgctgctagtggacctgatgcacagaaggcagcgatgggctgcccggtatcccccaggacctctgcctctcccaggcctaggaaacctcctgcatgttgatttccaaaatacaccttactgcttcgaccagttacgcagaagatttggcgacgtgtttagcctccagctcgcgtggaccccagtggtggtgctgaatggactcgcagccgtgagggaggccctcgttactcacggcgaggacacagccgatcggcctcctgtcccaattacccagatcttaggcttcggtccaaggagccaggggaggccgtttcgcccaaatggtttgctcgataaggccgtaagcaacgtcatcgcaagtctaacatgcggccgccggttcgagtatgatgacccgaggtttctgcgcctgttggacctggctcaggagggattgaaggaagagagcggtttcttgcgtgaggtcctgaacgccgtgcctgtgctgctgcacatccctgcgctggccggtaaagtgctaaggtttcaaaaagcctttttaacccaactagacgaactactgaccgaacaccggatgacctgggatcctgctcagccccctcgggacctaactgaagccttcctggctgagatggagaaggccaaaggcaatcctgaatcttcttttaatgatgaaaacctctgtatcgtggtcgccgatctctttagcgcggggatggttaccactagtacaacactcgcttggggactgttgttgatgatccttcatccagatgtccagcggagggtacagcaggaaatcgacgatgtcattggccaagttaggcgccccgagatgggagaccaggctcacatgccgtataccaccgccgtgatccatgaagtgcagcgctttggggacatagtgcctctaggggttacacatatgacatcaagggacatcgaggtgcagggcttccgcattcctaagggtacgacactcatcactaatttaagctcagtgctcaaggatgaggccgtctgggaaaagccatttaggttccatcccgaacactttttagatgcacaaggccattttgtgaaaccagaggcattcctccccttttctgctggaaggcgcgcttgtttgggcgagcctctcgctagaatggaacttttcctgtttttcacgtctctgctacagcatttttcgttttctgtacccacaggccagccacgaccatcgcatcacggcgtcttcgcatttttagtcacaccctcaccgtatgagctctgcgcggttcccagatag

SEQ ID NO: 184464 - DNA, 1494 bp, synthetic construct
  misc_feature 1..1494: note = Description of Artificial Sequence: Synthetic coding sequence
  source 1..1494: mol_type = other DNA
atgggcctggaggccctggtgcccctggccgtgatcgtggccatctttctgctattggtcgacctcatgcaccggcggcagaggtgggccgcccgttacccgccagggcccctaccactgccggggttagggaacttgctacacgttgacttccagaacactccgtactgttttgatcaactgcggcggaggtttggagatgtatttagcttgcaattggcctggactccagtcgtggtgctgaacggacttgctgctgtgcgcgaggccctggtgacccatggggaagataccgccgaccgcccccctgtcccgataacccaaatcctgggtttcggaccacgcagccagggggtcttcttggccaggtatggacctgcctggagggaacaacgcagatttagcgtgagcacacttaggaacctcggactaggcaaaaaatccttggagcagtgggtgaccgaagaagctgcatgtttatgtgcagcattcgccaaccactctgggcgacccttccgacccaacgggctgctagataaggctgtgagtaatgttatcgcctcccttacgtgcggaaggcgatttgagtatgacgatcctcgattcctgaggctgcttgacctggctcaagagggactgaaggaggagtcaggctttctccgcgaggtcctgaatgccgtcccagtgcttctgcacattccggccttggcaggcaaagtactccggtttcagaaagcctttctaacccagttagacgagttgcttaccgaacatagaatgacctgggaccctgcacagccccccagggatctgacagaggctttcctggccgagatggagaaagccaaggggaacccggaatccagcttcaacgacgagaatttgtgtatcgtggttgctgatctgttctccgctggtatggtgacgacatcaacaacgttggcatggggtctccttctgatgattttgcatcctgacgtccagcgtagagttcagcaggaaattgatgacgttattggacaggtcagacggcctgagatgggagatcaggcccacatgccgtacactaccgctgtaatccacgaagttcagcggtttggcgatatcgtcccgctgggcgttactcacatgacttcccgtgatatcgaagtacaggggttcagaatccctaagggtaccacactgattacgaatctttccagtgtgctgaaggacgaggctgtctgggagaaaccctttcgttttcaccccgaacacttcctggatgctcaggggcatttcgtcaagccagaggcctttttacctttttcggcaggcaggcgtgcttgcctgggagagccccttgcgcggatggagctgtttctgtttttcacaagccttctacagcacttttcctttagtgtgcctactggtcaacctcgaccaagtcaccacggtgtgttcgcatttctggtcacgccaagtccgtatgagctgtgcgccgtcccccgatag

SEQ ID NO: 184465 - DNA, 1494 bp, synthetic construct
  misc_feature 1..1494: note = Description of Artificial Sequence: Synthetic coding sequence
  source 1..1494: mol_type = other DNA
atgggcctggaggccctggtgcccctggccgtgatcgtggccatcttcttacttttagtcgacctgatgcacagacgacaaagatgggcggctaggtatccgccaggccccctgcccctgcctgggctaggcaatttgctccatgtggattttcagaacacaccttattgcttcgatcagctgagaaggcggttcggagatgtgttctccctccaattagcctggactccggttgtcgttctgaatgggctcgcagctgttcgcgaggctttagtgacccatggcgaggatactgccgaccgcccgcccgtgcccattacccaaattcttgggttcggccctagaggacagggggtgtttcttgcaagatatgggccagcctggcgcgaacagaggagattcagcgtttcgactcttcgtaacctgggcctgggaaaaaagagtctcgaacagtgggttaccgaagaagctgcgtgcctctgtgccgcttttgcgaaccacagtgggcggccctttcgtccgaacggcctgctggataaggctgtttctaatgtgattgcaagcctgacatgtggcagaagatttgaatatgacgaccctagatttctcagactgcttgacttagcacaagagggcctaaaggaggagagtgggttccttagagaagtgctgaacgctgtgcccgtgctgctccatatccccgccctggcaggaaaagtgctcaggtttcaaaaagccttcctgactcagctggacgagctcctgaccgaacatagaatgacctgggaccctgcacagccaccgagggacctgaccgaggccttcctggccgagatggagaaggccaaaggcaatccagagagctccttcaatgacgagaatctttgcattgtcgtggcagacctgttctctgccggcatggtcacaacctctactacactcgcctggggtctgctcctaatgatccttcacccagacgtgcagcgaagagtacagcaagagatcgacgacgtaattggccaggttcgtcggccagagatgggcgatcaagcgcacatgccatatacgacggctgtgatccacgaagtccagcggtttggggacatcgtacctctgggggtgacacacatgacctcccgggatatcgaagtgcagggtttccgcatcccaaaaggtaccacattaatcaccaacctgtcatccgtgctgaaggacgaagctgtctgggagaagcctttcagattccaccctgagcacttcctggatgcccaaggccatttcgttaagcctgaggccttcttgcccttctctgccggccgacgggcgtgcctgggggagcccctcgcacgtatggaactgttcttgttctttacatccctgctgcagcacttttccttctcggtgccaacagggcagccacgacccagccatcacggcgtcttcgcattccttgttactccatccccttatgaattgtgcgcggttccccggtag

SEQ ID NO: 184466 - DNA, 1332 bp, synthetic construct
  misc_feature 1..1332: note = Description of Artificial Sequence: Synthetic coding sequence
  source 1..1332: mol_type = other DNA
caggaggccctgaccctgcccctgcagctgcggcggcggttcggcgacgtcttctctttgcagctcgcttggacccccgtcgttgtgctcaacgggctggcagccgtgagggaagcacttgtgacacatggagaggacacagcagaccgtcctcccgtccccatcacccaaattctgggatttggacctcgggggcagggagtatttctcgccaggtacggacctgcctggagagagcaacgaagattctccgtgagcactctccggaacctggggctgggcaaaaaaagtctggaacagtgggtgacagaagaggcagcctgtctatgcgccgcgtttgctaatcacgatgccccattcgccccaaccgtgagctggactaaaccaaacgtaatagcctctctaacctgcggaagacggttcgagtacgacgaccctagattcctccgactgctggatcttgcacaagaaggtctcaaagaggaatcgggcttcctacgagaggtcctgaacgcagtgccagtgcttctccatattcctgccctcgcagggaaggtgctacgcttccagaaggctttcctcacacagttagatgagctgctcaccgaacatcgtatgacctgggatccagctcaacctcctcgagacctgacagaggcgtttttggcagagatggagaaggcaaaaggtaatccagagagctctttcaacgacgagaatttatgtattgtagtggcagatctattttctgcggggatggttacgaccagcacgaccctcgcatgggggttgctgctgatgatcctgcaccccgatgttcaaaggagggtccagcaggaaatcgatgatgtgattggtcaagtgcggcgacctgaaatgggtgaccaggcacacatgccatacacgactgccgttatccacgaagtgcagagattcggagacattgtgccactgggtgttacccacatgacatcccgagacatcgaagtacagggtttccgcattccgaaaggtacaaccctgattactaatcttagctcagtactaaaggatgaggctgtttgggaaaagcccttccggttccatcctgaacactttctggacgcccaggggcactttgttaaaccggaggcgtttctcccattcagcgccggtcgtcgcgcttgcctgggcgagccgctcgctcggatggaattattcctcttctttacctcattactgcagcatttttcgtttagtgtgccgaccggccaaccaaggccttctcatcacggggtgtttgcttttctggttactcctagcccctatgaactctgtgccgtccctaggtag

SEQ ID NO: 184467 - DNA, 1341 bp, synthetic construct
  misc_feature 1..1341: note = Description of Artificial Sequence: Synthetic coding sequence
  source 1..1341: mol_type = other DNA
atgggcctggaggccctggtgcccctggccatgatcgtggccatcttccttctactagtcgatctgatgcaccgacgacagaggtgggcggcaagatatcctcccggccccttacctctgcccggcttaggcaatctcttacatgttgacttccagaacaccccctactgctttgaccagctgaggagacggttcggggacgtattttctctgcagctggcatggacgcccgtggtcgtcttgaatgggctcgcagccgtgagagaggcactggtgacccacggagaggacacagctgacagaccccccgtgccgattacccaaatcttgggattcgggcccaggtcccagggccggcccttccggcccaacgggctgctcgataaggccgtctcgaatgtgatcgcttcactcacatgtgggcgacgatttgaatatgacgatcccagattcttacgactgttggatctagctcaggagggcctcaaggaagagtccggctttcttagggaggtactgaacgctgttccggtcttactccacatccccgctctggccggtaaggtgctgcgctttcagaaagccttcttaacacagttagacgaactgcttacagaacacagaatgacctgggatccagcacaacctcctcgcgacctgacggaggctttcctggctgagatggaaaaggccaaagggaaccctgagagtagtttcaatgatgagaatttatgcattgtggttgccgatcttttctctgccggcatggtaacaacctctacaacattagcgtggggcctccttctcatgatcttgcaccctgatgtccaacggcgcgtacaacaagagatcgatgacgtgataggacaggtgcgccgccccgagatgggggatcaagctcacatgccatacaccacggccgtgatacacgaggttcaacgcttcggcgatatagtgcctttgggggttacacacatgactagccgcgatatagaggttcaaggatttcgaattcccaaggggactaccctcataacaaacctttcttctgtgctcaaggacgaagccgtctgggagaaaccatttcggttccaccctgaacacttcctggacgcccaggggcatttcgtgaaaccagaggctttcttgccttttagcgctggccgaagagcctgtttgggggaacctttggcccgaatggagttatttctcttttttacctctctcctccagcatttctctttctctgttccaactggacagccccgcccctctcaccatggggtgttcgcatttttggtgacaccctctccgtatgaactatgcgcagtgccgcgctag

SEQ ID NO: 184468 - DNA, 1482 bp, synthetic construct
  misc_feature 1..1482: note = Description of Artificial Sequence: Synthetic coding sequence
  source 1..1482: mol_type = other DNA
atgagcgccctgggcgtgaccgtggccctgctggtgtgggccgccttcctcttgctggtttcgatgtggcgtcaggtgcattcttcatggaaccttccccctggacctttcccgctgccgataatcgggaatttgttccagcttgaattgaaaaacattcccaagtccttcacgaggttggcacagagatttggcccagtgtttactctgtatgtcggctcccagagaatggttgtcatgcatggttacaaagcggtcaaggaagccctgttggattacaaagacgaattctctggacgaggagacctgccagccttccatgcccatagagatcggggcatcatatttaataatggacccacctggaaagacattcgtcggttttcattgacgacactcagaaactatggtatgggaaagcagggcaacgaaagcagaattcagagagaagcacattttttgttggaggcactgaggaaaactcaagggcagccctttgacccaactttcttaatagggtgcgcaccttgcaatgtgatcgccgacatcttgtttcgaaaacacttcgattataacgatgagaagttcttaaggctgatgtatctatttaacgagaacttccatttactgtctaccccctggctccagctgtacaacaattttccctcgttcttacactacctgcccggatcgcacagaaaggtgattaaaaacgtcgctgaagtaaaagagtacgtgagtgagagggttaaagagcaccaccagtcactcgatcccaattgccctagagatctgaccgactgcctactggtggagatggaaaaggaaaaacattccgcagagagactctacactatggatggaatcaccgttacagtggcggatttgttttttgctggcaccgaaacgacctctacgactctgcgctatggtttgctaatcttgatgaagtacccagagatcgaagaaaagctgcacgaagaaatcgatagagttattggccctagtcgaattccagccataaaggacaggcaggagatgccatacatggatgcagtcgtgcacgaaatccagagattcatcaccctggtgccctcaaacctgccacacgaagctactagggatactatatttaggggctatttaatcccaaaaggcaccgtggtggtgccaacactagactcagtactgtatgacaaccaggaattcccagatcccgaaaagtttaagcccgagcattttctgaatgaaaacgggaagttcaaatattcagattacttcaagcccttctctaccggtaagagagtttgcgcaggtgaggggctggcccgcatggagctcttcctgctgttgtgcgcaattcttcagcactttaacttgaagcctctcgtggatcctaaagatatcgatctctctcccattcatatcggttttgggtgcatcccaccccggtataagctgtgtgtgataccccgcagttag

SEQ ID NO: 184469 - DNA, 1482 bp, synthetic construct
  misc_feature 1..1482: note = Description of Artificial Sequence: Synthetic coding sequence
  source 1..1482: mol_type = other DNA
atgagcgccctgggcgtgaccgtggccctgctggtgtgggccgcctttctgctgcttgtgtcaatgtggcgacaagtacattcttcttggaatctgccccccgggccattccctctgcctatcattggcaatctcttccagctcgagctgaaaaacattcctaaatcctttactagactggctcagcggtttggaccagttttcaccctgtatgtgggaagtcagcggatggtcgtcatgcatggttataaagccgttaaggaggcactgctggactacaaagacgagttttctggacggggggacctccctgcgttccacgcccatcgtgaccgtgggatcatctttaacaacggacccacctggaaggatatcagacgttttagcttgaccacactgcggaactatgggatgggaaaacaaggcaacgagtcccgcatccaaagagaggcccatttcctcctagaggcactccgcaagactcaggggcagccctttgatcccacttttcttatcggatgcgctccttgtaatgtgatcgcagacattctcttccggaagcatttcgattataacgatgaaaaatttctgcgcctaatgtacctgttcaacgagaactttcatctgttaagtaccccatggcttcagttatacaataattttccatcatttctgcactatttgcccggaagccaccggaaagtgataaagaacgtggctgaggttaaagaatatgtgtcggagcgcgtaaaggaacaccatcaaagcctcgaccctaattgtccacgggacttaaccgattgtctgttggtggaaatggaaaaggagaagcactctgccgaaaggctttacacaatggacggaataacggtcactgtcgctgatttgttcttcgccggcacggaaacaacgtcaactaccctcaggtacgggctgctaattcttatgaagtaccctgagattgaggagaaacttcacgaggaaatagaccgagttatcgggcctagtaggattcccgcaataaaggatcgccaggaaatgccctatatggacgcagtcgtacatgaaattcaaaggtttattaccctggtgccttccaacctgccccatgaggcgacgagggatactatctttcgcggctatttgatccccaagggaacagtggttgtgccaactctcgactctgtcctctacgataatcaggaattccctgaccctgagaaatttaagccagaacacttccttaatgagaacgggaagttcaaatactctgattacttcaaaccgttttcaactggcaagcgggtctgtgcaggggaggggttggcgcggatggagctgttcctgctactgtgcgccattctacagcattttaacctcaaacccctcgttgaccccaaagacattgatctgtcccccatccatattggtttcggctgtatcccacctcgctacaaattgtgcgtgatcccaagatcctag

SEQ ID NO: 184470 - DNA, 261 bp, synthetic construct
  misc_feature 1..261: note = Description of Artificial Sequence: Synthetic coding sequence
  source 1..261: mol_type = other DNA
atgagcgccctgggcgtgaccgtggccctgctggtgtgggccgcctttcttctcttggtcagcatgtggagacaggtccatagctcctggaacctaccccccggtcctttcccgcttcccatcatcgggaacctcttccaactggaactgaaaaatattcctaaatcttttacacgcttggcccaacgatttggacctgtgtttaccctgtacgttggctcccaaaggatggtggtgatgcacggatacaaagccgtttag

SEQ ID NO: 184471 - DNA, 1476 bp, synthetic construct
  misc_feature 1..1476: note = Description of Artificial Sequence: Synthetic coding sequence
  source 1..1476: mol_type = other DNA
atggacagcatcagcaccgccatcctgctgctgctgctggccctggtgtgtctgctcttgaccttgtcaagccgtgataagggaaagctccccccgggccctagaccgttgagcatcctgggcaatcttttgttgctttgtagtcaggacatgctgactagtctgacgaaattgagcaaggagtatggcagcatgtacaccgtgcatctgggtccacgtagagtcgtggttctcagcggttatcaagctgtcaaggaagccctcgtggaccagggtgaagaattctccggcagaggagactacccagccttctttaacttcacaaagggaaacggtatcgcattttcaagcggcgaccggtggaaagtgctgcgccaattctctatccagattctgagaaattttggcatggggaaacgctccatcgaagagcgtatactggaggagggatcctttctgctggcggaactgcgcaagaccgaaggagagccttttgatcctacgtttgtgctatctcgctctgtgagcaatatcatatgtagtgtcttgtttggctcacgcttcgattatgatgacgaaaggctgctcacaatcatccggctcattaatgataatttccaaattatgagctcaccttggggagagctctacgacatttttccatcactcttagactgggttcccggtccccatcagcgtatcttccaaaacttcaaatgtctgcgcgatcttattgcccatagtgtgcacgaccaccaagcttctctcgaccctagatccccgagggacttcattcaatgctttttaacgaagatggccgaggaaaaagaggatcctctgtctcatttccatatggatacactattgatgacaacacacaatcttctttttggaggcacaaagacggtcagtaccaccttacaccatgcattcttggctctgatgaagtatcctaaggtacaagcgcgcgtgcaagaagagatagacctggtggtgggacgggctcggcttcccgctctgaaggaccgagccgccatgccgtatacagacgccgtcatccacgaggtgcagcgcttcgctgatataattccaatgaacctccctcacagggtcacgcgcgataccgcgttccggggttttttaattccaaaggggacagatgtcataaccctactcaacaccgtacactacgaccctagtcaatttctgacgcctcaggaatttaatcccgaacattttcttgacgcaaatcagtcctttaagaagtcccccgcattcatgccatttagcgcgggccgccggctttgcctgggggagagcctagcccgcatggaacttttcctctatctcacagcaatattacaatccttctctctgcaacccctaggagctcctgaagatatagacctcacccctctttcatccgggttgggcaatctgccccgccctttccagctctgtctgagacctaggtag

SEQ ID NO: 184472 - DNA, 1509 bp, synthetic construct
  misc_feature 1..1509: note = Description of Artificial Sequence: Synthetic coding sequence
  source 1..1509: mol_type = other DNA
atgctggccgccatgggcagcctggccgccgccctgtgggccgtggtacacccaaggactctgctgctgggcactgttgctttcctcctggctgccgatttccttaagagacgccgtccgaaaaattacccacccggtccatggagactgccgttcctcggcaacttttttctggtcgatttcgaacagtcccatctcgaagtgcagctttttgttaaaaagtacgggaatctcttttcccttgaactcggcgacattagcgctgtgctgataacaggactccccttaatcaaggaagcgttgattcacatggaccaaaacttcggaaaccggccggttacaccaatgcgggaacacatcttcaaaaaaaatggtctcatcatgtcctctggtcaggcgtggaaggagcagaggaggttcacactgaccgcgctgcggaacttcggcctgggaaaaaagagcttagaggagcgaatccaggaggaggcacaacacctgactgaagcaatcaaagaggagaatggccaaccattcgatccccacttcaagatcaacaatgccgtgagcaacataatctgcagcatcacattcggagaacgttttgagtaccaggactcttggtttcagcagcttcttaaattattggatgaagtaacttacttggaggcgagcaaaacctgccaactctataacgtatttccctggatcatgaagtttttgcctgggccacaccagacgctcttttcgaactggaaaaaactcaagcttttcgtgtcacacatgatagacaagcataggaaggactggaatcctgccgagaccagagattttatagatgcttacttgaaagagatgagtaagcacacaggaaacccgacctcctcttttcacgaggaaaacctgatctgcagcactctggacttattctttgcaggcaccgaaacaactagtacaaccctccgatgggccctcctgtatatggccctttaccccgagatccaagagaaagtgcaggcggaaatcgatagagttattggccagggccagcagcccagcacagcggcccgcgagtctatgccatacaccaacgcggtgattcatgaagtgcagcgaatgggaaacattatacctctcaacgtgccccgcgaagtcaccgtcgataccacgctcgctgggtatcatctgcctaagggtaccatgatcctgacgaacctgactgctctccatagagacccaacagaatgggccacaccagacactttcaaccccgaccattttctggaaaatggtcagtttaagaagcgcgaggccttcatgccatttagcataggtaagagggcctgcctgggtgaacaactcgccaggacagagttatttatttttttcacatctcttatgcagaagttcactttccgcccccctaataatgagaagctgagccttaaatttagaatggggatcactatctcccctgtgagtcatcggctgtgcgcagtgccccaggtgtag

SEQ ID NO: 184473 - DNA, 1506 bp, synthetic construct
  misc_feature 1..1506: note = Description of Artificial Sequence: Synthetic coding sequence
  source 1..1506: mol_type = other DNA
atgtggaagctgtggcgggccgaggagggcgccgccgccctgggcggtgcgctttttctgctgttattcgccctgggggtacggcaattgttgaaacagcggaggcctatgggcttccccccaggcccacccggactcccatttattggcaatatctattctttggccgcatccagtgagctccctcacgtgtatatgaggaaacagagccaagtctacggcgaaatctttagtttagatctgggtggcattagcaccgttgtgctcaatggatacgatgtggtcaaagaatgcctggtgcaccagagcgagatttttgcagatagaccttgcctacccctatttatgaaaatgaccaagatgggaggtctgcttaacagccggtacggacggggatgggtagaccacagaaggctcgctgtgaatagttttaggtatttcggatatggtcaaaaatcttttgaatctaaaatcctggaggaaaccaagtttttcaatgatgccattgagacctataaaggtcggccctttgattttaagcagctgataacgaacgccgtaagtaacattaccaacctgatcatctttggagaacgctttacttatgaggacactgatttccaacacatgattgagttgttcagcgagaatgtggagcttgccgcatccgcgtccgtctttctgtataatgcattcccttggattggcattttacctttcgggaagcaccagcagctgttcagaaatgccgccgttgtctatgacttcttgtctagactgatagagaaagccagcgtgaatcggaagcctcagcttccgcaacacttcgttgatgcctatttagatgagatggatcagggcaagaacgacccgtcatctaccttttctaaggagaatctcattttttctgtcggtgaattaattatagctggaaccgaaacaacaactaatgtgctgagatgggccatattgttcatggcactctaccccaacatccaggggcaggtgcagaaagagatcgaccttatcatgggaccaaatggaaaaccatcctgggatgacaagtgcaaaatgccatacaccgaagcagtgctccatgaagtcctgcggttttgcaatattgtcccgctgggcatcttccacgctaccagcgaggatgctgtggttaggggctactccattcctaagggaacgacggtgatcacaaatctctacagtgtgcatttcgatgaaaagtactggcgtgatcctgaagttttccatccagaacgctttcttgactctagcggatactttgccaaaaaagaggccttggtcccattctctctcggccgtagacactgtcttggggaacaccttgccagaatggagatgttcctgttctttactgcccttctgcagaggttccatctgcactttccacatgaactggtgcccgatcttaaaccccggcttgggatgactctccagccccagccctacctgatttgtgccgagcgtagatag

SEQ ID NO: 184474 - DNA, 1695 bp, synthetic construct
  misc_feature 1..1695: note = Description of Artificial Sequence: Synthetic coding sequence
  source 1..1695: mol_type = other DNA
atggaggccaccggcacctgggccctgctgctggccctggccctgctcctcctcttgacgttagctctcagcggtacgagggcccgcggccatcttccccctgggccgacaccattgccactgctcggcaatcttctgcaattgaggcctggcgctttgtatagcgggctaatgcgcctgagcaaaaaatacggccctgttttcaccatctatctgggcccatggcgccccgttgtcgtactggtggggcaggaagccgtacgcgaagccctgggtggacaggccgaggagttcagtgggcggggaacagtggccatgctggagggcacgttcgatgggcacggcgtgtttttctccaatggggagcggtggcgccagctgcggaaattcacgatgttggcacttcgggatctcggtatgggaaagcgcgagggggaggagttgattcaggcagaggccagatgcctagtggaaacctttcagggcaccgagggacgaccattcgacccatcgttattgctggctcaggccacttctaatgtagtgtgctccctcctgttcggtctgcgattcagctacgaggacaaagagttccaggccgtggtgagagcagcaggaggcacccttctgggtgtcagtagccaaggagggcagacatacgaaatgtttagctggttcctgcgccccttgcccggaccccataaacaactgctgcaccatgtgagcacactcgctgcctttaccgttcgccaggttcagcagcaccagggtaatcttgatgcctctggccctgcacgggacctcgttgatgcctttcttctcaaaatggcccaggaagaacagaatcctggcacagagttcactaataagaatatgttaatgacagtgatatacctgctcttcgcgggcacgatgactgtttccaccaccgttggctataccttgcttctactgatgaagtatccacacgtgcagaagtgggtgagagaggaactcaacagggagctcggggctggccaggcccccagcctgggggatcggactcgcctaccttatacggacgcagtgctccacgaggcccagaggctactggctttggtcccgatgggcatacccagaacactcatgcggacaacaagattccgcggctataccttgccccagggtactgaagtatttcctctgctcgggtctatcctgcacgatccaaacatcttcaaacaccctgaagaattcaatcccgaccgattcctggacgcggacggacgatttcgtaagcacgaggcctttctgccgttttcgcttggtaaaagggtgtgtttgggtgagggactggccaaagccgagcttttcctcttttttactactatcctgcaggctttcagcctcgagtccccgtgcccacccgatacattgagcctcaaacccacagtgagcgggttgttcaacatcccaccagcatctactgtcgggatggatagggtaaatgtatctcgtgtctacaccgcaggcagccatatatatacgccagccgtggtgtttcggtccctgtcccatgggccacatgcacacctgacccatgcggcgaaaatgcataatcggacacctatccacaactataaggggcacaaagctaccgctggcctcgctttccacaggcacaagtactcccctagcgcgattacttccacgtag

SEQ ID NO: 184475 - DNA, 1515 bp, synthetic construct
  misc_feature 1..1515: note = Description of Artificial Sequence: Synthetic coding sequence
  source 1..1515: mol_type = other DNA
atggaggccaccggcacctgggccctgctgctggccctggccctgctgctcctcctaacccttgcactgagtggcacccgagctagaggtcatctgcctccaggcccgacaccacttccccttctgggcaacctgcttcagctgcgccctggagctctgtattccggcctcatgcgcctcagcaagaagtacggccctgtctttacaatctatctgggaccttggcggcctgtggtggtgctggtcggccaggaagcagtgcgagaagccctggggggacaagcagaggaattcagtggtagaggtactgtggctatgctagaaggcacttttgacggtcacggagtatttttctccaacggcgaaagatggcggcagctgcggaagttcactatgttggcgctccgtgatctgggaatgggtaagagggagggggaggaattaattcaggcggaagcacggtgtctggttgagacatttcaaggcactgaagggcgccccttcgatccttcgttactgctggcacaggccacctctaatgtcgtgtgcagtctcctgtttggccttaggttcagctatgaagacaaggaatttcaggcagtggttagggctgccggggggaccttgcttggggtatcttcacagggaggacagacatatgaaatgttctcttggtttctgcgccctcttccaggaccccataagcaactgctccatcatgtttcaaccctcgccgcctttactgttcgtcaagtccagcagcaccagggtaacctggatgcctcaggccccgcgagagatctggtcgacgctttcctgctcaagatggcacaggaggaacagaatcctgggaccgaattcactaataagaacatgctgatgaccgtgatatacctgctgttcgccggaactatgaccgtatcaacgactgtgggctatactctcttgctcctcatgaaatatccccacgtccagaagtgggttcgggaagaactcaaccgcgaactcggagccggccaagccccctcattgggggaccggacccggctgccctatacagacgccgtgctccatgaggcccagcggctgctcgccctggtgcccatgggcattcctaggaccctgatgcgaaccactcgctttcgtggatacacgctgccacagggcactgaagtattcccccttcttggctccatactccatgaccctaacatcttcaagcatcccgaggaatttaatcccgacagatttctagatgcggatgggcgttttagaaagcacgaagccttcctgccatttagtctgggaaagagggtctgtttgggcgagggcctagcaaaagccgaactgttcctctttttcacaacaatcttacaggcgtttagccttgaaagcccatgcccacccgacacacttagcttgaagccaacagtgagcggactgttcaatatccctcccgcctttcagctgcaagtgcgccctacagatctccattctaccacgcagacacgctag

SEQ ID NO: 184476 - DNA, 690 bp, synthetic construct
  misc_feature 1..690: note = Description of Artificial Sequence: Synthetic coding sequence
  source 1..690: mol_type = other DNA
atggccatggaggagcagaaccccggcaccgagttcaccaacaagaatatgctcatgactgtgatatacctattgttcgccggcactatgacagtgtcaactaccgtgggatacacccttctcttacttatgaaataccctcacgtccagaagtgggttcgggaggagctaaaccgggaactgggcgcaggccaggccccttctctgggggacaggacgcgtctgccttacaccgacgctgttttacacgaagctcagcggctactggcactcgtccctatggggatccccaggactctgatgagaaccactcgcttccgagggtatactcttcctcagggcaccgaggtgtttccactgctgggatcaattcttcacgaccccaatatcttcaagcaccccgaggaattcaaccccgacaggttcctggatgctgacggtcgctttcggaagcacgaggctttcctccctttttccctggggaagagggtgtgcctgggggaggggctagccaaagcagagctcttcctgttctttacgactatcctccaggcattcagcctggaatctccctgccctcctgacactctctctttgaagcctacagtgtctgggctcttcaatattccccccgcttttcagctgcaggttcggccaactgatctgcacagtacaacccagactaggtag

SEQ ID NO: 184477 - DNA, 1635 bp, synthetic construct
  misc_feature 1..1635: note = Description of Artificial Sequence: Synthetic coding sequence
  source 1..1635: mol_type = other DNA
atgagcagccccggccccagccagccccccgccgaggaccccccctggcctgcccggctgctgagggccccactcgggctcctccgtctggatccatccgggggcgcactcttgctctgtgggctggttgctcttctggggtggtcctggctgagaagacgtagagctcggggcatccctccaggcccaaccccttggcccctcgttggcaatttcggacatgtcttgctccccccttttctccggagaaggagttggctgagcagtcgaactcgggccgcgggcattgatccatctgttatcggtcctcaggtcctgctagctcacctggcaagagtatatgggagtattttttcatttttcattggccattatctggttgtggttctgagtgattttcactctgtgcgagaagcattggtgcagcaggcggaggttttttccgaccggccacgagttcccctgattagcattgtaaccaaggagaagggtgttgtatttgcccactatggaccggtttggcggcaacaaagaaagttcagccactcaacacttcgccacttcgggctcgggaagctttctctcgagcccaaaatcatcgaagagttcaaatatgtcaaggcggaaatgcagaagcacggcgaggatccattctgtcccttctcaattattagcaacgccgttagcaacattatctgctcactttgttttggccagagattcgactacaccaacagtgaatttaagaagatgctcggcttcatgagcagggggctggaaatctgtctgaacagccaggtattgctggtgaacatctgtccgtggctgtactacttaccattcgggccatttaaggagctgcgacagatcgaaaaggacatcacgtcattcttgaagaagataataaaagatcaccaggagtcactggaccgcgaaaacccccaggatttcatcgatatgtatttgctacacatggaagaagaacgaaagaacaacagcaactcaagcttcgacgaggaatatctcttttacatcattggggatctcttcattgcggggaccgataccactacgaatagccttttatggtgtctgttgtatatgagcctcaaccccgatgttcaagagaaagtacacgaagagattgagcgggttatcggggctaatcgtgcccccagccttaccgacaaggcccagatgccatacacagaagcgacgatcatggaagtgcagcggctgactgtcgtggtaccccttgctatcccacacatgacctctgaaaatacggttctgcagggatacaccatcccaaaggggactctaatcctgcctaatctctggagcgtccatcgagatcccgccatatgggaaaaacctgaggacttctatccaaatcggttcttggacgaccagggacagctgatcaagaaggaaacgttcattccgtttggtatagggaagcgcgtgtgtatgggcgaacaattagcaaagatggagttattcctgatgtttgtctccctcatgcagtcattcgcttttgcgttaccagaagactcaaagaagcccctgctgactgggcgtttcggcctgacccttgcccctcaccctttcaacattaccatctccagaagatag

SEQ ID NO: 184478 - DNA, 1506 bp, synthetic construct
  misc_feature 1..1506: note = Description of Artificial Sequence: Synthetic coding sequence
  source 1..1506: mol_type = other DNA
atgagcagccccggccccagccagccccccgccgaggaccccccctggccagctcgcctgctcagggccccgctcgtggggaatttcgggcacgtgctcctgccccccttcctccggcgacggtcgtggctttcttctcgcacccgggctgcggggattgatcctagcgtcataggcccccaggtgctgctggcgcatttggccagggtttatggaagcatcttttcctttttcattggacactatctggtggtggtgctatcagacttccactcagtcagggaagctctcgtgcaacaggctgaggtcttctccgataggcctagagttccattaattagcatcgtgacgaaagaaaagggggttgtgttcgcgcactacggcccagtgtggcggcaacagcgcaagtttagccactccacccttcgtcattttggcctgggtaagctgtctctggaaccaaaaatcatcgaagaatttaagtacgtgaaggcggaaatgcagaaacacggagaagaccctttctgcccttttagcatcatttctaacgctgtttctaacatcatctgcagcctctgtttcggacagaggttcgattatactaatagtgaatttaagaaaatgttgggattcatgtccagaggattagagatctgtcttaattcccaggtcctcctggtgaacatctgtccctggctttattatttgcccttcggaccttttaaggagctgagacaaattgaaaaggacataacatcgtttctgaaaaagatcatcaaagaccatcaggagagcctagacagagaaaatcctcaggattttatagatatgtatctactgcatatggaagaagagcggaaaaataatagcaactccagcttcgatgaagagtatctcttctacattattggggatttgtttatagccggaactgatacgaccacgaattccctgctctggtgcttactatacatgtcgcttaatccggatgtccaagagaaagtacacgaggaaatcgaacgcgtcattggagcgaaccgggctcccagcctgacagacaaggcgcagatgccctatacagaagctactattatggaggtgcagaggctcacggtggttgtccctctagcaatcccacacatgacctctgaaaacacagtccttcaaggatacactattcccaagggcactctgatactgccgaacttgtggagtgtgcaccgggaccctgccatctgggagaagccagaagatttctaccccaataggttcctggatgaccagggccagttgattaagaaagagacattcatcccgtttggcatagggaaacgagtgtgcatgggggagcagttagccaagatggagctgttcctaatgttcgtgtcactaatgcagtccttcgcctttgcactccccgaggactcaaagaagccactcctcaccggcaggttcggcttgacactggccccgcaccccttcaatattacaatttcccgtcggtag

SEQ ID NO: 184479 - DNA, 1398 bp, synthetic construct
  misc_feature 1..1398: note = Description of Artificial Sequence: Synthetic coding sequence
  source 1..1398: mol_type = other DNA
atgctgctgctgggcctgctgctgctgctgcccctgctggccggcgccagacttctgtggaattggtggaagttacggtccctgcatctgccgccgttagcccctggctttttacatctcctgcagcctgacttaccaatttatcttttaggtctcacccagaaattcggtcctatttatcgcctgcacctgggtctgcaagataaactcgtcagtagaaattatcccgacctgtctctgggcgactactccctcctgtggaaggctcacaagaagctgacccggtctgccttattgttgggaataagagactccatggagcccgtcgttgaacagctgacccaggaattttgtgagagaatgagagctcaaccagggaccccagtcgcgattgaggaggaattttccctcctcacttgctctattatttgttaccttaccttcggcgacaagatcaaggacgataacctgatgcccgcctactacaagtgcatccaggaggtcctgaagacatggagccattggagcattcagatagttgatgtaatcccctttctgaggttctttcctaatccagggctgcggaggctgaaacaggccatcgaaaagagggatcacattgtagaaatgcaactgcgccagcacaaggaatctcttgttgccggccagtggcgcgacatgatggactacatgttgcaaggagtcgcacagccctcaatggaggaaggtagcggccagctgctcgaagggcacgtacatatggcagccgtcgatttgctgataggtgggacagagaccacagccaacaccctctcgtgggctgtcgtcttcttgttgcatcaccccgaaatacagcaacgactccaggaagagctcgatcacgaactcggtccaggcgccagctcatctcgagtgccatataaagaccgcgcccgactccccctgctcaatgccaccattgcagaggtgctgcgactccgtccggtggtgccgctggccctccctcatagaacaacgaggccgtcatctatttctggttatgatattcctgaagggacggtgattattcccaacctgcaaggcgcccacctggatgagaccgtttgggagagacctcatgagttttggcccgacaggtttcttgagccaggtaaaaacagtcgagctctcgctttcggctgtggggctagagtgtgtctaggggaaccactagcccgactggagctcttcgtggttctgaccaggcttctccaagcgttcaccctactgccaagcggagacgcattgccctctctccagcctctccctcactgtagtgttatcctcaaaatgcaaccttttcaggtgcggcttcagcctcggggaatgggtgcccattctcccgggcagtcccagtag

SEQ ID NO: 184480 - DNA, 1488 bp, synthetic construct
  misc_feature 1..1488: note = Description of Artificial Sequence: Synthetic coding sequence
  source 1..1488: mol_type = other DNA
atgctgctgctgggcctgctgctgctgctgcccctgctggccggcgcacggctgctgtggaactggtggaagctgcgaagccttcacctaccgcccttggcaccagggtttttgcatctactacagccggacctgccaatctatctcctcggactaacacagaaatttggtccaatatacagattgcatctagggctgcaagatgttgtggtgttaaactctaagagaaccatcgaggaggccatggtgaagaagtgggccgactttgccggacgcccggaacccctgacatacaagctggtttcccgaaactatcccgatctcagcctcggagactatagcctcctttggaaggcccacaaaaagctgaccagatctgctttactactaggcatcagggatagcatggagccagtcgttgagcagctgactcaagagttttgtgagaggatgagggcccagcccggaaccccggtagccatagaagaagaattctctttattgacctgcagtattatttgctatctaacattcggggataaaatcaaggatgataacttaatgccagcctattacaaatgtatccaggaggtcctcaaaacctggagccactggagtattcagattgttgatgtcattccatttctgcggttcttccctaacccaggcttaagacgcttaaaacaggctattgaaaaaagggaccatatcgtggaaatgcaattgagacaacataaagaatccctggtggcaggacagtggcgcgatatgatggattacatgctacagggtgtggctcagccatctatggaggagggatccgggcaactcttggaagggcacgtgcatatggccgctgttgaccttttgatcggtggcaccgagactacagctaatactctttcatgggccgtcgtattcctcttacaccatccggagattcagcagcggctgcaggaggagcttgaccacgaactcggccccggtgcaagttctagccgcgtgccttataaggaccgcgcgcggttgcccctcttgaatgctactatcgccgaagtactgcgccttaggcctgtggtacctttggccctgccccaccgcactacccggccaagttcaatttccgggtatgacatccccgaaggcacagtgatcattccaaacctccagggcgcacacctggacgaaactgtgtgggaacgccctcatgagttttggccagaccgtttcctagagcccggcaagaattctcgagcacttgccttcggatgcggggctagagtgtgtcttggcgaacctctggctcggctcgagttgtttgtggtactaacaaggttactgcaagcctttacgctgctcccttccggggacgctttgccttcactgcagccactcccccactgtagcgtgattctgaaaatgcagcccttccaggtgcggctgcagcctcggggtatgggcgcccatagtccagggcagtctcagtag

SEQ ID NO: 184481 - DNA, 1488 bp, synthetic construct
  misc_feature 1..1488: note = Description of Artificial Sequence: Synthetic coding sequence
  source 1..1488: mol_type = other DNA
atgctgctgctgggcctgctgctgctgctgcccctgctggccggcgctaggctcctgtggaattggtggaagctgcgctctttgcacctcccgcccctagctcctgggttcctgcatctgttgcagcccgacctccctatctacttactaggcttgacacagaaattcgggccgatctaccgactccacctcgggctgcaggacgtggtggtcctcaactccaaacgcaccatagaagaggctatggtgaaaaaatgggcagatttcgcaggtcggcccgagcctcttacttataagttagtgtcgcgaaactaccccgacctctccctcggcgattacagtctcctgtggaaggcccacaaaaaacttacaaggagtgcccttctcttgggaatcagggattcaatggagccagtagtagaacagctcactcaggaattttgcgagagaatgcgggcccagcccggtacccctgtggcgattgaggaagagttcagcctcctgacttgtagcattatttgctacctaacttttggtgataagatcaaagacgataacctgatgccagcatactataaatgtatccaggaggtcctgaagacatggtcccactggtcaatccagatcgtggatgtgatccccttcttaagattcttccctaaccctggcttacggaggttaaagcaagccatagagaaacgcgatcacatcgtggagatgcagctcagacagcacaaagagtctctcgtggcaggccagtggagggacatgatggactatatgctgcagggggttgctcagccttcaatggaagagggcagcggacaactgctggaggggcacgtccacatggccgctgtcgatctactaataggtggcaccgagacaaccgccaacaccctcagctgggccgtggtgtttcttctgcaccaccctgagattcaacaacggctgcaggaggaactggatcatgagctggggcctggcgcatcaagttcacgagtcccttacaaggaccgcgccaggttgcccctgctcaacgctaccatcgctgaggtcctgcgactgcgaccagtcgttcccctcgccctcccgcaccggacaactagacctagttcgattagcggatatgacataccagaagggacggttatcattcccaaccttcagggcgcccatttggatgaaactgtgtgggagaggccacatgaattctggcccgaccgttttctggaacctggcaagaatagccgtgcacttgcattcggctgtggggcacgggtgtgcttgggagaaccccttgcaagactcgaactgtttgtggttcttacacgactgctgcaagcattcacactccttcccagcggagacgcgctaccgtcactccaaccacttccgcactgtagtgtgattctgaaaatgcaaccctttcaagttcgactgcagcccaggggcatgggcgctcactctcccgggcagagccagtag

SEQ ID NO: 184482 - DNA, 1398 bp, synthetic construct
  misc_feature 1..1398: note = Description of Artificial Sequence: Synthetic coding sequence
  source 1..1398: mol_type = other DNA
atgctgctgctgggcctgctgctgctgctgcccctgctggccggcgccagacttttgtggaattggtggaagttacgatccttgcatctcccccccttggctcctggatttcttcatcttctgcagccagacctgccgatatacctcctaggcctgacgcaaaagttcggtcctatttataggttgcacctgggcttacaggacaaactggtgtctaggaattaccccgacctgagtctgggagattactcattgctttggaaggcccacaaaaagctgaccaggagcgccctgctgctgggaattcgagatagcatggagcctgttgtggagcaactaacccaagaattctgcgaaaggatgagagctcagcccggcactccagttgcaatcgaggaggaatttagcctgctcacctgctccattatttgctacttgacctttggcgataagattaaggacgacaatctgatgcccgcctattacaaatgcatccaggaagtcttaaagacatggtctcattggagcatccaaatcgtcgacgtgattcctttcctccggtttttccccaaccccggcctgaggcgtctgaagcaggccatagaaaaacgggatcacattgtagagatgcagctgcgccagcacaaagagagcctcgtcgccggtcagtggagagatatgatggattatatgctccagggggtcgctcagcccagcatggaagagggatctggacagctgcttgaaggccacgtgcatatggccgctgtcgatctgctgattggggggactgagactacggcaaacaccttgtcatgggcagtggtgtttctccttcatcaccccgaaatccagcagcgactgcaggaagaattggatcatgaattgggacccggcgcctcctcctccagagtgccttacaaagatcgggcccgattaccactactgaatgcaaccatagctgaggttttgaggctgcgacctgtggtgccactggccctgcctcacagaacaacacgaccaagctctatatctgggtacgacatccccgagggaaccgtcatcattccaaatctgcagggagcccatttagacgaaactgtgtgggagcggccacatgagttttggccggatcggtttctggaaccgggcaagaatagcagggctttagctttcggttgcggggcaagagtttgcctgggtgaaccgctggctcggctcgagttgttcgttgtgctcacccgcctgctgcaagctttcacccttctgccttccggtgacgcactgccgtctctacaacctctgccccattgtagcgttatcctgaaaatgcagccatttcaggtccggttgcaacctcgcggcatgggcgcgcatagtccggggcaatcccagtag

SEQ ID NO: 184483 - DNA, 1398 bp, synthetic construct
  misc_feature 1..1398: note = Description of Artificial Sequence: Synthetic coding sequence
  source 1..1398: mol_type = other DNA
atgctgctgctgggcctgctgctgctgctgcccctgctggccggcgctcgactcttgtggaattggtggaaactgcggtccttgcatctgccgccgctggcccccggtttcctccacctgctgcagccagatctgcccatatatcttcttggcctgacacagaagttcggcccgatttaccgtctgcacctcgggttgcaggacaaattggtctcccgcaattacccggatctttctcttggggactactcactcctttggaaagcccataaaaaactaactcgttccgcccttctgctgggtattagagattcaatggagcccgttgttgagcaactgactcaggagttttgtgaacgcatgcgggcgcagcctgggacccctgtggccatagaagaggaattctcactgttgacctgctctatcatttgctatctcaccttcggtgataaaatcaaggacgataaccttatgccagcctattacaaatgtattcaagaagtgttgaaaacttggagtcactggtccatccaaattgtggacgttattccatttctgaggttctttcccaacccggggctgcgtagacttaagcaggctatcgaaaagcgcgaccatatcgttgaaatgcagctgcgccagcataaagagtccctggtggctgggcaatggcgcgatatgatggattatatgctccagggcgtcgcccaaccaagcatggaggaaggatcaggccagctgctggaaggccatgtccatatggccgccgtcgatttactcatcggtggtacggaaacgactgccaatactctgtcctgggctgtggtatttctgctgcatcaccctgaaatacagcagaggctccaagaagagctggaccatgagctgggaccaggcgcctccagttcacgcgttccatataaagatcgagctcgactcccattactgaatgcaacaatcgccgaagttctaagactcagaccagttgtgccattggctttgccgcaccgcaccactaggccaagcagtatctccggatacgatatacccgaaggtacagttattatccctaatctccaaggagcacacctggatgagacggtttgggagcggccccacgaattttggccagaccggtttttagaacctggcaaaaatagcagagccctcgctttcgggtgcggagccagggtgtgtctgggtgaaccgctggctcgactggaactgtttgttgttctgacaaggctattacaggccttcacccttctgccgagcggggatgctctgcctagtctgcaacccctgccccattgctccgtaatattaaagatgcagccgtttcaagtccgcttacagcctcgcgggatgggcgcacatagtcccggacagtcccagtag

SEQ ID NO: 184484 - DNA, 1485 bp, synthetic construct
  misc_feature 1..1485: note = Description of Artificial Sequence: Synthetic coding sequence
  source 1..1485: mol_type = other DNA
atgctgctgctgggcctgctgctgctgcccctgctggccggcgcccggcttctttggaactggtggaagcttcggagcctccacctgcctcctctagctcctggtttcctacacctgctgcaacccgatctgccaatttacttactgggacttactcagaagtttggacctatttaccgattgcacctaggactgcaggatgtggtggtgttaaactctaagagaacgatcgaagaggccatggtcaagaagtgggcggacttcgccggtaggccagagcctctgacttataagctggtgtcgaagaattatcccgaccttagcctgggggactactccttgctctggaaagcccataaaaagttaactcgctctgcccttttactcggtatacgagactctatggagcctgtcgtggaacagctgacccaggaattctgcgaaagaatgagggcgcagccgggtaccccggttgcaatcgaggaggagttctctttactgacatgcagcatcatatgctatttgacattcggcgacaaaatcaaagatgataatctcatgccggcttactataaatgcatccaagaggtgttaaaaacttggagccactggagtattcagatagtagatgtcatccctttcctgcgcttctttccaaatccagggctgagaaggcttaaacaggcaattgaaaaacgtgaccacatcgtcgaaatgcagctgagacagcacaaggaatcactcgtcgcaggtcagtggcgggatatgatggactacatgttgcagggggtggcacaacccagcatggaagagggcagcggtcagctcttggagggccacgtgcatatggcagctgtcgaccttctgattggaggaacggaaacgactgccaatactttgagctgggctgtggttttcctcctgcaccaccctgagatccagcagagacttcaggaggaactcgaccacgagcttggacctggagcctcttccagtagagtaccttacaaggaccgcgccagactgcccctgctcaatgccaccatcgctgaggtccttcgtctccggcccgtagtgcccctcgccttgcctcatcgcacaacccgcccctccagcataagtggctatgacatcccggagggcacagtgatcataccaaatctgcaaggcgcccatctagacgaaacagtgtgggagcgaccacacgaattctggcctgaccgattcctcgagccaggcaagaactcccgggccttagcttttgggtgcggagctagggtgtgcttgggcgagccactcgctcgtctggagttgttcgtggtgttgacgagactgttgcaggcctttacattgcttccatcaggggatgcgcttccctccctccagcctcttccccattgctccgtcatactgaaaatgcagccatttcaggtgcgccttcagcctagaggcatgggggctcactcccctggtcagaatcagtag

SEQ ID NO: 184485 - DNA, 1485 bp, synthetic construct
  misc_feature 1..1485: note = Description of Artificial Sequence: Synthetic coding sequence
  source 1..1485: mol_type = other DNA
atgctgctgctgggcctgctgctgctgcccctgctggccggcgccagacttctgtggaattggtggaaactgcgatctctacatcttccaccactggcacctggctttcttcacctccttcagcccgacctgcccatctatctcctcggcctgacccaaaagttcgggccgatttatcggctgcacctgggcctccaggatgtggtcgtgttgaatagcaaaagaacaatcgaagaggcaatggttaagaaatgggctgacttcgctggtaggcccgaacctctgacatataagctagtgtccaagaattatcccgatttaagcctgggtgactactcccttctgtggaaagcacacaagaagctgacaaggtcggccctactgctgggcatccgcgacagtatggaaccagtcgtggagcagctgactcaggaattttgtgagcgcatgcgggcgcagcctggaaccccagtggccatcgaggaggaattttcactcctgacatgctcaatcatatgttatcttacgtttggcgataagattaaggacgacaatctcatgcctgcctactacaagtgcattcaggaggtgcttaagacctggtctcactggagcatacaaattgtggatgttatccccttcctcaggtttttccccaatccaggactccggcggctgaagcaggcaatcgaaaagagggaccacatcgttgagatgcaacttcgtcagcacaaggagagtttggtcgcaggacagtggcgggacatgatggactacatgcttcagggagtagcccaaccatcaatggaggaggggagcggccagctgctggagggccacgttcacatggcggccgtggacctcctaattggagggactgagaccaccgccaatacactcagctgggcagtagtttttctgttgcaccacccggaaatccagcaacgccttcaggaagagctggatcacgagctggggccaggcgcctccagcagcagggttccatacaaagacagggcccgactgccgttactgaatgctactatcgccgaggtgctgagattacggcctgtcgtgcccttggctctgccacataggactacacgacccagctccatctccggctatgacattcctgagggcacagtcatcattccaaacttacagggcgcccatctggatgagactgtttgggaaaggccacacgagttttggcctgatcgttttctggagcccggaaaaaactctcgggcactggcctttggttgcggcgcccgcgtgtgcctcggtgaacccctcgctagactcgagctgtttgttgtgctgactcggctgctgcaggcttttacactcctgccaagcggggacgctctcccttccctgcagcccctgcctcactgctctgtgatcctcaaaatgcagccatttcaggttcggcttcagcctcgaggcatgggagcacattcccctggtcagaaccagtag

SEQ ID NO: 184486 - DNA, 1488 bp, synthetic construct
  misc_feature 1..1488: note = Description of Artificial Sequence: Synthetic coding sequence
  source 1..1488: mol_type = other DNA
atgctgctgctgggcctgctgctgctgctgcccctgctggccggcgccagattgctgtggaattggtggaaactcaggtctctccacctccctccgctggcaccgggattccttcaccttttacagccggacctgcctatttacctgctgggcctgactcagaagtttgggcccatctaccggctgcacctggggctgcaagatgttgtggtactcaactccaagagaaccatcgaagaagccatggttaaaaagtgggccgatttcgcaggaaggcccgagcctctcacatacaagctcgtttccaggaattaccccgacctttccctgggcgactattctctgctatggaaagctcataaaaaacttacaaggtccgctttgctgctcggcatacgcgacagcatggagccagtagttgaacagttaacccaggagttttgtgagaggatgcgggcacagccgggcacacctgtggccatcgaggaagaatttagcctgcttacctgtagcattatttgctacctgaccttcggcgacaaaattaaggacgataatctaatgccagcttattataagtgcatacaagaggttctgaagacctggtcacattggagtattcagatcgtggacgtaataccttttctgcgcttcttccctaaccctggtctccgccggctcaagcaggccattgaaaaacgcgatcacatcgtcgagatgcagctgagacagcacaaggagtctctggtcgccggacagtggcgcgacatgatggattacatgctccagggtgttgcacagccgtccatggaagaggggtctggccagctgttggagggtcacgtacatatggcagccgtggacctgttaataggcggtaccgaaactacagccaacaccctgtcatgggctgttgtttttctcctgcatcacccggagattcagcagcggctccaagaggagctggaccatgaacttgggcctggagcctcctcaagccgcgtcccctataaggatcgagcgcgcttgccgctgttgaatgcaacaattgcagaagtcctgagactgcggcccgtagtgccactagcgctccctcaccgcacaactcggccgagcagcatttccggctatgatattcccgaaggaacagtcatcattcccaacctccagggcgctcatctagatgaaactgtgtgggaacgtcctcacgagttctggcctgaccgctttctggaacctgggaagaattcacgcgccctggcattcgggtgtggcgcccgggtatgcctgggcgagccactggcacgtctggagcttttcgtggtgctgacgaggttgttgcaagcattcactcttttaccctctggcgacgccctgcccagcctccagccgttgcctcattgctcagtgattctgaagatgcaaccctttcaggttcggctgcagccaaggggaatgggtgcacactcccctggacagagccagtag

SEQ ID NO: 184487 - DNA, 1395 bp, synthetic construct
  misc_feature 1..1395: note = Description of Artificial Sequence: Synthetic coding sequence
  source 1..1395: mol_type = other DNA
atgctgctgctgggcctgctgctgctgcccctgctggccggcgcccgtctgctctggaactggtggaagctgcggtccttgcatctgccccctctcgcccccggtttcttgcatctcttgcagcctgacttacctatttatttgctaggcttaacgcagaaattcggtcccatttacagactccacctgggcctgcaagataaattggtcagtaagaactaccccgacctctctttgggcgactactctctgctgtggaaagcccacaagaaattgactcgatcagccctgcttctggggatcagggactccatggagcctgtcgtcgaacaactcactcaagagttctgcgagcggatgagggctcaacctggcaccccggttgcaattgaagaggaatttagcctccttacgtgcagcattatatgttacctcactttcggggacaagattaaggacgacaatctcatgccagcatactacaagtgtattcaggaagtcctgaagacctggtctcactggtctattcaaatcgttgatgtcatcccctttctgagattcttccccaaccccgggcttaggagactcaagcaagcaattgagaagagagaccacattgtggaaatgcagctccggcagcataaagaatcactggtggcgggccagtggagagacatgatggactacatgttgcagggagttgcgcagccatctatggaagaaggaagcggccagctcttggagggacacgtacacatggcggccgtggacttgctcattggaggaaccgaaaccacggctaacacactgtcgtgggccgtggtttttttgctgcaccaccctgaaatacagcagcgcctccaagaagaacttgatcacgagctcggccctggagcctctagcagccgcgttccctacaaggacagagctagactgcccctgctgaatgctacaatcgccgaagtactgcgcctgcggccagtggttcctctcgcactcccccacagaacaacgcgaccgagttctatctccggttatgacattccagaggggacggtcatcatacccaacctgcagggcgcacatctagacgaaacagtgtgggaacgcccgcatgaattttggccggatcggtttcttgagcctggcaaaaatagccgtgcactagcgtttgggtgtggagcacgcgtgtgccttggcgagccccttgcaaggctggaactgtttgttgtgctaacaaggctgctgcaggctttcactctgctcccctccggggacgctctgcctagtctgcagccgctgccgcattgtagtgtcatcctcaaaatgcagcccttccaggtccggcttcagcctcgcggcatgggggctcatagtcccggtcaaaaccaatag

SEQ ID NO: 184488 - DNA, 1398 bp, synthetic construct
  misc_feature 1..1398: note = Description of Artificial Sequence: Synthetic coding sequence
  source 1..1398: mol_type = other DNA
atgctgctgctgggcctgctgctgctgctgcccctgctggccggcgcccgtctgctgtggaactggtggaaacttcgctctctgcatttacccccgttggctccaggctttctgcatctgttacagcccgatcttcccatttatctcctggggctcacccagaaattcggaccaatctataggctccacctcggcctgcaggataaactggtgagtcgcaattatcccgatcttagcctgggggattacagcctcctgtggaaggcccataagaagttgacccggtcagcacttttgttaggaatacgcgattctatggagccagtggtggagcagcttacccaggagttctgcgaaaggatgagagcacagcctggcactcccgtcgcaattgaagaggagtttagtctcctcacttgctctatcatttgttatcttacctttggcgataagatcaaggacgacaatttgatgccagcatactataagtgcattcaggaggtactgaaaacatggtcccattggtctattcagatcgtggatgtcatccctttcctgcggttcttccctaatccagggctgagacggttgaagcaggccattgagaagagagaccatatagtcgaaatgcagctcagacaacacaaagagtcactggtagctgggcagtggcgggacatgatggattatatgttacagggcgttgcccagccgagtatggaagagggaagtgggcagcttctggaggggcatgtgcatatggctgctgtggacctgctgatcgggggcaccgaaacaacagcgaacacgctttcgtgggccgttgtcttccttcttcaccacccagagattcagcagaggcttcaggaggagttggaccatgagctgggtcccggagcatccagctccagagtcccttataaagaccgggccagactccctttgttaaacgcaaccatcgccgaggtgctcagattaagacctgtcgtgcctctcgcactgccgcacaggaccacccgcccctcatctatttcgggttatgatattccagaagggacagtcatcattcctaacttgcaaggcgcacacttagatgaaacagtatgggagcgaccccatgaattctggcccgacagattcctggaaccagggaagaatagtcgggcacttgcctttggttgcggcgccagagtgtgcctgggagagcctctcgcgcgccttgaactgtttgtggtactgactaggcttctgcaggcctttactctgcttccaagcggtgatgcgctgccatccttacagcccctacctcattgctccgttatcctgaagatgcagccgtttcaggtgaggcttcagcctaggggcatgggggctcacagccctggccaatctcagtag

SEQ ID NO: 184489 - DNA, 1395 bp, synthetic construct
  misc_feature 1..1395: note = Description of Artificial Sequence: Synthetic coding sequence
  source 1..1395: mol_type = other DNA
atgctgctgctgggcctgctgctgctgcccctgctggccggcgccaggttactctggaattggtggaagctgcgctccctgcaccttcctcctctagcccccggttttctgcacctcctacagcctgacctgcctatttacctgctcggcctcacgcagaaatttggtcccatatatagattacaccttgggctgcaggacaagcttgttagtaaaaactatcctgacctgagcctaggggactatagtctgctgtggaaagcacacaaaaagctcacaagatcagctttactgctgggtattcgggacagcatggagcccgtggttgagcagctaacgcaagaattttgcgaaaggatgagggctcagccagggacccctgtcgccatagaggaagagttttcgttactcacttgttctatcatttgttacctgactttcggagacaagattaaggatgacaacctaatgcccgcctactataagtgtattcaggaggttcttaagacctggagccattggtcgattcaaatagtggatgtgatcccttttttgaggttttttccaaatccagggctccgtcgactgaagcaggctatcgaaaagcgagatcatattgtggagatgcagttacgccaacacaaggagtccctggtggccggtcagtggcgcgacatgatggattacatgctccagggtgtagcccagcccagcatggaagaggggagtggccaactgctggagggccatgtgcatatggccgcagtggacctattaatagggggaacagagaccaccgcgaacactttgtcctgggccgtggtgttcctgctgcatcatccagaaatccagcagaggctccaggaggaacttgaccatgaacttggaccaggagcatcttcaagtcgtgtgccgtacaaggacagagcaagattaccccttctgaatgccaccatcgctgaggttctgaggctgagacccgtggtgcccctcgctcttccacaccggactacaaggccttctagcataagtggatatgacatccccgagggcaccgttattatcccaaacctccagggggcacacctggacgagacagtctgggaacgccctcatgagttttggcctgatcggttcctggaacctggaaaaaacagccgggcactcgcctttggatgtggcgcacgggtctgtttgggcgagcccttagccaggctggagctctttgtggtgctgaccaggcttctacaggctttcacactactcccctcaggagatgcactcccttctctgcagccacttccacactgcagcgtgatactcaaaatgcagcctttccaggtgcgtcttcagccacgaggaatgggagcacatagtcctggtcagaatcagtag

SEQ ID NO: 184490 - DNA, 1488 bp, synthetic construct
  misc_feature 1..1488: note = Description of Artificial Sequence: Synthetic coding sequence
  source 1..1488: mol_type = other DNA
atgctgctgctgggcctgctgctgctgctgcccctgctggccggcgcccgcttactatggaattggtggaaactgcgctccttgcatctgcttcctcttgcacccgggttcttgcatctactgcaacctgacctcccaatctatctgctgggcctgacccagaaattcgggcccatctataggttgcacctgggcctccaggatgtggtcgtgttgaattctaaaagaacaattgaagaggctatggtcaagaaatgggcggacttcgcaggacgaccagaaccccttacatacaaacttgtgtccaagaactaccctgacctctccctgggggactatagcctgctgtggaaagctcacaaaaaactcacaagaagcgcacttctcctgggcatcagagactctatggaacccgttgtagagcaactgactcaggaattttgtgagagaatgcgggcccaaccaggtacccctgtggccattgaagaggaattttccctgctgacctgttccattatttgttacctgaccttcggagacaagatcaaggatgataacctgatgcccgcatattacaagtgcatccaggaagtactcaagacttggagccactggagtatccagattgtggatgtgattcctttcctaagatttttcccaaatccgggcctgaggaggctgaagcaggctatagagaagcgcgaccatatcgtggagatgcagttaaggcagcataaagagtctttggtggctggacagtggcgggacatgatggattacatgctgcagggggtggcccagcccagtatggaggaaggcagcgggcaactgctcgaagggcatgttcatatggctgcagtggatctgctgatcggagggacagagaccactgctaacaccttatcttgggcggtggtgttcctactgcatcacccagagatccagcaaaggctgcaagaggagctcgaccatgagctgggacccggggcttcatcctcgagggtcccttataaagaccgggcccggctgcctcttctgaatgcaactattgccgaagtccttaggctacggcctgtggtgccactggccctaccacatagaacaacgcgcccatcatcgatctctggttacgatatccctgagggaaccgtgattattcctaacctccagggcgcacacctcgacgaaaccgtgtgggaacggccccacgagttttggcctgataggtttctggagccagggaaaaattctagggccttagcatttggctgtggtgctcgagtgtgtctgggcgaacctctggcccgcctcgagctctttgttgtgctcacgcggttactgcaggcctttacccttcttcctagcggagatgctttaccttccctccagcctctcccgcattgcagcgtcatcttgaagatgcagccctttcaggtccgcctccagccccggggaatgggagcacattctcctggacagaaccagtag

SEQ ID NO: 184491 - DNA, 1488 bp, synthetic construct
  misc_feature 1..1488: note = Description of Artificial Sequence: Synthetic coding sequence
  source 1..1488: mol_type = other DNA
atgctgctgctgggcctgctgctgctgctgcccctgctggccggcgcccgattgctgtggaattggtggaaacttcggagccttcatcttccacctctggcccctgggttcctgcacctgctgcagcccgacttgcccatatatttactgggcctaactcaaaagtttggacccatctaccgactgcatcttggactgcaggatgtcgtggtgttaaacagcaaacgaacgatcgaagaggccatggtgaagaagtgggctgattttgctggccggcctgagccccttacttacaagcttgtaagtaagaattatccagacttgagtctgggtgactactcgctcttgtggaaggcccacaagaagctgaccagatcggccttacttcttggtattagagactcgatggagccagtcgtggagcagttgactcaggaattctgtgagcggatgagggcccaacccgggacacccgtggccatcgaggaggaattttccttgctgacgtgttcaataatctgctacctcacgtttggggataagataaaggatgataacctgatgccggcctattataagtgtattcaagaagtgctaaagacatggtctcattggtcaattcagattgtggacgtcatccccttcttgagattctttccaaaccctggtctgcgccgacttaaacaggccattgagaaacgggaccatattgtcgagatgcaactgcgccaacataaggagagcctggtggcgggccaatggagggacatgatggactatatgctccaaggcgtggcccagccgagcatggaagaaggctcgggccagctgctggaggggcatgttcacatggcagccgtggatctccttatcgggggaaccgaaaccaccgcgaatactctctcatgggcagttgtgtttctgctgcaccatcctgagatccagcaacgacttcaggaagagttagaccacgagctcggacccggcgcttcttcttcacgggttccatacaaagaccgggcccgcctgcctctcctgaacgccacaatcgcagaggtattgaggctgaggccagtggtcccgctcgccttgcctcacagaactactcgtccgtccagtatttctggatacgatatacctgagggcacagtgatcatccctaacctgcagggcgcacatttggatgagacagtatgggagaggccacacgagttctggcccgacagattcttggagcctggaaagaactctagagctctcgcatttgggtgcggggccagggtttgcctgggggagcctttggctagactcgagctctttgtggtgttgacgagactcttgcaggcatttaccctgctccccagcggtgatgctcttcccagcttgcaaccactccctcactgctcagtgatccttaagatgcagccattccaggtcaggctccaaccacggggcatgggggcccacagtccagggcagaaccaatag

SEQ ID NO: 184492 - DNA, 1398 bp, synthetic construct
  misc_feature 1..1398: note = Description of Artificial Sequence: Synthetic coding sequence
  source 1..1398: mol_type = other DNA
atgctgctgctgggcctgctgctgctgctgcccctgctggccggcgcacggctgttatggaactggtggaagttgcgctctctgcaccttctgccgctggcgccagggtttctacacctcctgcagccagacctcccaatatacctactcgggctgactcagaaattcggacccatttaccggctccatctcggacttcaagacaaactggtttcaaaaaactaccctgacttatcactgggagactattctttgctgtggaaagcccataagaaattgacccgctcggcactgctcctgggcatcagggattctatggaaccggttgtcgagcagttgacccaagagttctgtgagagaatgagggcgcagcctgggactcccgtcgccatagaagaagagttcagccttctgacttgctccattatctgttacctcacctttggcgataagatcaaggacgataacctgatgcctgcgtattataagtgtatccaggaggtactgaaaacgtggtctcactggagcattcagatcgtggatgtgattcctttcttaaggttctttccgaatccaggcctccgaaggttgaaacaggccatcgagaagagagaccacatcgtggaaatgcagcttagacagcataaggagtctctggttgccggtcagtggagagatatgatggactatatgctgcaaggcgtggctcagccaagcatggaggaaggcagtggccaactgctggaagggcatgtgcacatggctgcagtcgatctcctaatcggcggtactgaaaccacggccaatacattgtcgtgggcagtggtgtttttactgcatcaccccgagatacagcagcgcctgcaggaagagctcgaccacgagctagggcccggggcttctagctcaagagtcccctataaagatcgggctcggttgccccttctaaatgccacaattgccgaggtgctgaggttgagacctgtcgtgcctctggccttgcctcatcgcacaacgcgcccttcctctatttccggctatgacatcccggagggtaccgtgattatcccaaacctccagggagctcacctggacgagactgtttgggaaagacctcacgaattttggccagatcgcttcctcgaacccgggaagaacagcagagctctcgcattcggatgcggagctcgagtgtgtttgggagagccactcgccaggctggaattattcgtggtcctgactaggctgctgcaggcctttaccttattaccctcgggcgacgcgctgccctctcttcagccgctgccccactgctccgtgattcttaagatgcagcctttccaggtgcgtctacaacctagagggatgggcgcccattcaccaggacagaatcagtag

SEQ ID NO: 184493 - DNA, 1704 bp, synthetic construct
  misc_feature 1..1704: note = Description of Artificial Sequence: Synthetic coding sequence
  source 1..1704: mol_type = other DNA
atgcacggccggctgaaggtgaagaccagcgaggagcaggccgaggccaaacgactggagagggaacagaaactgaaactataccagtctgccacgcaggccgtcttccagaagagacaggcaggagagctggacgagtccgttttagagctgacaagccagatactcggcgccaatcccgactttgccaccctgtggaactgtcgcagagaggtcctgcagcagctggagacccagaaaagccctgaggagctcgcagcacttgtcaaggccgaactggggttcttggagtcttgtctccgcgtgaaccccaaatcatatgggacttggcatcacaggtgttggttgctgggaaggctgccggagcccaattggacaagggagctcgaactgtgcgctcgttttctggaggtagatgagagaaattttcattgctgggattaccgccgcttcgttgctacccaggctgcagtgccgcctgccgaggagttggcgttcacagattcacttatcactcgaaatttttccaactatagtagctggcactaccggagctgcctactcccccagctacatccgcagccagactcgggaccacaaggtcgccttccagaggatgttctcttgaaagagttggaactggttcaaaacgcattcttcaccgatccaaacgaccagtctgcctggttctatcaccgttggttactaggacgggctgatccacaggacgcactacggtgtcttcacgtatctagagacgaggcatgcttaaccgtttctttttcaagacctttgctcgtgggctcacgcatggagatcctactccttatggtggacgatagcccactcatagttgaatggaggaccccagatggtaggaaccgtccgtcacacgtttggctctgtgatctcccagctgcttctctgaacgatcagctcccgcagcataccttccgggtgatatggacagctggggacgtgcagaaggaatgcgtgcttctaaaaggaagacaggaaggctggtgtcgtgacagcaccacagatgaacagctatttaggtgcgagctctcagtggagaagtctaccgttctgcagtctgaactggagtcttgcaaggagttgcaggaacttgagcccgagaataagtggtgtctgctgaccatcatcttgcttatgcgggccctggacccgctgctctatgaaaaagaaacactgcaatattttcagacactgaaggccgtggaccccatgcgggcaacttacctggatgatctgaggtccaagttcctgctcgagaatagcgtgctgaagatggagtatgctgaagttcgggtcctgcatctggcacacaaggatctaacagtactttgccacttggagcagctgttgttagttacacatctggatctatcccataataggctgcggacacttccccccgcactggctgcgttgaggtgcctcgaggtactgcaggcaagcgacaacgctatagagtctctggacggcgtaacaaacctcccgagactgcaggaactgctgctatgtaataaccgtttgcagcagccagccgtactgcagccacttgcatcctgccctcgcttagttttgctgaaccttcagggtaatcctctgtgccaggctgtgggcattctcgagcaactcgctgagctcctcccgagtgtgtcctcagtgctaacgtag

SEQ ID NO: 184494 - DNA, 1347 bp, synthetic construct
  misc_feature 1..1347: note = Description of Artificial Sequence: Synthetic coding sequence
  source 1..1347: mol_type = other DNA
atgagcagccccatcagcaagagccggagcctggccgccttcctgcaacagctccgatctccgcggcagcccccacggcttgtcacgtccacagcatatacaagtcctcaaccgcgagaggtaccagtgtgtcctctcactgcaggcggagagacccaaaacgctgctgccctcccaggcccaacatcatggcctctgcttggctctttgctccaaatcctctggaagggaggcctgaaaaagcagcatgacaccttggtggaatatcacaagaaatatggcaagatcttcaggatgaagttagggagtttcgaatcggtccacctgggatcgccttgtctgctggaggcattgtatagaacagagagcgcctacccacagcggttagaaatcaagccttggaaagcataccgcgattaccgcaaggaaggatacggcttgctgatactcgagggggaggactggcagcgcgtccgcagtgccttccagaagaagctaatgaagcccggcgaggtcatgaaactggacaacaagatcaatgaggtgttagccgacttcatgggccggatcgacgagctgtgtgacgaaaggggacatgtggaagatctgtatagtgaattgaacaaatggtccttcgagtcaatctgcttagttctgtatgagaagcggtttgggctcttgcaaaagaacgctggcgatgaggccgtgaacttcatcatggctataaagactatgatgagtactttcgggcgcatgatggtgacacctgtggagctgcacaagagtctgaatacaaaagtgtggcaagatcacactttggcctgggatactattttcaaaagcgtgaaggcttgcattgataacagactggagaagtactcccagcaacctagcgccgattttctttgtgatatctaccatcagaatcgcctatccaagaaggaactgtacgccgccgttaccgagttgcagctggctgctgtggaaacgaccgcaaattccctgatgtggatcctgtacaatcttagccggaacccgcaggtgcagcagaagctgctaaaagagattcaaagtgtcctgccggagaaccaggttccccgtgccgaagaccttagaaatatgccatacttaaaggcttgcctgaaagaatctatgcgattaaccccctcagtgccctttacaaccaggaccttagacaaggctaccgttctcggggaatacgccctccccaaggggattgtccgaaaatacgacattcaggccaccgataatgagcccgtggagatgctccatagtggaaccttggtgccaagtcgggaactacctatcgccttttgtcagcggtag

SEQ ID NO: 184495 - DNA, 1371 bp, synthetic construct
  misc_feature 1..1371: note = Description of Artificial Sequence: Synthetic coding sequence
  source 1..1371: mol_type = other DNA
atggacaagctgaacaagatcaccgtgcccgccagccagaagctgcgccagctgcaaaaaatggtccacgacatcaaaaataatgagggcggtattatgaataagatcaaaaaactaaaagtcaaggctcccccaagtgtgccacgccgcgactatgcctcagaatctccagctgatgaggaggaacagtggtccgacgatttcgactcagattacgaaaatcccgatgaacatagcgattctgaaatgtacgtgatgccggctgaagagaatgctgacgactcatacgaacccccgcctgtggaacaggagaccagacctgtgcatcctgcccttccattcgcccggggtgagtatattgacaatcgctcttcgcagcgccatagtccccccttctccaaaactctgccatccaagcctagctggccgtcggaaaaggctcggcttacaagcacacttccggctctgaccgccctccagaagccgcaagtgccgcctaagcctaaggggctcttagaagacgaggccgattacgtggtgcctgtggaagataacgatgagaactacattcatccaacggaatccagttccccccctccggagaaagccccaatggtgaacagaagtacaaaacctaatagcagcacacctgcgtcgccacccggcacggccagcggaaggaatagtggggcctgggagaccaaatccccacctcctgctgcaccctctccccttccaagggcgggaaagaaacccaccacccccctaaagactactcccgtcgcatcccagcagaatgcgtccagtgtatgcgaggaaaaacctattcccgcagagaggcaccggggttcctcacacaggcaggaggccgtgcagtccccagtgttcccccctgcccaaaaacagatacaccaaaagccgataccactgcccagattcaccgagggcgggaaccccactgttgatggacccctgccaagcttttcctctaacagcaccataagtgaacaggaggctggagtactctgcaagccatggtatgcaggggcttgcgataggaagtcggccgaggaagctctccatcggtcaaacaaagacgggtcattcctgatccgcaaaagcagtgggcacgattccaaacagccatacaccctcgtagtctttttcaacaaaagggtctacaatattccggtcagattcatcgaggccaccaagcagtacgcgcttggaaggaagaagaatggggaagagtacttcggctctgtagccgagatcatccggaatcaccagcactctcccttagtcctgatcgatagtcagaacaatacgaaggactcaaccagattgaaatacgccgtgaaagttagttag

SEQ ID NO: 184496 - DNA, 1287 bp, synthetic construct
  misc_feature 1..1287: note = Description of Artificial Sequence: Synthetic coding sequence
  source 1..1287: mol_type = other DNA
atgaagcggcggaagtacggcttcatctacaagacccacctgttcggccgccccactgtgcgcgtgatgggcgctgataacgtccgcagaatattgctgggcgaacaccgacttgtctctgtccactggccagccagcgtgagaaccatcttaggctccggctgcctgagcaacctacatgatagtagccataagcaacgcaagaaagtgataatgcgggctttcagccgtgaggctctcgagtgctatgtacccgtgatcacagaagaggtgggaagttctttggagcaatggctttcctgcggggagaggggcctccttgtgtatcctgaggttaaaaggctgatgtttagaatcgctatgcgcatccttttaggctgtgaaccacaactcgccggcgacggggacagcgagcagcagctcgttgaagcttttgaggaaatgaccagaaacttattttccctccctattgatgtcccgttctctggcctgtaccgaggaatgaaggctagaaacctcatacacgcacgaattgaacaaaatatccgggcgaagatttgtggtctacgggcaagtgaggcaggtcagggatgtaaggatgcgctccagctgctgatcgaacattcctgggagagaggggaacgcctggatatgcaggccctcaaacagagtagcacagagctgctgtttggggggcatgagacaacagcttcagctgctacctccttgatcacatatttaggactgtaccctcatgtactccagaaggttcgggaagagttaaagtcaaaagggttgctctgtaagtccaatcaggataataagctggacatggagatcctggagcagctgaagtacatcggctgcgtgataaaagaaacattacggttgaatcctcctgtcccaggcgggtttcgggtcgccctcaagacattcgagctgaatgggtaccagatcccaaagggctggaacgttatatacagcatctgcgacacccacgatgtggctgaaatcttcactaataaagaggagtttaaccccgatcgttttatgctgccacaccccgaggacgcttcccggttttctttcatcccatttggggggggccttagaagctgtgtgggaaaagagtttgccaagatactcctgaagatttttacagtggaattagctcgacactgcgactggcaactgctgaatggaccccctacaatgaaaactagcccgactgtgtatccagtggataacctaccggcacgatttacgcatttccatggcgagatctag

SEQ ID NO: 184497 - DNA, 1287 bp, synthetic construct
  misc_feature 1..1287: note = Description of Artificial Sequence: Synthetic coding sequence
  source 1..1287: mol_type = other DNA
atgaagcggcggaagtacggcttcatctacaagacccacctgttcggccgaccaactgtgcgggttatgggggcagacaacgtcagacgtattctattaggtgagcacagactcgtttccgtccactggcctgctagcgtgaggactattcttgggtcagggtgtcttagtaatctgcatgacagcagccacaagcaacgcaaaaaggttatcatgcgcgctttcagtcgggaagccctggagtgctatgttcctgttatcacggaggaggttggctcgtctctcgagcagtggctgtcttgcggtgagaggggcctactggtttacccagaagtgaagagactgatgttcaggatcgcgatgaggatcctgctgggctgcgagcctcagcttgccggtgatggagatagcgaacaacaactcgtggaggcatttgaggagatgacaaggaatctcttctccctgcctatagatgtgccgttttccggcttgtatcgtggtatgaaggctaggaatctcattcatgcccgcatcgagcagaatataagggctaaaatctgtgggctacgtgcttctgaggcgggccagggctgcaaggatgcactccagttgcttatcgaacacagctgggagaggggagaacgcctggatatgcaggccctcaaacagtcgtccactgagttactttttggcggacacgaaactaccgcctcagccgccacttccctcatcacctacttgggactctacccacacgtgctgcagaaggttcgggaagaactaaaaagcaagggcctcctttgtaaaagtaaccaggacaataaacttgatatggaaattctagagcagctgaaatacattggatgcgttataaaagaaacactgcggctcaatccacccgttcccggcggtttcagagtggctctcaaaacttttgagttgaatggctaccagatccctaagggctggaatgttatatactccatttgtgatacccacgacgtcgccgaaatttttaccaataaagaggagtttaaccctgaccgattcatgctgcctcaccccgaggatgcctcccgattttcatttatcccctttgggggtgggctacggtcttgtgttgggaaagaattcgcaaaaattctattgaagatatttacagtcgagttggcccggcactgcgattggcagctcttaaatgggccgcccactatgaagacatcccctaccgtctatcccgtcgacaatctgcctgcccgcttcacccattttcatggtgagatttag

SEQ ID NO: 184498 - DNA, 1569 bp, synthetic construct
  misc_feature 1..1569: note = Description of Artificial Sequence: Synthetic coding sequence
  source 1..1569: mol_type = other DNA
atgttcccctggggcctgagctgcctgagcgtgctgggcgccgccggaactgcactgctgtgtgccgggctgctcctgtccctggctcaacatctgtggacgttgagatggatgctttccagggatcgggccagtaccttaccgctgcccaagggcagtatggggtggcccttcttcggcgaaacgctgcattggctggtgcaggggtcccgcttccatagcagtagaagggaaagatatgggaccgtgtttaaaacccacctgctgggcaggcctgtgattcgcgttagcggtgccgaaaatgtgagaacaattttgctcggtgaacatcgcctggtgagatctcagtggcctcagtcggcgcacatcctgttgggaagccacacgctactgggggctgtaggtgaaccgcataggagacgcagaaaggttttggcccgggtgttttcacgggctgcgttggagcgctacgttccccggctgcagggtgccctacggcacgaggtgcggtcctggtgcgccgcgggtggtccggtctccgtttatgacgcgtctaaagccttgactttcaggatggccgctcgcatcctgctgggcttacgcctggacgaagcccagtgcgctacgttggctagaacatttgagcagctggtggagaacctcttctctttacctttagatgtgcctttttctggactgcgtaaaggcattcgcgctagggatcagctgcatagacacttggaaggagccatttccgaaaaacttcacgaagacaaggcagcggagcccggcgacgctctggacctgattatacattcggcccgtgaattgggccatgagccatctatgcaggagctgaaggaatctgctgtggaactccttttcgctgcatttttcacaaccgcaagcgcgagcactagcttagttttgctgctgcttcagcacccggcggcaatcgccaaaatccgggaagaacttgtggctcagggcctgggacgcgcctgcggctgcgcacccggtgctgctggaggcagtgaggggccccctccagattgtggctgcgaacccgatctgtcattggccgccctgggccggttaaggtatgtagactgtgtagttaaggaggtgcttagactgctccctcccgttagtggcgggtataggactgccctgcgaaccttcgagctggacggttatcagattccgaaaggttggtctgtgatgtattccatcagagatacgcacgagaccgcagccgtctatagatcaccacccgaaggatttgacccagaaaggttcggagcggcgcgcgaagactcacggggcgcttccagcagattccattacatacccttcggcggtggggcacggtcatgcctaggccaggaattggcgcaggcagtccttcaactgctcgcggtggaactggtaaggactgcccggtgggaattggctactcccgcctttcccgccatgcagactgtgcctattgtgcacccagtggacggattgcggctcttcttccacccactgacaccgtcggtggcagggaatgggttgtgtctatag

SEQ ID NO: 184499 - DNA, 1596 bp, synthetic construct
  misc_feature 1..1596: note = Description of Artificial Sequence: Synthetic coding sequence
  source 1..1596: mol_type = other DNA
atggccgccctgggctgcgcccggctgcggtgggccctgcggggcgcaggccgcggcctttgtccccatggagctagggccaaagctgctattccagctgcccttccaagtgacaaggccacaggcgcacccggcgccggtcctggagtcagacggagacaacgctcccttgaagagattccccgcttgggccaattgcgatttttcttccagcttttcgttcaagggtacgcgttacaacttcaccaactccaagtgctgtacaaggccaagtacggacctatgtggatgtcttatctgggaccacagatgcacgtaaatctagcgagcgcacccctactggaacaggtgatgaggcaagagggtaagtaccctgtaagaaatgacatggaactatggaaggagcaccgtgaccagcacgatcttacttacggaccatttactactgaaggacatcactggtatcagctcaggcaggccctaaatcagaggttgctcaaaccagctgaggcggccctgtatacggacgcattcaacgaagtcatcgacgatttcatgaccagattagatcaactcagagcagagtccgcctctggaaaccaggtgtctgatatggcccaattgttttactattttgcgcttgaagccatctgttatatactgtttgagaagaggatagggtgcctgcagagatccatccccgaggatacagtcacgttcgttagaagtataggtttgatgtttcaaaattcactctacgccaccttcctgcctaagtggacccggcccgtgctgcctttctggaaacggtacctggatggctggaatgccattttctcgttcggtaagaaactaatcgatgaaaagctcgaggatatggaggctcagctgcaagctgcaggaccggatggcattcaagtgtctgggtatttgcattttctgttggctagcggccagctgtccccacgggaggcaatgggttcccttcccgagttactgatggccggggtagatacaacgagcaacaccctgacatgggccctgtaccacctctccaaagacccggagattcaggaagcactgcatgaggaagtggtaggggtagtccctgctggacaggtgccgcagcataaagactttgctcacatgcctctcctaaaagcagtgttgaaagaaactctgcgcctgtacccagtggtccctactaattccaggattatagaaaaggaaattgaggttgatggcttcctgtttcccaaaaatactcagttcgtgttctgccactacgtggtgagtcgagatccaacggccttctccgaaccagagagcttccagccacaccggtggctgaggaattcgcagcctgccacgcctagaattcaacacccatttggatcagttccgttcggctacggagtgagagcatgcctaggacgtcggattgccgaactggaaatgcagctgcttctggccaggcttattcaaaagtataaggtcgtgttagcgcccgagactggagagctcaagtccgtggcaaggatcgtgctggtgcctaacaagaaggtggggctgcaattcctgcagcggcagtgttag

SEQ ID NO: 184500 - DNA, 1572 bp, synthetic construct
  misc_feature 1..1572: note = Description of Artificial Sequence: Synthetic coding sequence
  source 1..1572: mol_type = other DNA
atgagcttccacaaggaggacggcgtgaacagcctgtgccagaaggccctgcacatagttaccgagctgtgttttgctggccaggttgaatgggaaaagtgtagtggtatcttcccaagagaccgaggcagtcagggaggatcttctacagatattagcgtgagtctcctcgcggttgttgtttccttttgcggcctggccctgctggtggtatccctctttgtcttctggaagctgtgctggccatgttggaaaagtaagcctgtgacttcaaatatcacaacactgcctcaaagtatctcctcagccccaacagaggtgttcgagacggaagaaaaaaaggagattaaggagaatgaaaagcccgcagtgaaagccattgaacctgccatcaaaatttcccacaccagccctgatattccagctgaagtgcagaccgcactaaaggaacacctaataaagcacgcccgggtgcagcgacaaatcacagagccaacaagttccactaggcatagtagcttccggaggcaccttccccggcaaatgcaggtatctagtgtggatttttccatggggaccgaacctgtgctccagagaggcgaaacgacaacttcaatagggcgcattaaaccagagctgtataagcagaaatcagtggatagcgaagggaaccaaaacgaggatgtgaaaatttgtggtaagctaaacttcacattacagtacgattatgaaaacgaactgctggtggtcaaaattataaaggcgctggacctgccagcaaaggacttcactggcacatcagacccctacgtgaagatgtatttgctcccagaccggaaaaaaaaatttcagactagagtacatagaaagacacttaacccgctatttgatgaaacctttcaattcccggttgcctacgatcagctgtcaaatcgtaagctgcactttagtgtgtacgatttcgacagattcagccgccacgatatgatcggcgaagtgatcctggacaatctctttgaggtatctgacctgagcagggaggccacagtgtggaaagatattcactgtgcaaccacagaatccattgaccttggggagattatgttctcgctttgttacctccccaccgctggtaggatgactcttaccgtcatcaaatgccggaatttgaaggctatggacataaccggcagttctgatccctatgtgaaggtgagcctcatgtgtgaaggaaggcgcctgaagaagcggaaaactaccaccaaaaagaacactcttaatccagtctacaacgaagccataatctttgatattcccccagagaacgtggatcaggtgagcctctctattgctgtaatggactacgatcgagtggggcacaacgaggtcatcggcgtgtgcagaacgggtctggacgcagaaggcctgggcagggaccattggaacgagatgctggcctatcacaggaagcctatcactcattggcatcctctgttggagctaccaggccgcgctacctcatttgattcgcaggggtcctgtccttctcccaagccgccgtctaccccctag

SEQ ID NO: 184501 - DNA, 1512 bp, synthetic construct
  misc_feature 1..1512: note = Description of Artificial Sequence: Synthetic coding sequence
  source 1..1512: mol_type = other DNA
atggccctgatccccgacctggccatggagacctggctgctgctggccgtttctcttgtgctcctgtacctttacggaactcactcccacggccttttcaaaaaattggggattcccggcccgacccccttacccttcctgggtaatatccttagctaccacaagggtttctgtatgtttgacatggaatgtcataaaaagtatgggaaggtgtggggcttttacgacggtcagcaaccggtcctagccatcacagaccctgacatgatcaagaccgtgctggtgaaagagtgttactctgtcttcactaatagacgcccattcggtcccgtcgggttcatgaagtcagccatttccatcgcagaggatgaagagtggaaaagattacgatcgttactaagtcctacatttacaagcggcaaactgaaagagatggtcccaatcattgcgcaatatggggacgtgctggtaaggaatctgcgaagggaagctgaaaccggaaaaccagtgactctcaaagacgtattcggcgcttacagcatggatgttattacatctaccagtttcggcgtcaacatagattcgctgaacaacccgcaggatccgttcgttgagaataccaagaaactgttgaggttcgattttctggatccattctttctgagcatcacagtgttccccttcctaattcccattctggaagtactaaacatctgcgtgtttcccagagaggtgaccaacttcttgaggaaatctgtcaagagaatgaaggagtccaggctggaagacacgcaaaaacatagagtagacttcctccaactgatgattgatagccaaaactcaaaagagaccgagagccacaaggcactttcggacttagagctggtcgcccagagcatcatcttcatatttgcagggtacgaaaccaccagctctgtgctgagctttatcatgtacgaactggccacgcaccccgacgttcagcaaaagctgcaggaagagatcgatgctgtcttgccaaataaagccccacccacctatgacaccgttctgcagatggagtacctagatatggtagtgaacgagaccttacgcctgttcccaatcgcaatgagactcgagagagtgtgtaagaaggatgtggagatcaacggtatgtttattcctaaaggagtagtggtgatgattccctcctacgctctgcatcgggatccaaagtactggaccgagcccgagaagtttctccccgagcgttttagtaaaaaaaacaaggataatatcgacccctatatctacacacccttcggatctggccctcggaactgcattggaatgaggttcgcactcatgaacatgaagctggctttgatcagggttctccagaacttctccttcaaaccttgcaaggagactcagatccctcttaaattgagcctgggtggcctgctacagcccgagaagcctgttgtcttgaaggtggagagcagagacggcactgtctcaggcgcatag

SEQ ID NO: 184502 - DNA, 1062 bp, synthetic construct
  misc_feature 1..1062: note = Description of Artificial Sequence: Synthetic coding sequence
  source 1..1062: mol_type = other DNA
atggccctgatccccgacctggccatggagacctggctgctgctggccgtgtctctcgtactgctgtatctggtcttcggagcatactctatggatgtgatcacaagtactagctttggcgtgaatatagattcactcaacaatcctcaagatccttttgttgagaatacaaagaagcttttaagatttgatttcctggatcccttctttctgtcaatcactgtcttcccatttcttattcctatactggaagttcttaatatctgcgtgtttccacgggaagttactaactttcttagaaaatcagttaagcggatgaaggagtcccggttggaagatacacagaagcatcgcgtcgacttcctgcagctgatgattgactctcaaaactctaaggaaactgaatctcacaaggcactatctgatctcgaactcgtggcacagagcattatattcatttttgcaggctatgaaaccactagcagcgtgctctccttcatcatgtatgagctcgcgacacaccctgacgtgcaacaaaaactgcaagaagagattgatgcagtgttaccaaacaaggctccccccacctacgacactgtgctgcagatggaatacctagacatggtggttaatgagactctccgactgttccccattgctatgcgcctagagcgggtctgtaagaaggatgtggagattaatggcatgttcattcccaaaggcgtggtcgttatgattccttcatatgccttacatcgcgatccaaaatactggaccgagccagagaagttcctgcctgagcgtttctccaaaaaaaacaaagacaatatcgacccgtacatatacacaccatttggaagtggcccacggaactgcatcggcatgcgcttcgccttgatgaacatgaaactggccctcatacgcgtcctgcaaaacttttccttcaagccgtgcaaagagacccagatccccctgaaactctcgctcggcggcctgctgcagcccgagaaaccagtggttctcaaagttgaatcccgtgatggaacagtgtccggagcctag

SEQ ID NO: 184503 - DNA, 240 bp, synthetic construct
  misc_feature 1..240: note = Description of Artificial Sequence: Synthetic coding sequence
  source 1..240: mol_type = other DNA
atggtgcccatcatcgcccagtacggcgacgtgctggtgcggaacttaagacgtgaagccgaaactggcaaacccgtcactctgaaggacgtgttcggtgcttacagcatggatgtcatcactagcacaagtttcggggtcaacatcgactccttgaacaaccctcaagaccccttcgtggagaacacaaaaaaacttcttcggtttgatttcctagatcctttctttttgtcaatctag

SEQ ID NO: 184504 - DNA, 1068 bp, synthetic construct
  misc_feature 1..1068: note = Description of Artificial Sequence: Synthetic coding sequence
  source 1..1068: mol_type = other DNA
atggccaagctgatcgccctgaccctgctgggcatgggcctggccctattcaggaaccaccaatctagctaccagacgcgcctcaacgctttgagagaggtgcagcctgtcgagcttcccaactgtaacttggtaaaaggcattgagaccgggtccgaagatttggaaatcctgcctaacggcctggctttcatttcctcaggcctgaaatatccggggattaagtctttcaaccccaactctcccggaaaaatactgctgatggacctgaacgaagaggatccaacagtcctggaactgggtattacaggatccaaatttgatgtatcttccttcaacccgcatgggattagcaccttcaccgacgaggacaatgcgatgtacctgctggtcgtgaaccatcctgatgctaagtctacagtggaactctttaagtttcaggaagaggagaaatcccttttacacctgaagaccatccgacataagctgctgcccaatttgaacgatatcgtggccgtgggcccagagcatttctacgggacaaacgaccactatttcctagacccctatttgcagtcctgggaaatgtatttggggctggcttggagctatgtcgtttattattccccatctgaggtacgcgtcgtcgccgaaggcttcgattttgcaaacgggatcaatatctctccagacggcaagtatgtctacatcgccgagttgttggcccataaaattcacgtctacgaaaaacacgctaactggactttaaccccattgaagagcctcgattttaacactctcgtggacaacatcagtgttgatccagagaccggagacctgtgggtcggctgccatcccaacggcatgaagattttcttttacgactcagagaatccacctgcaagcgaggtgctgcgaattcaaaatattctgactgaggagccaaaagttacccaggtctacgcggaaaatggcacagtacttcaggggtcaaccgtcgctagcgtgtataaggggaaactgctgatagggactgtatttcacaaggctctgtattgtgaactgtag

SEQ ID NO: 184505 - DNA, 1263 bp, synthetic construct
  misc_feature 1..1263: note = Description of Artificial Sequence: Synthetic coding sequence
  source 1..1263: mol_type = other DNA
atggacctgatccccaacttcgccatggagacctgggtgctggtggctaccagcctcgtgctactgtatatttacgggactcatagccacaaattgtttaagaagctgggcatcccaggcccaactccactgcccttccttggcacgattctgttttatctccgggggttgtggaatttcgaccgtgagtgtaacgaaaagtatggggaaatgtggggcctgtacgagggacagcagcctatgctggtgattatggaccccgacatgatcaagaccgtcctggtgaaagagtgttactctgtgtttactaatcaaatgcccttaggaccaatgggcttcttaaagtcagctctctcctttgctgaggacgaggaatggaagagaattcgtactctgttgtcgccagccttcacttcagtgaagttcaaagagatggtacctattatttctcagtgcggcgacatgttggtccggagtctgagacaggaggcagaaaattccaagtctatcaacctgaaagatttcttcggggcatatactatggacgtcatcacagggacactgttcggggtgaatctggactcattgaacaacccgcaggatccgttcctgaagaacatgaaaaaactgctgaagcttgatttcctggacccctttctgctgctcattagcctgttcccatttttaacacccgtgtttgaggccctgaatatcggcttgtttcccaaagatgtaacccatttcctgaagaactccattgaacggatgaaagagtctcgtctgaaagataagcagaagcacagagtggactttttccagcagatgattgattcacagaatagtaaggagaccaagtcacataaggctttatccgacctggagctcgttgcccagagcattataatcattttcgccgcttacgataccacaagtacgacattgcccttcatcatgtacgagctagcaacccatccggacgtgcagcagaaactgcaagaggaaatagatgccgttctgcctaataaggctccggtcacctatgacgccctggtgcaaatggaatatctggatatggtggtgaacgagaccttgaggttgtttccagtggtaagtagagtgacccgcgtatgtaaaaaagacatcgaaataaacggggtgttcatcccaaaaggcctagccgtcatggtgcccatctacgccttacaccatgacccaaaatattggaccgagcccgaaaagttctgtcccgagagaagccactag

SEQ ID NO: 184506 - DNA, 843 bp, synthetic construct
  misc_feature 1..843: note = Description of Artificial Sequence: Synthetic coding sequence
  source 1..843: mol_type = other DNA
atgaacctggagaccggcaacggcccccaccacttccccatgtggcggtatgtcggcgagaaacccgaagcgggctcccgtgaacagcaagtgcatcaactggagagatttctgtgggggctccaccacgggtgtaaccattggcatatcatttggtccgagctggggttctctcagcagagtacccggtcacttagcgagaaatacgaagaagcgttcaaaattggcttcttcggaagtctgtttactctgaacatacaatcactggccgtgctgcccaggcctgagtgtatggttaggagcggtctgactgagacctccacaagttgggtacgggtgatcctacttccgcagccaccagaggagctgggactgcaacatcgcgtggactttttccagcagatgattgatagtcaaaatagtaaagagaccaagagtcataaggccttgagcgacctggagctcgttgcccagagtattattatcattttcgctgcctatgacactacaagcaccactttacccttcatcatgtacgagctagccacccatccagacgttcagcagaagttacaggaggagatcgatgcagtcctgcccaataaagctccagttacctacgacgccctggttcagatggagtacttggacatggtggtaaatgaaactctccgcctcttcccggtggtgtccagagtcacacgagtgtgtaagaaggacatagaaatcaatggggttttcatccccaagggcctagccgtcatggtcccgatctatgcactgcaccatgatcctaagtactggacagaacctgagaagttttgcccagagcgtagtcactag

SEQ ID NO: 184507 - DNA, 1512 bp, synthetic construct
  misc_feature 1..1512: note = Description of Artificial Sequence: Synthetic coding sequence
  source 1..1512: mol_type = other DNA
atggacctgatccccaacttcgccatggagacctgggtgctggtggctacctcgctggttctgctgtatatttacggaacccattcacacaagctgttcaaaaaactcgggatcccaggcccaacccctctgccattcttaggaaccattcttttttatctgaggggattgtggaactttgaccgcgagtgtaatgagaaatacggagaaatgtggggcctgtacgagggacagcagccaatgttagttatcatggaccccgatatgatcaaaaccgtcttggtaaaagagtgttattctgtattcacgaaccagatgccgctcgggccaatggggtttctgaagtccgcccttagctttgccgaggacgaggaatggaagcgtatcagaaccctcctgtcaccagcgttcaccagtgtcaagttcaaagaaatggttcctattatatcacagtgtggggacatgctcgtacgctctctgcggcaggaggccgagaattctaagtcgataaatctgaaagactttttcggcgcctacaccatggacgtaatcacaggaacgctgtttggtgtcaacttggattctttaaacaatccacaggaccccttcctaaagaatatgaagaaattgctgaagttagattttttggacccgtttctcctgctcatctctttgttcccttttctaacaccagtattcgaggcccttaacatcggtcttttcccaaaagatgtgacccacttcctgaaaaatagtattgaacgtatgaaggagtccaggctgaaggataaacagaagcatagagtggatttctttcagcaaatgattgacagccagaattcgaaggaaaccaaatctcataaagcactttccgacctcgaacttgtggcccagagcattatcatcatctttgcagcatacgataccacatcaacaactctaccttttatcatgtacgagctggcaacgcatcctgacgtacagcaaaagctccaggaagaaatagatgccgtgctacctaataaggccccggtgacgtacgatgcccttgtgcagatggaatatttagatatggtagtgaacgagacccttaggctgtttccagtcgtgagcagggtgacccgcgtgtgcaaaaaggacatcgaaatcaatggcgtgtttatccctaaagggttggctgttatggtgcctatatatgcattgcatcatgaccctaagtattggaccgagccagaaaaattttgtccagagcgcttctccaagaagaacaaggatagtatcgatctgtataggtacatcccgtttggcgctggcccccggaattgtataggaatgagatttgcgctcacaaatatcaaacttgccgtcattcgtgcacttcaaaatttttcgttcaaaccgtgtaaagagacccagatcccattaaaattggacaacctccccatactccagccggagaagccaattgtgctgaaggttcatttgcgggacgggattacatctggaccttag

SEQ ID NO: 184508 - DNA, 381 bp, synthetic construct
  misc_feature 1..381: note = Description of Artificial Sequence: Synthetic coding sequence
  source 1..381: mol_type = other DNA
atggacctgatccccaacttcgccatggagacctgggtgctggtggcaacttccctggtgttgctctacatctacgggacccattcacataaacttttcaagaagctgggaatccctgggccaacccctctgcccttcctcgggacaatcctgttttatctgcgcggtctctggaattttgatcgagaatgcaatgagaaatttctgtgggggctgcatcatggatgtaaccactggcacatcatctggtccgaattgggctttagtcagcaaagtactcgctcattatcagagaagtacgaggaggccttcaagatcggattctttggaagccttttcacattgaacatcacattgtcaatctcttacccttctttctag

SEQ ID NO: 184509 - DNA, 225 bp, synthetic construct
  misc_feature 1..225: note = Description of Artificial Sequence: Synthetic coding sequence
  source 1..225: mol_type = other DNA
atggacctgatccccaacttcgccatggagacctgggtgctggtggccacaagcctggtgctgttatacatatacggaacacattcccacaaactcttcaagaagctggggataccaggtcccacgcccctgcctttcttgggaacgatactgttttatcttcgaggtctatggaatttcgaccgcgagtgtaatgaaaagtacggggaaatgtggggaccttag

SEQ ID NO: 184510 - DNA, 435 bp, synthetic construct
  misc_feature 1..435: note = Description of Artificial Sequence: Synthetic coding sequence
  source 1..435: mol_type = other DNA
atgcccaaggtgaagcggagccggaaggccccccccgacggctgggaactcatcgagccgactctagatgaactcgatcagaagatgcgggaagctgagacggagccgcacgaaggtaaacggaaagtggagtcactttggccaattttcagaatccaccatcagaaaacaaggtatatattcgatctgttctataaacggaaggctatctcgcgagagttatacgaatattgtattaaagaagggtacgccgacaagaacctgatcgccaagtggaaaaagcaggggtatgaaaacttgtgctgcttgaggtgcatccagacccgtgacactaactttggtacaaactgcatctgccgggtgccgaagtcaaaactagaggtggggcgcataatcgaatgcacgcactgtggatgtcgcgggtgttccggctag

SEQ ID NO: 184511 - DNA, 120 bp, synthetic construct
  misc_feature 1..120: note = Description of Artificial Sequence: Synthetic coding sequence
  source 1..120: mol_type = other DNA
atggacctgatccccaacctggccgtggagacctggctgctgctggcagtgtcactcgttttgctgtatctcatgcgggtgccgaaaagcgccaagtctccactgacaaaacagacctag

SEQ ID NO: 184512 - DNA, 1479 bp, synthetic construct
  misc_feature 1..1479: note = Description of Artificial Sequence: Synthetic coding sequence
  source 1..1479: mol_type = other DNA
atgcagctgctgatgctggagctgctgctgctgttcatcgtgtacggaacacgtacccacggcctgtttaagcggcttgggatcccaggcccgacaccattgccccttctcggcaatgtcctaagttacagacagggactctggaagtttgataccgaatgttacaaaaagtatggtaagatgtggggaacttatgaagggcagttaccagtactcgcaattaccgatccagacgtgattcggacggtgcttgtgaaggaatgctattccgtctttactaaccgacggagccttgggcccgtcggctttatgaaatccgccatttccttggccgaagatgaagaatggaagcgcattcgctctttactatcccctacgttcacatcaggaaagctgaaagagatgttccctatcatagcccagtatggggatgtactggtcagaaatctgcggcgggaggcagaaaaggggaaacccgtaaccctgaaggacattttcggcgcatattccatggatgtgatcaccggaactagtttcggtgttaacatcgacagtctgaacaatccacaggatcccttcgtggaatcgactaaaaaattcctgaaatttggcttcctggatccactcttcctgtccataatcctgtttccgtttctcactcccgtctttgaagcactcaacgttagtttattccctaaagacactattaatttcctgagcaagtccgtcaacagaatgaagaagagccggctcaacgacaagcagaaacacagactggattttttacagctcatgatcgatagccaaaactccaaagaaaccgagtcacataaggccctgagtgatctggagctggccgcccagtccattatttttatcttcgccggctacgaaactacatcatcagtcctcagctttaccctctacgagctggccacacacccagatgtgcagcagaagctgcagaaggagattgatgctgtcctgcctaacaaagctcctcctacgtacgacgccgtggtccaaatggaatacctggatatggtagtgaacgagaccctgagactgttccccgtcgcgatcaggctggagagaacttgcaaaaaagatgtcgagatcaatggcgtctttatcccaaaaggcagtatggtggtcatcccaacttatgccctgcaccatgatccgaagtattggacagagccagaggagttcagacccgagagattttctaagaagaaggattccatagatccttatatctacacaccatttggtacaggcccgcggaattgtatagggatgcgatttgcactcatgaatatgaaacttgctttaatcagagtcctacagaatttcagcttcaagccgtgtaaggaaacgcaaattccactcaaactcgacacccaaggcctccttcaaccagaaaaacctatcgtcctcaaggtcgactccagggacggaacactgtccggcgagtag

SEQ ID NO: 184513 - DNA, 1602 bp, synthetic construct
  misc_feature 1..1602: note = Description of Artificial Sequence: Synthetic coding sequence
  source 1..1602: mol_type = other DNA
atggacctgatccccaacctggccgtggagacctggctgctgctggccgtttctctgattttgctctacctttacggcacaaggacacatggcctcttcaagaaacttggaatacctgggccaacgcccctccccttcctcgggaatgccctgagtttccggaagggttactggacttttgatatggagtgctacaaaaaatacagaaaagtctgggggatttacgattgccagcagcccatgctcgcaataaccgatcccgacatgattaagaccgtcctggtaaaggagtgttattctgtgttcacgaatcgaagaccatttgggcctgtggggttcatgaagaacgccatctctattgccgaggacgaagagtggaagcgcatacgctctttgctcagtccaactttcacctctggaaaactgaaagagatggtcccgattatagcccaatatggagacgtgctggtcaggaacctgcgaagggaagccgagacgggcaaacccgtcacactaaagcatgtcttcggagcttacagtatggacgtgatcacctcaacgtcattcggggtcagcatcgattctctgaacaatcctcaagatccttttgtcgaaaacactaaaaaactgctgcgcttcaatcctttggaccctttcgtgcttagcattaaggttttccccttcctgacaccaattctagaggcgcttaatatcacggtcttccctcgcaaagtcatctcgttcctcactaaatcggtgaagcagatcaaagaaggccgcttgaaagagacccagaagcatagggtggacttcctgcagttaatgatcgatagccagaatagtaaagattccgagactcataaagctctcagtgatctggagcttatggcacaaagcataattttcatttttgctggctacgaaaccacctcctcagtgctctcctttatcatttacgagctggcgacgcaccccgatgtgcagcaaaaggtgcagaaggagatcgacacggtgcttcctaataaagcacccccaacctacgataccgtgctgcagcttgagtacctggacatggtggtgaacgagaccctgcgcctttttcccgtggcgatgcgcctcgagcgggtgtgcaagaaggacgtggagattaatgggatgttcatccccaaaggcgtggtagttatgatccccagttatgtgttacatcatgacccgaaatactggcgggaaccggaaaagttcctgcctgagcggttttctaaaaaaaataaagacaacattgacccctatatttacaccccatttggctcaggacctaggaactgtattggcatgcggttcgctctggtgaatatgaaactcgctctagtccgcgtcctccagaatttcagtttcaagccatgcaaagagacacagataccactgaaactacggtttggggggcttctactcactgagaaacctatcgtactaaaggcagagtcgagagacgagaccttcgtcgatatggaacctattcacatggacttccttcgatcactcgcattccagggaccacatttgtgctttttctgggagctgctgtgccccacaattcggtag

SEQ ID NO: 184514 - DNA, 1512 bp, synthetic construct
  misc_feature 1..1512: note = Description of Artificial Sequence: Synthetic coding sequence
  source 1..1512: mol_type = other DNA
atggacctgatccccaacctggccgtggagacctggctgctgctggcagtcagtcttatcctgctgtatctttacggaacccgcactcatggattgttcaagaagcttggtatcccgggtcctacccccctgcccttcctgggcaatgcgctgtcttttaggaaaggctactggacatttgatatggaatgttacaagaaataccgtaaggtgtggggcatatacgactgccagcaaccaatgctggcgattaccgatccagacatgattaaaaccgtcctggtcaaggagtgctatagcgtgtttactaaccggagacccttcggcccagttggtttcatgaaaaatgccattagcatagctgaagatgaagaatggaaaagaatccgctcactcttgtctccaacctttacatctggaaagcttaaggagatggtccctatcatcgcacagtacggcgacgtgttggttaggaacttgaggagagaagctgaaacagggaagcccgtcactctcaaacacgtgttcggagcctattctatggatgttatcacctccacatctttcggcgtgtcaatcgactcattgaacaacccccaggatccattcgtggagaacaccaaaaaactcctccgctttaaccccttagacccattcgtgctctcaattaaggtgttccccttcctcaccccaattttagaagcgcttaacattactgtcttccctcgtaaggtcatttcctttctcacaaagtccgtcaaacaaattaaggagggtaggctgaaggagacacagaaacatagagttgattttctccagctgatgatcgatagccagaactccaaagattcggaaacacacaaagccctgtcggacttagaactgatggcccagagtatcatctttatcttcgcaggctacgaaaccaccagctctgtgctcagttttatcatttatgagctggccacccaccccgacgtccagcaaaaggttcaaaaggagattgataccgtgcttccaaacaaggccccgcccacctacgataccgttctgcagctcgagtacctggacatggtggtgaacgagaccttgcgcctgttccccgtcgccatgaggttggagagggtatgtaaaaaggacgtcgagatcaatgggatgtttattcccaaaggtgttgtggtgatgattccgtcttatgtcctgcaccatgaccctaagtactggagagaaccagaaaagttcctgccagagcggttttcgaaaaagaataaggataacatcgacccatatatctatacgcctttcggttctggtcctcgtaattgcatcggaatgaggttcgcattggtgaatatgaagttggccctcgttagagtcctccagaattttagcttcaagccttgcaaagagacccagatcccacttaagctgaggttcggcggcttgctcctgaccgagaagcccattgtactgaaagcagagtctagggacgagacggtgtcaggagcctag

SEQ ID NO: 184515 - DNA, 1410 bp, synthetic construct
  misc_feature 1..1410: note = Description of Artificial Sequence: Synthetic coding sequence
  source 1..1410: mol_type = other DNA
atggagctgatcagccccaccgtgatcatcatcctgggctgcctggcactattccttctgttgcagagaaaaaatctgcggcgtcccccatgtatcaagggctggattccctggatcggcgtgggtttcgaattcgggaaggcccccctggaattcatcgaaaaggcacgaatcaaatacggtccaatcttcaccgtgtttgccatgggcaatagaatgacattcgtgacagaggaagagggaattaacgtgttcctgaagagcaagaaggtggactttgagctcgctgttcagaatattgtctatcggactgccagcattccaaaaaatgttttcctggccctccatgaaaagctgtacattatgctcaaaggcaagatggggaccgtcaatctgcatcagttcaccggacagttgactgaggaacttcatgagcaactggagaatctgggcacacatggcacaatggatttgaataatctcgtcaggcacctcttgtatccagttaccgtgaacatgttgttcaacaaatccctgtttagcacaaacaaaaagaaaatcaaagagttccaccagtactttcaggtttacgacgaggattttgaatatgggtcccagctccccgagtgtctgttgcgcaactggtcaaagtctaagaagtggttccttgaactgtttgaaaagaatattcctgatattaaagcatgcaaaagcgctaaggataactctatgaccttgttacaggccactctggatattgtggagaccgaaacgtccaaggagaacagcccaaactacggcctcctgctcctgtgggcttctctttccaacgccgtcccagtggccttctggactctggcctacgtgctgtcccatccggacattcacaaggccatcatggaaggaatatcatccgtgttcggcaaggcaggtaaggataagattaaggtgtccgaggacgacctggagaatctactgctgattaagtggtgcgtgttggagacaattcgcctgaaagcaccgggggtgatcactcgtaaggtcgtcaagcctgtggaaattttaaactatataattcccagcggggatctgctaatgctgtcccccttctggcttcatcgcaaccctaagtactttccggagccagaactgtttaaacctgaaaggtggaagaaggccaatctggaaaagcacagcttcctcgactgtttcatggcttttgggagtgggaagttccaatgtcctgccagatggtttgctctgctcgaggtgcagatgtgtatcatcctaatcttgtacaaatacgattgttctctgctggaccctctgcctaagcagagttacttgcatctggttggggtcccacagcccgaaggccaatgtcgaatcgaatataagcagagaatttag

SEQ ID NO: 184516 - DNA, 1560 bp, synthetic construct
  misc_feature 1..1560: note = Description of Artificial Sequence: Synthetic coding sequence
  source 1..1560: mol_type = other DNA
atgagcgtgagcgtgctgagccccagccggctgctgggcgacgtgagtggtatacttcaggcagcttcactgctcattctgttactcctgttaatcaaagcagtgcagctgtatctccacaggcagtggctgctgaaagcgctgcagcaattcccttgcccaccatcacactggctgttcgggcacatccaggagctccagcaggatcaggagctgcagagaattcagaagtgggtcgagacttttccctcagcatgccctcactggctctggggtggaaaggtgcgtgttcaactctacgacccagactacatgaaagtaattcttggccgctctgaccccaaatcacacggctcatatcggttcctcgccccctggataggatatggtttgctgctgttaaatggccaaacgtggtttcaacatcgacggatgcttacaccagctttccactatgacatcctaaagccctatgtggggctgatggccgactcagttagagttatgctggataagtgggaagaactgctgggccaagattcaccgctggaggtattccagcatgtcagcctgatgacgctggacacgatcatgaagtgcgccttctctcaccagggcagtattcaggtggacagaaacagtcaatcttacatacaagccatctccgatctgaataacctggtgttttctagagtccgaaacgccttccatcagaatgacacaatttattccttgacctccgccggacgttggactcatcgggcatgtcagctcgcccaccaacatacagatcaggtaattcaattacgaaaagctcaactgcagaaagagggggaactggagaagatcaaacggaaacggcacctggattttttagacattctgctgctggctaagatggagaacggctccatcctgagcgacaaggatctccgagctgaggtggataccttcatgttcgagggacacgataccaccgcaagcggcatctcctggatcctatatgccctggcaacgcatcctaaacatcaagagcgttgcagggaagaaattcattctttactcggagatggcgcgtcgattacctggaatcatctggatcagatgccttacacaaccatgtgtatcaaggaggcccttaggttatacccacccgtcccaggcattggcagggagctcagcacccccgtcacttttccagatgggcgatctttaccaaaaggaatcatggttctgctcagcatttacgggctccatcataaccccaaggtgtggcctaatcctgaagtatttgacccattccgattcgctccaggatcggcacagcacagtcacgctttcttgccgttttcagggggatccagaaactgcatcgggaaacagttcgcaatgaacgaattaaaggtggcaacagctctgacattgttgcgcttcgagctgctccctgatccaacaagaatacctatcccgatcgcccgcctcgtactgaaatcgaaaaacgggattcacctgagattaagaaggcttcctaacccatgtgaagacaaagaccagctatag

SEQ ID NO: 184517 - DNA, 1563 bp, synthetic construct
  misc_feature 1..1563: note = Description of Artificial Sequence: Synthetic coding sequence
  source 1..1563: mol_type = other DNA
atgagcgtgagcgtgctgagccccagccggctgctgggcgacgtgtccggaatcctgcaggcagctagtttactgatactgctgttgctcctgattaaggccgttcagctctacctgcaccgtcagtggttgctaaaggcccttcagcagtttccttgccctccttcacattggcttttcgggcacatccaggaattgcagcaggaccaggagctccagaggatccagaaatgggttgagaccttccctagcgcctgccctcattggctctggggaggcaaggttagggttcaactttacgaccctgattacatgaaggtcattctgggcaggagtgaccctaagtcccacggcagctaccgctttcttgctccatggattgggtacggccttttgctactgaacggtcaaacctggtttcagcatcggcggatgcttactcccgcattccactacgatattctcaaaccttacgtggggctgatggctgattctgtgagagtcatgctggacaagtgggaggagcttttaggtcaggatagccccctggaagtctttcagcacgtttccctgatgacattggatactattatgaagtgcgcgttcagccatcagggctccattcaagtcgacagaaactctcaatcatacattcaggcgatctctgatctgaataacctggtgttcagccgggtgaggaatgcctttcatcagaacgatactatatatagccttacatctgcaggacgctggactcatagggcttgccagctcgcccatcagcataccggtgaccaggttatccaactgaggaaagcccagctgcagaaggaaggagaactcgagaagattaagcggaaaagacatctggatttcctggatattctcctgctggccaagatggaaaatggctctattctttccgacaaagaccttagggctgaagtcgacacttttatgttcgaaggccacgataccacagccagcggcatctcatggattctctacgcccttgctacccaccctaagcaccaagaacgctgtcgcgaagagatacattctcttctgggagatggtgcaagtataacctggaatcatcttgatcaaatgccgtataccactatgtgcataaaagaggccctgcgcctttatcctccagtgcccggtattggacgtgaactaagtactcctgtaacctttcccgatgggcggagtctgccaaaaggcattatggtactcctcagtatctatggtctacatcataatcctaaggtatggcctaatcctgaagtgtttgacccttttagattcgcccctggctccgcccagcattctcatgccttcctgcctttcagcggtgggtctcgtaactgcatcggcaaacagtttgccatgaatgagctcaaggtggcaaccgcactcaccctcctgcgcttcgaactacttcctgaccccacgcgtatcccaattccgatagcgagactggtgcttaagagcaaaaatggcattcatctgcgcttgcggagactgcctaatccctgtgaggacaaggaccagctttag

SEQ ID NO: 184518 - DNA, 1368 bp, synthetic construct
  misc_feature 1..1368: note = Description of Artificial Sequence: Synthetic coding sequence
  source 1..1368: mol_type = other DNA
atgagcgtgagcgtgctgagccccagccggctgctgggcgacgtgtctggaatccttcaggccgctagcctgttgatcctgctgctgttgctgatcaaggccgtgcagctgtacctccacaggcaatggctgctgaaggctctgcagcaatttccctgcccgccatctcactggctcttcggccatattcaggaactgcaacaggaccaagagttgcagcgaatccagaagtgggtagagaccttccctagcgcatgtcctcattggctctgggggggtaaagtgcgcgtacagttgtacgaccctgactatatgaaggtcatcctgggcagatccgatccaaagagtcacggcagctacagatttttagccccgtggatcgggtatggattgttgcttctaaatggccagacatggttccagcataggagaatgctgacacccgcatttcactacgacatattgaagccctacgttggtctgatggccgactccgtacgcgtgatgctggataaatgggaggaactgctcggacaggattcaccacttgaagtgtttcagcatgtaagcctgatgacgctggacaccatcatgaagtgcgctttctcccatcagggctctatacaggttgacaggaacagtcaaagctacattcaagcaattagtgacctgaataatcttgtgttctctcgggtcagaaatgcttttcatcagaatgacaccatttattcattaacgtctgctggcaggtggacccaccgcgcctgtcaattggcccaccagcacaccgatcaagtgattcaactgaggaaggcacaactacagaaagaaggcgaactggaaaagatcaaacgtaaacgtcacctggactttctagatatcctacttttggctaaaatggaaaatggctccatcctgagtgacaaggaccttagggctgaggtcgatactttcatgttcgagggtcacgataccaccgcctcaggcattagttggatcctgtacgcactggctacccaccctaaacatcaggaacgctgccgcgaagagatccatagtctgctcggcgatggagcatccatcacctggaaccacctagatcagatgccctacaccaccatgtgcatcaaggaagcactacgcctgtatccccctgtccccggcataggccgcgagctctcaacacccgtgactttcccagatgggcgttcactgcccaagggaatcatggtactgctgagcatctacgggttgcatcacaatcctaaggtctggcccaacccagaggtgtttgatccatttcgctttgccccagggtccgcgcagcattcacatgcttttctcccatttagcgggggctcccggtag

SEQ ID NO: 184519 - DNA, 474 bp, synthetic construct
  misc_feature 1..474: note = Description of Artificial Sequence: Synthetic coding sequence
  source 1..474: mol_type = other DNA
atgaaggtgatcctgggccggagcgaccccaagagccacggcagctatcggttcctggctccttggattgggtacggtcttcttctgctcaatggccagacttggttccagcaccgaaggatgctgacacctgcctttcattacgacatcttgaagccctacgtcggcctaatggcagactccgtacgagtgatgctggataaatgggaggagctgttaggtcaagactccccgctggaagtctttcagcacgtgtcactaatgacacttgacactatcatgaagtgcgcgttcagtcatcagggatccattcaggtggacagaccgtccgaccctaccgaagaggggagtaccactgagggcggtggggcgggagaagatcaggaagaggaggcgtttggcttcagtggctatccaccactgggtcagaatggcgagtgggaacatttagtcaggcagggcccgccctgctag

SEQ ID NO: 184520 - DNA, 1575 bp, synthetic construct
  misc_feature 1..1575: note = Description of Artificial Sequence: Synthetic coding sequence
  source 1..1575: mol_type = other DNA
atgccccagctgagcctgagctggctgggcctgggccccgtggccgcgagtccatggctcctgttgcttctggtgggtggatcttggctgctggcacgcgtgctagcttggacatacactttttacgacaactgcagaaggctccagtgcttcccccagccaccaaaacagaactggttttggggacatcagggcttagtgacccctacagaggaaggcatgaaaaccctcacacagctggttacaacataccctcagggctttaagctttggctgggtcctacctttcccctgttaatcctgtgtcatcctgacataatccgacctattacttcagcaagcgccgctgtggcacctaaagacatgatattttacggcttcctgaaaccctggttaggggacgggttgctcctgtcaggaggcgacaagtggagtcgccaccggcgcatgctgaccccggcatttcacttcaacatcctcaaaccgtacatgaaaattttcaacaagagtgtaaacatcatgcacgataaatggcagagacttgcttctgaggggagcgcacgcttagatatgttcgaacacatcagcctgatgacactggacagcctgcagaagtgcgtcttttcttttgagagtaactgtcaagagaagccatctgagtacatcgccgccatccttgagctgagcgctttcgtagaaaagcggaatcagcagatcctgctgcatactgattttctctactacctcactcctgatggacagagatttagaagagcatgtcacctggtacacgattttactgatgctgtaattcaggagagaagatgtacgttgcccacacagggtatagatgacttcctgaagaataaagccaagtccaaaacacttgacttcattgacgtcttactactgtccaaggacgaggacggaaaggagctgtcagatgaggacatccgagccgaagcagacacatttatgttcgaagggcacgataccactgcctccggcctgtcttgggtcctctaccacctcgctaaacatccagaataccaggaacagtgtagacaggaagttcaagagctgctcaaggaccgcgaaccaattgaaatcgagtgggacgatctcgctcagctacctttcctcaccatgtgcatcaaggagtcccttcggctgcaccctccagttcctgtgataagcaggtgctgcacacaggattttgttttacctgatgggagagtgatcccaaaagggattgtgtgccttatcaacatcattggcattcattacaaccctacagtgtggcctgacccggaggtctacgatcctttcaggtttgatcaggagaacatcaaggagcggagcccgttggcctttatccctttctccgccgggcctcgcaactgtatcggtcaggctttcgcaatggctgaaatgaaggtcgtacttgccctgaccttgctgcacttccgtatcttaccaactcacactgagccccggagaaaacctgaattgatcctgcgcgcagagggcgggctgtggctgagagttgaaccactgggtgccaactcgcaatag

SEQ ID NO: 184521 - DNA, 1365 bp, synthetic construct
  misc_feature 1..1365: note = Description of Artificial Sequence: Synthetic coding sequence
  source 1..1365: mol_type = other DNA
atgccccagctgagcctgagctggctgggcctgggccccgtggccgcctccccctggctgctcttgctgctcgtgggcggcagttggcttctcgcccgcgtgctcgcttggacatataccttctacgacaactgtcggcggcttcagtgctttccacagcctccaaaacaaaattggttctggggccaccagggtttagtgactcctaccgaagaggggatgaaaaccttaacgcaactggttaccacataccctcaggggttcaaactgtggctgggccctacctttccgctcctaattctgtgccacccggacatcattagacctattacttctgcctctgccgctgttgccccaaaggatatgattttctacggatttctgaaaccatggctcggcgatggtctcctgctttccggaggagacaagtggtcacgccaccgcagaatgctcaccccagcttttcattttaacattctgaaaccgtatatgaaaatttttaacaagtctgtgaatattatgcacgacaagtggcagcggttagcgtccgaaggctccgcaagattagatatgtttgagcatatctccctaatgactctggactccctccaaaaatgtgtgttcagctttgaaagcaactgccaagagaaaccttctgaatatattgcagcaatcttggaattgtccgccttcgtggagaagagaaaccaacagatcctgttacatactgacttcctgtactatttgacaccggacggtcagagatttagaagggcctgtcacctggttcacgatttcacggatgccgtgatccaggaacggcgttgtacacttcctacccagggcattgacgacttcctgaagaacaaggctaaaagtaaaaccttggacttcatcgatgtcctgctgctaagtaaagatgaggatgggaaagaactctccgacgaggatatcagagctgaggccgatacctttatgtttgaaggccatgacaccactgctagtgggctgtcctgggtcctgtaccacttggcaaaacaccctgaatatcaagaacagtgcagacaggaggtccaggaactgttaaaggatcgggagcccatcgagatagagtgggatgacctggcccagctgccatttctgactatgtgcattaaagagagcctcagactgcatcccccagtacccgtgatctcccgctgttgcactcaggatttcgtgcttccagatggcagagttattccaaaaggactccggccgttaccattcaggcccagagagcaccagggtgaggtgactagtggtttctatagccttcttggtagagcccagaaacttcacagggccggggtgaggcacggatag

SEQ ID NO: 184522 - DNA, 1575 bp, synthetic construct
  misc_feature 1..1575: note = Description of Artificial Sequence: Synthetic coding sequence
  source 1..1575: mol_type = other DNA
atgccccagctgagcctgagctggctgggcctgggccccgtggccgcttcaccctggttactgctgctgctagttggaggatcttggctcctcgcacgcgtgcttgcttggacgtatacattttatgacaactgtaggcgactgcaatgttttccccagccgcctaagcaaaactggttttggggccaccagggtctcgtgactcctactgaagaaggtatgaaaactctgacacagctcgtcactacctaccctcaagggttcaaactatggcttggcccgacatttcccctgctgatcctatgccatcccgatattattcgccctattacctctgcaagcgctgcggtagcccccaaggacatgatcttttacgggttcctgaagccctggttgggtgacgggcttctgttgagcggcggcgacaagtggagcaggcacagaaggatgttaacccccgcgtttcacttcaatattctgaagccatacatgaagatctttaacaagtctgtgaatattatgcacgacaaatggcaaaggttggcaagcgaaggtagtgccagactcgatatgttcgagcatatttccttgatgacgctagactccctgcagaagtgtgttttctccttcgagagcaactgccaggaaaaaccctcagagtatatagctgccatccttgagctttcagcctttgttgagaaacggaaccaacagatactcctgcacacagactttctctattacctgacccccgacggccagaggtttagacgggcctgccatctagttcacgatttcacagatgcagtgatccaggagcgaagatgtacccttcctacgcagggaatcgacgactttttgaagaacaaggcaaagtccaaaacacttgattttatagacgtcttactgctgtcgaaggatgaagacggaaaagaactgtctgatgaagatattcgggcggaggctgataccttcatgtttgagggccacgataccaccgctagcggactgtcatgggtactgtaccacctggcaaagcatcccgaatatcaagaacagtgtcgacaagaggtccaagagcttttgaaagaccgagagcctattgaaatcgaatgggacgatctcgcgcagcttccgtttctgactatgtgtataaaagaaagcttgcggcttcacccaccagtacccgtaatcagtcgctgttgtacccaagatttcgttctcccagatggccgtgtaattcccaagggcatagtttgcctgatcaacatcatcggtatacactataatccgacagtctggcctgaccctgaggtgtatgatccctttcgctttgaccaggagaatataaaagagagatcccctctagccttcattcccttttctgccggtcctcgaaactgtatcggccaggcctttgcaatggccgaaatgaaagtagtactcgccctgacccttctccacttcagaatactgcctacacacacggagcccaggaggaagccggaactaatccttagggccgagggtggattgtggcttagagtggagccattgggggccaattcacagtag

SEQ ID NO: 184523 - DNA, 1575 bp, synthetic construct
  misc_feature 1..1575: note = Description of Artificial Sequence: Synthetic coding sequence
  source 1..1575: mol_type = other DNA
atgagcctgctgagcctgccctggctgggcctgcggcccgtggccacctctccttggctgctccttttgctcgttgttgggagctggctgctagccagaatcctcgcttggacatatgctttctacaacaactgtagaaggctgcaatgttttccacaaccccctaaacggaactggttttggggccatctaggcttaatcacccccacagaggaaggcctcaagaactctactcaaatgagtgccacgtattcccagggattcacaatatggctcggcccaattattccatttattgtgctatgccaccccgacaccattaggagtattactaatgcgtctgcggcaattgcccccaaggacaatcttttcattcgttttctgaagccatggctgggtgagggcatactgctgtccggtggagacaaatggagccgtcaccgacgaatgttaacaccagcctttcattttaatatccttaagtcttacattactattttcaacaagtccgcaaatattatgcttgacaagtggcagcatctagcctctgaaggctcctcctgccttgatatgtttgagcatatctccttgatgacgctggacagtctccagaaatgtatcttctccttcgactcccattgtcaggagaggccatccgaatacatcgctaccatactggaactgtcagcactggtagaaaagagaagtcaacacatcctgcagcatatggattttttgtactacttaagtcacgacggtcgcagattccaccgcgcgtgtagacttgtgcacgactttacagacgccgtgatacgagagaggcgccggactctgcctacacagggaatcgacgactttttcaaagataaggccaagtcaaagaccctggactttatcgacgtgctattactgagcaaagatgaggacggcaaggcgctatccgacgaggacattcgcgccgaggccgatacatttatgtttggcggccacgacaccactgcctctggtctgtcttgggtgttgtataacctggccagacaccccgagtatcaggagagatgtcggcaggaagtccaggagctgctcaaggaccgggatcctaaagaaatagagtgggatgatctggctcaactgcctttcctcaccatgtgcgtgaaagaaagcttgcgcctgcacccccctgccccatttatctcccggtgttgcacgcaggacatagtgctgccagacggcagagtgatccccaaagggataacctgtctgatcgatattattggggtgcaccataatcctaccgtgtggcctgatccggaagtctacgatccattccgattcgatccggaaaattctaaaggccgtagtcccctggcattcatacccttttctgctgggcccaggaactgcattgggcaggcctttgccatggccgagatgaaggttgtattagcacttatgctccttcacttcaggttcttgcccgaccacacagagccccggagaaagctggagctgatcatgcgtgccgagggcggactgtggttgcgcgttgagccccttaatgtgtccctccagtag

SEQ ID NO: 184524 - DNA, 1575 bp, synthetic construct
  misc_feature 1..1575: note = Description of Artificial Sequence: Synthetic coding sequence
  source 1..1575: mol_type = other DNA
atgagcctgctgagcctgccctggctgggcctgcggcccgtggccactagtccatggttgctgctccttcttgtagttgggagttggctcctggctagaattctagcctggacttacgctttttacaataattgtagacgtttacagtgcttcccgcagccccctaaaagaaactggttctgggggcacctaggtctgatcacacccactgaggaagggttgaaaaactcaacccagatgagtgctacctactcacaaggatttacaatttggctaggccccattatccctttcatcgtgctatgtcacccagacaccatcagatcaatcactaacgcctccgcagcaattgccccaaaggataatctttttatccgcttcttaaagccctggttgggcgaaggaatactcttgtccgggggagacaagtggagtaggcatcgcaggatgcttaccccagcctttcactttaacatcctcaagtcatatattacaatcttcaataaaagcgccaacatcatgttagacaagtggcaacacttggcctcagagggctcaagctgcctggacatgttcgaacacatcagcctgatgacacttgacagtctgcaaaagtgtatattttccttcgatagccattgccaggaaaggccaagcgaatatatagcaacaatccttgagctttcagccctggtggagaaaaggtcgcagcacatccttcagcatatggacttcctgtactatttatctcacgacggccgccggtttcaccgggcatgccgcctggtacacgacttcaccgatgccgttattcgtgagcggagacgcaccctgccaacccaaggaattgatgatttctttaaggacaaggctaagtccaaaaccttggactttatcgatgtgctccttctgagcaaagacgaagatggaaaggccctctccgatgaggacattcgggcagaagcggacaccttcatgttcggtggccacgacaccacggcttctgggctgagttgggtgctgtataacttagcacggcatcccgaatatcaagagagatgtcgccaggaggtgcaggaactcctgaaagatcgcgatcccaaagaaattgaatgggatgacctggcgcagttaccatttctgaccatgtgcgttaaagaatcccttcgactgcatccccctgcgccatttattagcaggtgctgtacacaagacattgtacttccagatggaagggtgatccctaaaggcattacttgcttgattgacataattggagtgcaccacaatcctaccgtgtggcccgaccccgaagtctacgacccatttcgattcgatcccgagaatagcaaaggaagaagtcctctggcctttattcctttttcagctgggcccaggaattgcatcggccaagcgttcgccatggcggaaatgaaagtggtgctggcactgatgttgctccactttcgcttcttgccggaccataccgagccccgtcgaaagctcgagctaatcatgagggctgagggggggctgtggctgcgggtggaaccattgaacgttagcctgcagtag

SEQ ID NO: 184525 - DNA, 1596 bp, synthetic construct
  misc_feature 1..1596: note = Description of Artificial Sequence: Synthetic coding sequence
  source 1..1596: mol_type = other DNA
atgctgcccatcaccgaccggctgctgcacctgctgggcctggagaaaaccgcattcagaatttatgccgtgagtaccctgttactatttctcctcttttttctcttccgccttttgttacggttccttaggttgtgcaggtcgttctatattacatgccggcgactgcggtgcttcccccaaccgcctcgccggaactggcttctggggcacttgggaatgtacctgcccaatgaagccggcctgcaggatgagaaaaaggttctggacaatatgcatcatgtgctgctcgtgtggatgggacctgtcctgcccctgctcgtgctggtgcatcccgattatatcaagccccttctgggagcaagcgcggccatcgcacccaaggacgatctattctacggctttctaaagccatggcttggggatgggcttctcttatcaaagggcgacaagtggagcagacataggcggttgctcacgccagcattccacttcgacattcttaagccttatatgaaaattttcaatcagagtgccgatattatgcatgccaaatggcgccatttggccgagggatccgccgtctctctggacatgtttgaacatatctctttgatgaccctggactcactgcagaaatgtgtgttttcttacaatagcaattgtcaggagaagatgtccgattatatttctgctatcattgagctgagtgccctctctgtgagaagacagtaccgattgcatcactatcttgacttcatttattaccggagtgccgatggcaggagattccgccaggcgtgtgacatggtgcatcactttactaccgaggttatccaggaacggcggcgggctctccgccagcaaggggctgaggcctggctgaaggccaaacaggggaaaacattggactttattgatgttctccttctggctcgcgatgaagacggtaaagagttatccgacgaagatatcagggcggaggcagacactttcatgttcgaaggacatgatacaacctcctcgggaatttcatggatgctgtttaacctggctaagtatcccgagtatcaggaaaagtgcagagaggaaatacaggaagtgatgaagggcagagaacttgaggaactggaatgggatgatctcacacagctgcccttcacaacgatgtgcataaaggagagcctccggcagtacccacccgtcactctggtgagccggcaatgtactgaggacataaaattgcccgacggacggataattccaaaaggcataatttgcttggtgtctatttacggaactcaccataaccctacagtgtggccagacagcaaggtgtataatccctatcggttcgatcccgataaccctcagcagcggagccctcttgcttatgtcccgttttctgctggccctcgaaactgcatagggcaaagctttgcaatggctgagctgcgagtggtggtggcactgactctgctacgctttcggctttcagtggatcgcactaggaaggtgaggagaaaacctgaattgattttgagaactgaaaacggcctgtggttaaaagtagagcccctccccccacgagcttag

SEQ ID NO: 184526 - DNA, 1782 bp, synthetic construct
  misc_feature 1..1782: note = Description of Artificial Sequence: Synthetic coding sequence
  source 1..1782: mol_type = other DNA
atggcccccagcggcctgaaggccgtggtgggcgagaagatcctgtctggcgtgattaggtccgttaaaaaggacggggagtggaaggttctaatcatggatcacccatccatgcgcatcctctccagctgctgtaagatgtccgacattctcgctgagggaatcactattgtagaagacattaacaaaaggcgagagccaatacctagtctagaggcgatctatcttctgtctccaacagagaaaagtgtccaggcactcataaaagatttccagggtacacctaccttcacatacaaggctgcacatatattctttacggatacatgtcctgaacccttatttagcgaattaggacgtagcagactggcaaaggtggtcaaaacgttgaaggagatccacctggcctttttgccttatgaggctcaggtgtttagccttgatgcaccccatagcacttataatctgtattgcccatttcgggctgaggaaagaacacgtcagctagaagtgctcgctcagcagattgccacactctgtgccactctgcaagagtaccccgcaattagatatcgcaaaggacccgaagatacagcacagctcgcccacgcagtcctggccaaactgaatgcattcaaggcggacactcctagcttaggcgagggaccagaaaagacccgaagccaacttttgatcatggaccgggctgccgaccccgtgtcgccattactgcacgagctgactttccaagctatggcctacgacttgttagatatcgaacaggacacctaccggtacgaaacaaccggtctgagcgaagcccgtgagaaggctgtgttactggacgaggacgatgatctttgggttgaactgcgccatatgcacatcgccgatgtctctaagaaggtgacggagttgctcaggacgttttgcgagagtaagcgtctcaccaccgacaaggctaacattaaggatctgtcacagatcctgaagaagatgccccagtatcagaaggagctgaacaaatatagcacccacctgcatctggccgacgattgcatgaaacatttcaagggtagcgttgagaaattatgcagcgtcgagcaggacctcgcaatgggctccgacgccgagggggagaagatcaaagacagcatgaagttgattgtgcccgtgcttctggacgccgctgtaccagcttacgacaagatcagggtgctgctgctgtacatcctcctccgaaacggggtatctgaagaaaatcttgccaagttaattcaacacgcaaatgtgcaggctcattcctctcttatcaggaatctggagcagctgggcggaacagtaaccaacccaggcgggagcggaacctccagcaggctcgaaccccgggagagaatggaaccaacataccaactgagtcgatggaccccagtcattaaggacgtaatggaggatgctgtcgaggatcgattggataggaacctatggccatttgtgtccgacccggctcctaccgcatcaagccaagcagccgtcagcgcaagattcgggcattggcacaagaacaaggccggaatcgaagccagagcaggccctaggctgatagtctacgttatgggcggcgtggctatgagcgagatgcgcgccgcctacgaggtaactagagctaccgaggggaagtgggaggtgctgattggcagctcccacatcctgactcccaccaggttcttagatgatctcaaagcgctggacaagaaactggaggacattgccctgccatag

SEQ ID NO: 184527 - DNA, 1344 bp, synthetic construct
  misc_feature 1..1344: note = Description of Artificial Sequence: Synthetic coding sequence
  source 1..1344: mol_type = other DNA
atgcgggtgctgacccagctggtggccacctacccccagggcttcaaggtttggatggggcccatctttccggtgattaggttttgccacccaaacataataaggagcgtaatcaatgcctcagcagccatcgtgccaaaagataaagtgttttactccttccttaaaccctggctgggcgacggcttgctgctgagcgcgggggaaaaatggagtagacatcgacgaatgctgactccagccttccatttcaacattttgaaaccttacatgaagatttttaacgaatctgtgaatattatgcatgctaaatggcagctgctggccagcgaaggctctgcgcgtctggatatgtttgagcatatctcactaatgaccctcgacagtttgcaaaagtgtgtcttctcctttgactctcattgccaagagaagccatcagaatatatagcagccatattggagttgtccgcgctggttacaaaaagacatcagcagatcctgttgtacatagactttctctactacctaacgccagatgggcaaaggttcaggagggcttgcaggctagtgcacgatttcaccgacgccgtcatccaggagcggaggcgcactcttccatcccagggcgttgacgatttcctccaggccaaagcgaaaagcaaaacattagactttatcgacgtgctcctgttgagcaaggatgaggatgggaagaagctatccgatgaagacatccgggccgaagctgacaccttcatgtttgagggccacgataccacagcctccgggttgtcttgggtgctatatcatcttgccaaacatccagaatatcaggagagatgccgacaagaagtccaggagttactaaaggacagggagcctaaagagattgaatgggacgacctcgctcaattaccattcctaactatgtgtattaaagaatcactgcggctgcacccacccgtgcccgccgtatccaggtgctgtacccaggatatcgttctgcctgatggtagggtgattccaaaaggtatcatttgcctcatttctgttttcgggacccaccacaatccggcagtgtggccagatcctgaggtgtacgacccgttccgcttcgacccaaagaacataaaggagcggtcaccactagcgtttattcctttcagtgccgggccccggaactgtattgggcaggcgtttgcgatggccgagatgaaagttgtcctgggcttaaccctgctgcgattccgagtcctccccgatcatacagaacccagaaggaagcccgagcttgtcctgcgagcggaaggcggcctgtggttacgagtggaacccctgtcatag

SEQ ID NO: 184528 - DNA, 999 bp, synthetic construct
  misc_feature 1..999: note = Description of Artificial Sequence: Synthetic coding sequence
  source 1..999: mol_type = other DNA
atgcccagcatcaccaccgccgccgccagcggcgtgagccggagcccaggcaaccggacaggcagctgggtgacgtgggcatggaaaccctccgaatacattaccgccattatggagctctccgctctggtggtgaagcgcaataatcagttctttcggtataaggactttttgtatttccttactccttgcggccggcggtttcatcgcgcctgccgactggtccacgacttcacagacgccgtgattcaggaacgacgcaggaccctgacttctcagggcgtggacgactttctccaagccaaagcaaagtctaagaccttggactttatcgatgtcctgctgctaagcgaggacaaaaatggcaaagagctgagcgatgaggatatacgtgcggaagcagatacttttatgttcggcggccacgacaccactgcatctggcttatcctgggtgctgtacaacctagctagacatcccgaataccaggagcggtgtaggcaggaggtgcaggagctgttgaaagaccgcgagcccaaagagatcgagtgggatgatctagcccagctccccttcctgactatgtgtcttaaggaatctcttcgcctacaccctcccattcccacgtttgcccgcggttgcactcaggacgtcgtcctccccgactctagggtgataccaaaagggaacgtgtgtaatatcaatattttcgccatccaccacaaccctagtgtgtggcctgatccagaggtctatgatccattccgctttgaccctgagaatgcgcagaaacgctcacccatggccttcatcccctttagtgccgggccccgtaattgtataggacaaaagttcgccatggccgagatgaaagttgtcctcgcacttaccttgcttagatttcggatactccctgatcaccgggagccccggaggactcccgagatcgtgctgagggcagaagacgggctttggctcagggtggagcctttgggatag

SEQ ID NO: 184529 - DNA, 1560 bp, synthetic construct
  misc_feature 1..1560: note = Description of Artificial Sequence: Synthetic coding sequence
  source 1..1560: mol_type = other DNA
atgagcctgctgagcctgagctggctgggcctgcggcccgtggccgcaagtccatggctgctgctgctggtcgtcggcgcttcatggttgttggcccgcatattagcctggacatacgccttctaccacaatgggagaagactgcgctgctttccacagcctagaaagcagaactggttcctcggccatctcgggctcgtgactcctaccgaggaagggcttagggtgcttactcagctggtcgctacgtacccccaggggttcgtgcgatggctcggccctattacacccatcattaatctgtgtcatcctgacattgttcgctcggtcatcaacacaagcgatgccatcactgataaggacattgtgttctacaagacattaaagccctggcttggggacgggcttctgttaagtgtcggggataaatggaggcatcatcgacgcctgacccctgctttccacttcaatatcttaaagccctacatcaagatctttagcaaaagcgctaatataatgcacgctaagtggcaacggctggccatggaaggcagtacttgcctggacgtcttcgagcatattagtctgatgaccttggacagccttcaaaagtgtattttttcttttgactcaaattgtcaagagaagccctcagaatacattacagcaattatggaactttcagccctggtagttaaacgtaacaaccagttttttcgctataaggatttcctgtatttcctcactccctgcggacgccgttttcaccgagcttgccgtctggtccacgacttcacagatgcggtgatccaagaacggcgccgtaccctgacctcacagggggtagatgacttcttgcaagcaaaggcaaagagtaaaacgttggacttcatcgacgtgctgttgttgagcgaggataaaaacggtaaggagctgagtgatgaagatataagagcagaggccgatacctttatgtttggcggccacgacactacggcatccgggctgagctgggtgctgtacaacctggccagacaccccgaataccaggagagatgccgacaggaagtgcaggagttgttaaaagacagagaacctaaggagatcgaatgggatgatctggcacagctccccttcctgaccatgtgcttgaaagaatctctgcgactgcatccccccatcccgacattcgcccgcggttgcacacaagatgttgtgctcccggactctcgcgtcatccccaagggaaatgtgtgcaacattaacattttcgccattcatcataacccctctgtgtggcccgatccagaggtgtacgacccttttcggttcgacccagagaacgcccagaagaggtctcccatggccttcattcccttctccgctggcccacgaaactgtattggccagaagttcgctatggccgaaatgaaggtcgttctcgcgttgaccttgttacggtttcggattctccccgaccaccgggagcctaggcgaacaccggagattgtgctcagagctgaggacggcctctggctgcgcgtggagccgctaggttag

SEQ ID NO: 184530 - DNA, 804 bp, synthetic construct
  misc_feature 1..804: note = Description of Artificial Sequence: Synthetic coding sequence
  source 1..804: mol_type = other DNA
acccccgccttccacttcaacatcctgaagccctacatcaagatcttctccaaaagtgcgaacatcatgcatgcgaagtggcagaggctggcaatggagggctctacgtgcctagacgtctttgagcacatatctctgatgacactggacagcctccaaaagtgtattttttctttcgattctaactgccaggagaaaccaagtgagtacattaccgcaatcatggagctgagcgcactggtcgtcaaacgcaacaatcaattctttcgatataaggatttcctctatttcttaactccttgcggtcgaaggtttcacagagcgtgtagactagtacacgatttcacagatgcagtgattcaggagcgccgaagaaccttaacaagccaaggagtcgatgatttcttacaagcaaaggcaaagagcaaaacacttgacttcattgatgtgctactgctgtccgaagacaaaaatggaaaagaactgagtgacgaagacattcgagcggaggcagacacctttatgttcggcggacatgacaccaccgcgagcgggctgtcctgggtactctataatctagcacggcaccccgagtaccaggagagatgcaggcaagaggttcaggaactgttgaaggatcgagaacccaaagagatcgaatgggacgacctggcccagctgccgtttcttaccatgtgcctgaaggagagcttgcgcctccatccccccattccgactttcgccaggggctgtacccaggatgtcgtgctacccgacagtcgggtgatacctaagggcctctag

SEQ ID NO: 184531 - DNA, 1512 bp, synthetic construct
  misc_feature 1..1512: note = Description of Artificial Sequence: Synthetic coding sequence
  source 1..1512: mol_type = other DNA
atggccggcctgtggctgggcctggtgtggcagaagctgctgctgtggggcgcagcttccgcactcagcctggcaggagcctcgctcgtattatcattgctgcagcgagtggccagttatgctctactgatgaagcctgatgggagggagttcttccaacaaatcattgaatacactgaggagtaccgccatatgcctctgctcaaattgtgggtggggcccgttcccatggtggctctgtacaacgccgaaaatgtggaggttatcctgacatcatccaagcagatcgataaatcctcaatgtataaatttcttgaaccctggctgggtttaggcctgcttacctccacaggaaacaagtggcggtcgcgcaggaagatgttaacccccacatttcacttcactattctcgaggacttcctagatattatgaacgagcaggctaatatcctggtaaaaaagctggaaaagcatattaatcaggaggcattcaattgttttttttatatcacactgtgtgctctggatattatctgcgagaccgccatgggcaagaacattggagcccagagcaatgatgacagtgaatacgtgagggcggtctaccggatgtctgagatgatttttcggcgcattaaaatgccatggttatggctggacctgtggtatctcatgttcaaggaagggtgggaacataagaaatctctccaaattctgcacacatttactaattcagtcatcgctgagagggcaaatgagatgaatgccaacgaggattgtcgcggcgatggccgtggatcagcaccaagtaagaacaagcggcgggcgttcctcgacttgctgctgagtgttacagacgacgagggaaatagactctcccacgaggatatcagagaggaagtggatacctttatgtttgagggccacgacaccacagccgccgctatcaattggtccctttacctgttaggttctaatcccgaagtgcaaaagaaggtcgatcacgagctggacgatgtgttcggtaaatctgatcgaccagccaccgtcgaagacctcaagaagctcagatacctggagtgcgtgatcaaagaaacacttaggctgttcccttcagttccattgttcgctcggagcgtgtctgaggactgcgaggtggcgggataccgcgttttgaaaggaactgaagccgtgatcatcccttatgcgttacacagagatccacgctactttcctaacccagaagagttccagccagaaagattcttccccgaaaatgcacaagggcgccatccttatgcatatgtgccattctcagccggcccccgaaattgtatcggccagaaatttgctgtgatggaggagaaaacgattctttcttgcattctgcgccacttttggattgagtccaatcagaaacgcgaggagttagggctggaggggcagcttatcctgcgtccttcgaatggcatctggataaaactgaagcggcgcaatgccgacgagcgatag

SEQ ID NO: 184532 - DNA, 1578 bp, synthetic construct
  misc_feature 1..1578: note = Description of Artificial Sequence: Synthetic coding sequence
  source 1..1578: mol_type = other DNA
atggccggcctgtggctgggcctggtgtggcagaagctgctgctgtggggagccgctagtgccctgtcactagctggggcttccttggttctgagcttgcttcagagagtcgcttcatatgcgaggaagtggcagcagatgagaccgatacctaccgtggcaagagcttacccgttggtaggccatgccttactcatgaaaccagacggcagagaattctttcagcagattatcgaatacacggaagaataccggcatatgcctctactgaaactgtgggtgggcccagtgcccatggtggcactgtacaatgcagagaatgttgaggtgatactgacgagtagtaagcagatagacaagagctctatgtataaatttcttgaaccttggcttggactgggcttgctgacatccaccggaaataagtggcggtcaaggcgaaaaatgctgacccccacttttcacttcaccatactggaggacttcctcgacatcatgaacgagcaggccaatattctcgtcaaaaagctagagaaacatatcaaccaggaagcatttaactgttttttttatattactctgtgcgctctggacattatctgcgagactgctatgggcaaaaatattggagcacagagtaatgatgacagtgaatacgtcagagccgtgtatcgaatgtccgaaatgatcttccggcggattaaaatgccgtggttgtggctagacctgtggtatctaatgttcaaggagggctgggaacataaaaaatccctgcagatactgcataccttcactaatagcgtcatagctgagagagccaatgaaatgaacgctaacgaagactgtcgcggcgacggtcgcggaagcgctcccagcaaaaataagcgtcgcgcattcttggatctgctcctgtctgtgaccgacgacgaggggaataggctatcccatgaagacatcagggaagaagtggacacttttatgtttgaggggcatgatacaaccgctgccgcaattaattggagcctgtacctcttgggttccaatccagaggtgcagaagaaagtcgaccatgaactggatgatgtattcggcaagtctgatcgacccgccaccgtggaagatctgaagaaattgcgctacctggagtgcgtgattaaggaaacgttaaggctgttcccgagcgtgcccctgttcgcacgctccgtgagcgaggattgtgaggtcgctgggtatcgggtcttgaaggggactgaggctgtgatcatcccctacgctttgcacagagaccctcgctacttcccaaatcctgaagagtttcaaccggagcgattcttccctgagaatgcacagggacgccatccctatgcctatgttcctttcagcgccggccccagaaactgtatcggtcagaagtttgccgtcatggaagaaaaaacaatcttgagctgtatactgagacatttttggatcgaaagtaaccaaaagagagaagaactcggattggaagggcagctcatcctgagaccctcaaatggaatttggatcaagttaaaacgccgcaatgcagatgagcggtag

SEQ ID NO: 184533 - DNA, 1503 bp, synthetic construct
  misc_feature 1..1503: note = Description of Artificial Sequence: Synthetic coding sequence
  source 1..1503: mol_type = other DNA
atgagccccggcctgctgctgctgggcagcgccgtgctgctggccttcggcctgtgctgtacctttgtgcaccgcgccaggtctaggtatgaacatatcccagggccgccgagaccgtcctttctgctagggcacctcccctgtttctggaagaaggacgaggtgggggggagggttcttcaggacgtgtttctggattgggccaaaaagtatggaccggttgtcagggttaacgtctttcataaaacatccgtgatcgtgacatcacccgagtccgttaagaagtttttgatgagtaccaaatataacaaggattccaaaatgtacagagcactccagactgtgttcggagagaggctatttggccagggtctcgtgagtgaatgtaattacgagaggtggcacaaacagcggagagtgattgacctagcttttagtaggtcctctctggtgtccctgatggagacctttaatgagaaggccgaacagttggtggaaattctggaggccaaagctgacgggcagacccccgtaagcatgcaggatatgctgacgtataccgcaatggatatcttagcaaaagctgccttcgggatggagacttccatgcttctaggggctcagaagccactttcgcaggctgtgaagctgatgcttgaggggatcacagcctcacgtaacaccctggctaagttcttgcctggcaaacgcaagcagttaagagaagtaagggaaagtatcaggttcttaagacaagttggcagagattgggtccaaaggcggagagaggccctgaagcgtggggaggaggtgcctgccgatatactcactcaaattctcaaggctgaagagggagcccaagacgacgaagggctcctagataattttgtaactttctttatagccggtcacgaaacctcggccaaccaccttgcatttaccgtgatggaactgtctaggcagcctgaaatcgtggcaagattgcaagctgaagtggatgaggtgattggcagtaagaggtacctcgatttcgaagacttggggcgtcttcaatacctgtctcaagtactgaaagaaagcctaagattatacccacctgcttggggtaccttcagactcctcgaggaggagactctcatcgacggagtgcgtgtcccggggaataccccactcctcttctccacctacgtaatgggccgaatggatacgtactttgaggatcctctgacctttaacccggataggttcggcccgggggcaccaaaaccgcggttcacatactttcccttttccctcggccaccgctcctgtatcggacagcagttcgcccagatggaagtaaaagtagtgatggccaaactgttacaaaggttagagtttcgcctcgtccctggccagcggttcggtttgcaggaacaagcgacactaaagcctctggaccctgtgctttgcactttgaggcctaggggctggcagccagcaccacctccccctccttgttag

SEQ ID NO: 184534 - DNA, 1212 bp, synthetic construct
  misc_feature 1..1212: note = Description of Artificial Sequence: Synthetic coding sequence
  source 1..1212: mol_type = other DNA
atgagcaccaagtacaacaaggacagcaagatgtaccgggccctgcagacagtattcggagaacgcttattcggccagggccttgtttcagaatgtaactatgaacgctggcacaagcagaggcgggtcatcgatcttgctttcagtagaagctccctcgtcagccttatggagaccttcaatgaaaaggcggaacagctagttgaaatcctggaggcgaaggccgatggccaaactccagtgtctatgcaggacatgctaacatataccgccatggacatattggcaaaagccgcctttgggatggagacctcgatgctgctgggcgcccagaaacctctgtcccaagccgtcaaactcatgcttgagggaataacggccagccgcaacaccctggcgaagtttctcccaggaaaacgtaagcagctgcgtgaggtgagggaaagcatccgatttttgcgacaagttgggagagattgggtgcagaggagaagggaagcactgaagcggggcgaagaggtgccagccgacatactgactcagatccttaaagccgaggaaggagctcaggatgacgaggggcttctggataatttcgtcacattttttatcgcgggacacgagacttctgccaatcatctggctttcaccgtcatggagctcagcagacagcccgagatcgtggcccggcttcaggcagaagtcgatgaggtgatcggctctaagagatacctggatttcgaggacttaggccggttgcagtacctgtctcaggtccttaaagaaagtcttaggctatacccccccgcctgggggaccttccggttattagaggaggaaaccctgattgacggcgtcagggtgccaggtaataccccactgcttttctccacttatgtgatgggcagaatggatacatatttcgaggatcccctcacctttaaccctgaccgcttcgggccaggggcacccaaaccacggttcacctattttccattttccctgggacaccggagttgcatagggcagcagtttgctcaaatggaggtgaaagttgtaatggcaaagctgctgcagcgtctggaattcagactggtccccgggcagaggttcggcctgcaagaacaggccactctgaagccactggatccagtcctgtgtacactccggccccgaggctggcagccagcccctcccccgccaccatgctag

SEQ ID NO: 184535 - DNA, 1530 bp, synthetic construct
  misc_feature 1..1530: note = Description of Artificial Sequence: Synthetic coding sequence
  source 1..1530: mol_type = other DNA
atggccgccgccgccggcatgctgctgctgggcctgctgcaggccggtggatcagttctgggccaggccatggagaaggtcacaggaggcaatctgttaagcatgttactgatcgcctgcgcatttacactgtccctggtataccttattcggctggctgctggtcacttggttcagcttcccgcaggcgtgaagagccctccttacatcttctctcctatcccgtttctggggcacgcaattgccttcggcaaaagtcctatcgaatttctcgagaacgcttacgagaagtatggtcccgtcttcagctttactatggtgggaaaaacttttacctatctgcttggcagcgatgccgccgctctcctgtttaattctaaaaatgaagatctcaacgccgaagatgtttatagtcgattaacaaccccagtttttggaaagggcgtcgcttacgatgtccctaatcctgtgtttctggaacagaaaaaaatgttgaagtctggcctcaatattgcccattttaagcaacacgtgtctattatcgagaaggaaactaaagaatactttgagtcctggggggaaagcggagagaaaaatgtctttgaagcgcttagcgagctaatcattttgacagcctctcactgcctccatgggaaggagattcgctctcaattaaacgagaaagtggcccaactttatgctgacctggacggggggttctcacacgccgcttggctgttacctggatggttacctctgccaagcttcagacgccgcgatcgggcccacagggaaatcaaggacatattttataaggccatccagaagcgacggcagtcccaggagaaaattgatgacatactccagactctgctggatgctacttataaggacggccgcccgctgacagacgatgaggtggcaggcatgttaattggactgttgctggccgggcagcacaccagcagcacaacttctgcctggatggggttctttctggctcgagataagaccctccagaaaaagtgctacctcgagcagaaaacagtttgcggggagaaccttccccccctcacctatgaccagctaaaagacctcaatctgctcgacaggtgcataaaggaaaccctccgcctgcggccacccattatgattatgatgagaatggctaggactccacagactgtcgcaggctatacaataccccctgggcatcaggtatgcgtgtctccgaccgtgaaccaacgcctgaaagactcgtgggtcgagcgtctggacttcaatcctgaccgctatctgcaagataaccccgcctccggtgagaagtttgcctacgtcccatttggcgcaggccggcatcgttgtattggggaaaattttgcctacgtgcaaatcaaaacaatttggtcaacaatgttgcgactgtacgagtttgacttgatagacggatatttccccactgttaattataccacgatgatccatactcctgaaaacccagtcatccgctacaagcgacgctcaaagtag

SEQ ID NO: 184536 - DNA, 1215 bp, synthetic construct
  misc_feature 1..1215: note = Description of Artificial Sequence: Synthetic coding sequence
  source 1..1215: mol_type = other DNA
atggtgggcaagaccttcacctacctgctgggcagcgacgccgccgcactgctgttcaattctaagaatgaggatctgaatgccgaagatgtgtattccagactgactacacccgtgtttggcaaaggggttgcatacgacgtgcctaacccagtattcctggaacaaaagaagatgctgaagtcgggcctgaatatcgcacatttcaagcagcacgtgtctattatcgaaaaagagacaaaggagtatttcgagtcatggggtgagtctggcgagaaaaacgtctttgaggcactctcggaactgatcattctgaccgctagtcactgtcttcacgggaaggaaatccgttcacagttgaatgaaaaagttgcacaattgtacgcagatctcgacggtggtttcagtcacgctgcttggctgctgcccggctggctcccactcccaagctttcgccgccgggatagagcccaccgagaaattaaagatattttttataaagctatccagaagcgcaggcagtcgcaagagaagatcgacgacattctgcaaacccttcttgacgctacctacaaggacggtaggccccttactgacgacgaggtagccggaatgctgataggtctcttgctggccggccaacacaccagctcgacaaccagtgcttggatgggattctttctggccagagataaaaccctccagaaaaagtgctatctggagcagaagacagtatgcggtgagaatctgccccccttgacttacgatcaactgaaggatttgaatctccttgatagatgtatcaaggagacgctgaggttgcgaccaccaataatgattatgatgaggatggctcgcacccctcagacagtggccgggtacactattccaccaggtcatcaagtgtgcgtctctccaactgtcaatcagcgcctgaaggattcttgggtggagcgcctggatttcaaccccgacagatacctacaagacaaccctgccagcggcgaaaaattcgcgtacgttcctttcggagccggcaggcacaggtgtatcggcgaaaatttcgcttacgtccagattaagactatttggtccacaatgctgcgtttgtacgagttcgatttgatagatggctacttccctacggtgaactataccacaatgatacacaccccagaaaatcccgtgattaggtacaaacgcaggtctaagtag

SEQ ID NO: 184537 - DNA, 1350 bp, synthetic construct
  misc_feature 1..1350: note = Description of Artificial Sequence: Synthetic coding sequence
  source 1..1350: mol_type = other DNA
atgaagcacgagaagagccccccctacatcttcagccccatccccttcctcggccatgctattgccttcgggaaaagccccatagaatttttggaaaacgcatatgaaaagtacggaccggttttttcgtttactatggtcggcaagacctttacatacctattgggtagcgacgctgctgctctgttgttcaattctaagaatgaggatctaaatgctgaggatgtctacagtagactcaccacccctgtgtttggaaagggtgtagcctacgacgtcccaaatccagtattcttggagcagaaaaagatgctgaaatcaggtcttaatatcgcacactttaaacagcatgtgtccattatcgaaaaagaaaccaaggagtattttgagtcttggggagagagcggcgagaagaatgtatttgaggcgctgtctgagctgataattctgaccgcatctcattgtctccatggcaaagagattcggtcccagctgaacgaaaaggtcgcccagctatatgccgacctggacgggggcttctctcatgcagcatggctccttcctgggtggttgccattgcccagctttaggagaagggaccgggcccatagagagattaaagatatattctataaggcaatccagaaaagaaggcagagccaggaaaaaatcgacgacattctgcaaacacttctcgatgccacctataaagatgggagacccctgaccgatgatgaggtagccgggatgctcatcggactgctcttggctggacagcatacgtctagcacaacttcggcgtggatggggttctttctggctagagacaagactttgcagaaaaaatgttacctggagcagaagaccgtctgcggtgagaacctcccgcccctcacttatgatcagctaaaagacttgaacctgctggatagatgcataaaagaaacgctcagactgaggccacctattatgatcatgatgaggatggcgcggacccctcagactgttgcaggttatactattccaccaggacaccaggtgtgcgtctctccaaccgtgaaccagagacttaaagatagttgggtggaaaggcttgacttcaatccagacaggtatctgcaggacaaccctgcctctggcgagaagttcgcctatgttccttttggcgccgggcgtcaccgctgcatcggagagaacttcgcttacgtgcagataaagactatttggtctactatgctgaggttatacgagtttgacctaattgatgggtatttccccaccgtcaactataccacaatgattcatacccctgaaaaccctgtcattaggtataagagaaggagtaaatag

SEQ ID NO: 184538 - DNA, 1515 bp, synthetic construct
  misc_feature 1..1515: note = Description of Artificial Sequence: Synthetic coding sequence
  source 1..1515: mol_type = other DNA
atgatgaccaccagcctgatctggggcatcgccatcgccgcctgctgttgcttgtggttaatccttggcattcggcgccgccagactggcgagcctcccctggagaatgggcttattccgtatttgggttgtgccctgcagttcggtgctaaccctctcgagtttctgagggcgaaccagagaaagcatggccatgtttttacatgcaagctgatggggaagtacgttcacttcattaccaatcccctgagttaccacaaagttttgtgtcatgggaagtatttcgattggaagaaatttcattttgccacttctgcaaaagcattcggccatcgcagcattgaccctatggacgggaatacgaccgagaacatcaatgatactttcataaagaccctacagggccacgctctgaactccttaacagagagcatgatggaaaaccttcagcgcataatgcggccccctgtgtcgtctaacagcaaaaccgccgcatgggtgacggagggtatgtacagcttttgctatcgcgtaatgttcgaagccggctatctcactatctttggcagagacctgacacggcgtgatacgcaaaaggcacacatactgaacaatctggacaatttcaaacagttcgacaaagtgtttcctgctctggtagctggcctgcccatccacatgtttcggacagcccataacgcgagagaaaaactggcagaaagcctgcgccacgagaatcttcagaagagggagtcgattagcgaacttatcagccttagaatgttccttaacgatactctcagcacctttgatgacctcgaaaaggccaaaacgcatctggtagttttgtgggcttctcaggcaaatactatccccgccacgttctggtcccttttccagatgatcagaaatcctgaggccatgaaggctgccactgaagaggtgaagagaactcttgaaaatgcaggccagaaagtgagcctggaagggaaccctatttgcctgtcccaggccgaactgaacgatctgcctgttctcgattccatcattaaagaatcgctgaggttgtcctcagccagcctcaacatacgcacagccaaagaggactttacattacacttagaagacggctcatataacatccgcaaggacgatatcatcgccctttacccacaacttatgcacctagatcctgaaatctaccccgatcctcttactttcaaatacgataggtacctcgatgagaacgggaaaacaaagacaaccttctactgtaacggtcttaagctgaagtattactatatgccgttcggaagtggcgccacaatttgtccgggccggttatttgctatccatgagatcaaacagttccttatcttaatgttgtcatacttcgaactcgaattaattgagggacaagctaagtgtcctccgctggaccaatcccgggctggactaggcatcctgcccccactgaatgacatcgagttcaagtacaaatttaagcatttatag

SEQ ID NO: 184539 - DNA, 1521 bp, synthetic construct
  misc_feature 1..1521: note = Description of Artificial Sequence: Synthetic coding sequence
  source 1..1521: mol_type = other DNA
atggccggcgaggtgagcgccgccaccggccggttcagcctggagcgtctcggattgccagggcttgctctcgccgcagcccttctgctgctggcattatgtctcctggtacgcaggaccaggagacccggagagcccccactgattaaggggtggctaccctatttgggcgtggttctcaacttgcgcaaagatcctctacgttttatgaagactctgcaaaagcagcacggcgacaccttcacagttctcctcggtggtaagtacattaccttcattctcgaccctttccagtatcagctagttatcaaaaatcataagcagctgagtttccgcgtcttcagtaataagctcctggagaaagctttttcaatttctcaactgcagaagaaccatgacatgaacgacgagttgcatctgtgctatcagtttttgcaggggaagtccctggatatattactggagtccatgatgcagaatttgaagcaagtgtttgagccccagctgctcaaaactacgagttgggatacagcagagctatatccgttctgctcgagtataatcttcgagataacttttaccacaatctacggaaaagtcatcgtttgtgataataacaagtttataagtgagttacgggatgattttctgaaatttgacgacaaattcgcgtatctggtgtccaacattcccatagagctgttgggaaacgtgaagtcgattcgcgagaagataattaagtgcttttccagcgagaagcttgccaagatgcagggctggtccgaagtgtttcaaagtcgccaggacgtgctcgagaagtactatgtgcacgaggacctcgagattggcgctcatcatctcggctttttatgggcttctgtcgcgaatacgatccctactatgttctgggccatgtattacctgcttaggcatccagaagctatggcggctgtgcgggatgagatagataggttgctgcagtctacaggccaaaagaaagggtctggtttccccattcacctgaccagggagcagttggactctttgatatgtctggagtccagcattttcgaagcactcaggctgtctagctattccacaacaattcggtttgtggaagaggatctaactctgagttctgagactggggattattgcgtgcggaagggggacctggtcgccatcttcccaccggtcctgcacggagaccctgagatcttcgaggctcctgaggagttcagatacgatcgttttatagaggatggcaaaaagaagacaaccttctttaaaagaggaaagaagctgaaatgctatcttatgccgtttggcactggcacatccaaatgtcctgggcgattctttgccctaatggaaattaaacagctgctggtcattcttttgacatacttcgatttggaaatcatcgacgacaaacctattggcctgaactattcacgtttgctattcggtatccaatacccagattccgacgtgctctttcggtacaaagtcaaatcatag

SEQ ID NO: 184540 - DNA, 1506 bp, synthetic construct
  misc_feature 1..1506: note = Description of Artificial Sequence: Synthetic coding sequence
  source 1..1506: mol_type = other DNA
atggtgctgtggggccccgtgctgggcgccctgctggtggtgatcgcaggctatttatgcctacccggtatgctgaggcagcggcggccttgggagcctccgttagataaaggaacagtgccctggctaggccacgcgatggcatttagaaaaaacatgttcgaattccttaaaagaatgcgtaccaaacatggcgatgtcttcaccgtgcaactgggaggacagtatttcacgtttgtaatggatcctctgagtttcggcagcatcttaaaagacacacagcggaaactagacttcggccagtacgcaaaaaaacttgtcctaaaagtattcgggtaccgatcagtgcaaggggaccatgaaatgatacatagtgcctctactaaacatttgcggggcgacggcttaaaagacctcaacgagacaatgctagactctttatcgttcgtgatgcttacatccaaagggtggagtctcgacgcctcctgttggcacgaggatagccttttccgtttttgctattatatactgttcaccgccggctatttaagtcttttcggttacaccaaggataaggagcaggacttattacaagccggcgaactctttatggagtttagaaaatttgacctgctgttccccagattcgtttactctctactgtggcctcgcgagtggctcgaagtcggcaggctgcagagattattccacaaaatgttgtctgtctcacatagtcaggagaaggaaggaatctcgaactggctggggaatatgctgcaatttctgcgggagcagggcgtaccgtctgccatgcaggacaagttcaactttatgatgctgtgggcaagccagggaaacacggggcctaccagcttttgggctcttctgtatctactgaagcaccctgaagccatcagggccgtgcgggaagaggcaacacaggtgcttggagaagctcgcctagagactaaacaaagttttgcctttaagctgggtgcattacagcacactcctgttctggacagtgtggtagaggaaactctgcgcctgagagccgcccccaccctgttaaggcttgtgcatgaggactacaccctgaaaatgtcctctggacaagagtacctgtttaggcatggcgacattctggccttattcccatatctgagcgtgcacatggatcccgatatccacccggaacctactgtttttaaatatgaccgttttttgaatccaaacggtagcagaaaagtcgacttctttaaaacaggcaaaaaaatccatcactacaccatgccttggggatctggagtgagcatttgtcccggtagatttttcgctctgtccgaagtcaaactgttcatcctcttgatggtcacccactttgatctcgagctagtcgaccccgatacacctctgccccacgtcgaccctcaacgctggggtttcggaaccatgcaaccctcccatgatgttcgctttaggtataggttacatcccacagagtag

SEQ ID NO: 184541 - DNA, 573 bp, synthetic construct
  misc_feature 1..573: note = Description of Artificial Sequence: Synthetic coding sequence
  source 1..573: mol_type = other DNA
atggagaaggtgcccggcgagatggagatcgagcggcgggagcggagcgaagagctgagtgaagcagaacgtaaggccgtgcaggccatgtgggccagactctatgccaactgcgaagacgtaggagtggccattctcgtgaggtttttcgtgaattttccctctgctaaacagtacttttcccagttcaaacacatggaggatcccctggaaatggagcggagtccacaacttaggaagcacgcatgtcgcgtaatgggggcactgaatactgtggtggaaaatttgcacgaccccgacaaagtgtcatcggtactggctctggtcggaaaggcccatgcccttaaacacaaggtcgaaccagtgtactttaagatcctcagcggagtcatattggaggtggtagcagaggaatttgcctccgattttccccctgagacgcagcgggcctgggcaaagctaagaggcctgatctatagtcatgtaaccgcggcatataaagaggtgggatgggttcagcaggttccaaatgctaccacgcctcccgccaccttgcccagctccgggccctag

SEQ ID NO: 184542 - DNA, 1194 bp, synthetic construct
  misc_feature 1..1194: note = Description of Artificial Sequence: Synthetic coding sequence
  source 1..1194: mol_type = other DNA
atggaggaggacgacagctacgtgcccagcgacctgaccgccgaggaaaggcaggaactggagaatattcgccgcaggaagcaagagctgctcgctgacattcaacggctcaaggacgagattgcagaagtggcgaacgagatcgagaatctgggtagcacagaagagcggaagaacatgcagaggaataagcaggttgcaatgggtagaaagaaattcaatatggatcccaagaaaggaatacagttcctaatcgaaaacgacctgctgaagaacacctgcgaggacatcgcccagttcctgtacaagggagagggactgaacaagaccgcaattggtgactacctcggtgagagagacgaatttaacattcaggtgctccacgcttttgtggagctccatgagtttaccgacctgaacctggtgcaggccctgagacagtttctctggtcttttagattaccaggggaagctcagaagatcgaccgcatgatggaggccttcgcacagaggtactgccaatgcaacaacggtgtgtttcaatctactgacacttgctacgtgcttagtttcgccatcatcatgctaaacacttccttgcacaaccccaacgttaaggacaaaccaacagttgagcggtttattgctatgaaccgcggaatcaacgacgggggcgatttacctgaggaattgctgcgtaacctgtatgaatcaattaaaaacgagcctttcaagataccggaggatgatggtaacgaccttacccatactttctttaatcctgatcgggaaggttggctgcttaagctgggcgggcgagtgaagacctggaaacggcgctggtttatccttaccgacaactgcttgtattacttcgagtacaccactgacaaggagcccagaggcatcataccccttgagaacctaagtatcagggaggtagaagattcaaaaaagcctaattgttttgaactgtacattccagataacaaggaccaagtgattaaggcttgtaagactgaggcagatggccgggtggtcgaggggaaccacactgtgtatcgaattagtgcccccacccctgaagaaaaagaggagtggatcaagtgcattaaagcggccatctcacgcgatcctttctacgaaatgctggccgcaagaaaaaaaaaagtttccagcacaaagcgccactag

SEQ ID NO: 184543 - DNA, 1197 bp, synthetic construct
  misc_feature 1..1197: note = Description of Artificial Sequence: Synthetic coding sequence
  source 1..1197: mol_type = other DNA
atggaggaggacgacagctacgtgcccagcgacctgaccgccgaggagcgccaggaattagagaatattaggcggagaaagcaagagctgctcgcggatatacagcgattgaaagacgagatagccgaggtagctaacgaaatcgagaatcttgggtctacagaagaacgcaaaaacatgcagagaaataagcaggtggccatggggaggaaaaagttcaacatggatccaaagaagggtatccagtttctgatcgaaaatgacctcctgaaaaatacatgtgaagacattgcccagtttttgtacaagggcgaggggctgaataaaacagcaatcggtgattatctcggggagagggatgagtttaacatccaggtcttgcatgcctttgtggagcttcatgaattcaccgatttgaacttagtgcaggccctccggcaatttttgtggtcctttaggctccctggagaagcacagaaaatcgatcggatgatggaggcctttgcccaacgctactgccagtgtaataacggagtgtttcagtccaccgacacatgctacgttttgagctttgccatcatcatgctgaacacaagtcttcataaccccaatgtgaaggacaagcctactgtggagagattcattgctatgaacaggggcatcaatgacggcggggacctcccagaagaactgctgcgtaatctgtacgaatctattaaaaatgagcccttcaaaatcccagaggatgatggcaatgacctaacacacacttttttcaatccggaccgcgaaggatggcttcttaaactggggggcggcagggtgaaaacttggaaacgtcggtggtttatcttaacagataactgcttgtattattttgagtataccaccgacaaggagccccgggggatcatcccattggagaatctttctatccgcgaggtggaagattctaagaagccaaattgtttcgagctatacatccccgataataaggaccaggtcattaaagcgtgtaagaccgaagctgacgggagggtcgtggaggggaatcatacagtgtacaggatctccgcccctacccccgaggagaaagaagagtggatcaagtgcattaaagccgccatatctagagacccattctatgagatgctggcagctcggaagaagaaggttagctctaccaaacgacactag

SEQ ID NO: 184544 - DNA, 657 bp, synthetic construct
  misc_feature 1..657: note = Description of Artificial Sequence: Synthetic coding sequence
  source 1..657: mol_type = other DNA
atgatggaggccttcgcccagcggtactgccagtgcaacaacggcgtatttcagtccactgacacatgttatgttctgagcttcgcaataataatgcttaacaccagcctacacaatcccaatgtaaaggacaagccaacggtcgagagattcatcgcaatgaatcgcggcattaatgatggcggggatctacctgaagagttgttgcggaacctttacgaaagcattaagaatgaaccgttcaagattccagaggatgatggaaatgatcttacacataccttcttcaatcccgatagagaggggtggttgctaaaactggccggaggccgcgtgaaaacctggaagcgccggtggtttattctgacggataattgtctttactacttcgagtacaccactgataaagaaccgcgcggtatcatacctttagaaaacctgagtatcagggaggtggaggactcaaagaagccgaactgcttcgagttatatatccctgataacaaggaccaggtgataaaagcatgtaagactgaagcagacggaagagtggtagaaggaaaccatactgtctatcggatctccgcacccactccagaggagaaggaggagtggataaagtgcatcaagttccaagtctcccccggggagccctag

SEQ ID NO: 184545 - DNA, 1197 bp, synthetic construct
  misc_feature 1..1197: note = Description of Artificial Sequence: Synthetic coding sequence
  source 1..1197: mol_type = other DNA
atggaggaggacgacagctacgtgcccagcgacctgaccgccgaggagagacaggagctggagaacattcgccgacgtaaacaggagctcctggccgatattcaacgcttgaaggacgaaatcgcagaagtggccaatgagatcgaaaatctcggctctacagaagaaagaaagaatatgcaacggaataagcaggtagcaatgggcaggaaaaaattcaacatggacccgaaaaagggcattcagtttctgatcgagaatgatctgctgaagaacacttgcgaggacattgcccagttcctgtataagggagaagggctcaacaagactgcgattggggactacctgggtgaacgcgacgagtttaatattcaggtccttcatgcattcgtcgaactgcatgaattcacggatttaaaccttgtgcaagcacttcggcagtttctgtggtccttccgcttaccaggcgaggctcagaagatagacagaatgatggaggccttcgcacagcgctactgtcagtgcaataacggggtgtttcaatctaccgatacatgttatgtgttatcttttgctatcatcatgctgaatacctccctgcacaaccctaacgttaaagacaaacctaccgtggagcgatttatagccatgaaccgtggcatcaatgacgggggcgacctccccgaagagctgctgagaaatctgtatgagagcattaaaaatgaacccttcaagatccccgaggacgacgggaatgatctgacgcacaccttttttaaccccgatagagagggttggctgctcaagctcgggggcgggcgggtcaaaacttggaagcgaagatggttcatccttactgataactgtctgtactattttgagtataccaccgataaagaaccccggggaattatcccactggaaaatttgtccataagggaagtggaggattccaagaagcccaattgctttgagctctacatcccagataataaagaccaagtcatcaaggcttgcaaaaccgaggcagatgggagagtcgtagaggggaaccatacggtgtaccgcattagtgcgcccacccccgaagaaaaggaagagtggatcaagtgcattaaggccgccatcagcagggaccccttttatgagatgttggctgctagaaagaagaaggtcagctcaactaaacggcattag

SEQ ID NO: 184546 - DNA, 1020 bp, synthetic construct
  misc_feature 1..1020: note = Description of Artificial Sequence: Synthetic coding sequence
  source 1..1020: mol_type = other DNA
atgcagcggaacaagcaggtggccatgggccggaagaagttcaacatggacccaaaaaaaggtatccagttcctgatcgaaaatgacctactgaagaacacgtgtgaagatatcgcccaattcctgtacaaaggcgaaggactgaacaagacagccatcggggactatctgggtgagcgggacgagttcaacatacaagtccttcatgctttcgtggagttacatgagttcactgatctcaatctcgttcaggctctgaggcagtttctctggagcttccggttgccaggcgaggcccagaaaattgaccggatgatggaagccttcgcacaacgctattgtcagtgcaataacggagtctttcagtccaccgacacatgttacgtgctctccttcgctatcattatgttgaacacctcactgcacaaccctaatgtgaaagataagcctactgtggagagattcatagcaatgaacaggggcattaacgacggcggcgatcttccggaagagcttttaaggaatctgtacgagagcataaaaaacgagcccttcaaaatacccgaggatgatggaaatgacttaacacacacattctttaaccctgatcgggaaggctggcttttgaagctgggaggcgggcgggtgaagacctggaaaaggagatggtttatcttgactgataattgtctctattactttgaatacacaaccgacaaggagcccagaggaattatcccactggaaaatctttccattcgagaagttgaggattccaaaaagccaaactgcttcgaattatatatcccagacaataaagatcaggtaattaaagcttgcaagaccgaagccgacgggagggtggtcgaagggaatcacaccgtttacagaatctccgccccgacccctgaagagaaagaagaatggattaaatgcattaaagcggctatttccagggaccctttctatgaaatgcttgccgcaaggaagaaaaaagtatccagcaccaaaaggcattag

SEQ ID NO: 184547 - DNA, 1020 bp, synthetic construct
  misc_feature 1..1020: note = Description of Artificial Sequence: Synthetic coding sequence
  source 1..1020: mol_type = other DNA
atgcagcggaacaagcaggtggccatgggccggaagaagttcaacatggaccccaagaagggcatccagtttctcatcgaaaatgatctcctgaaaaatacttgcgaggacatcgcccaattcctctataaaggcgagggactgaataagaccgccattggtgattatctgggtgagagggatgagttcaatatccaggtcttacacgccttcgtcgaactgcatgagtttaccgatctgaatctcgtgcaggcacttagacagtttctctggtcctttcggctgcctggcgaggcccagaaaatcgataggatgatggaagcttttgcccagcggtattgccagtgtaataatggggtgttccagagcactgatacatgttacgtcctgtcatttgccattattatgttgaacaccagtctccacaaccccaacgtgaaagataagccaacagtggaaaggttcattgcaatgaacagaggaataaacgacggcggcgacttgcctgaggagctcctgcggaatctgtacgaaagcatcaagaatgagccatttaagatccctgaggacgacggaaacgacctgacacatacgttctttaatccagatagggaaggctggttgttaaaattaggtggaggccgcgttaaaacctggaagagacgatggttcatcttaactgataactgcctgtactatttcgagtataccactgacaaagagccccgcggcattattcccttagaaaatctatccatccgagaggtagaggatagcaaaaaacccaactgctttgaactgtatatccccgataacaaggatcaggtcatcaaagcctgcaagactgaagcagatgggcgcgtagtggaaggaaaccatacagtgtataggatatccgcccctacgcctgaagagaaggaggagtggatcaagtgcatcaaggccgccatatcgcgggatcccttttatgagatgcttgccgccaggaaaaagaaggtcagttcaaccaagaggcattag

SEQ ID NO: 184548 - DNA, 1080 bp, synthetic construct
  misc_feature 1..1080: note = Description of Artificial Sequence: Synthetic coding sequence
  source 1..1080: mol_type = other DNA
atgagcctgcagcggctgctgcagcacagcagcaacggcaacctggcagatttttgcgcgggcccggcctattcatcatactccaccttaacaggatccctcacaatggacgacaatcggaggatccagatgttggccgatactgtggccacgttgcctaggggcagaaaacagttggcgctgacccggagctcttcactgagtgatttttcctggagtcagagaaagctcgtaaccgtcgagaaacaggataacgaaaccttcggtttcgaaatacagtcctatagaccgcagaatcagaatgcttgctcttcagagatgttcactcttatttgcaagattcaggaggactctccagctcactgcgcaggcttgcaggccggcgatgtgttggccaacataaatggagtgtccacagaaggttttacctacaaacaggtggtggatctcattcggtcttccggcaacctcctcaccattgagacactgaatgggacaatgatactcaaacggacggagctggaggccaagctgcaggtcttgaagcagactctgaagcagaagtgggtggaatatcggtcattgcagctgcaagagcaccggctgctccacggtgatgccgcaaattgcccttcactggaaaacatggaccttgatgaactgtcactgttcgggcctctgcctgggccaggacctgctctggttgatcgcaacagactgtccagtgagtctagctgtaaaagctggcttagcagtatgacaatggattcagaagatgggtatcagacctgcgtgtcggaagactcttcgcgcggcgcattttccaggcaaacttcaactgacgacgagtgctttatacccaaagaaggcgacgactttctcaggcgctcttcctctagaagaaacaggtctatctccaataccagtagtgggtcgatgtccccactgtgggagggaaatctcagttctatgttcgggaccctccctcgaaagagccgtaagggcagcgttcggaagcagctcttgaagtttatccctggcctgcacagagcggtggaagaagaggagtcccgcttttag

SEQ ID NO: 184549 - DNA, 762 bp, synthetic construct
  misc_feature 1..762: note = Description of Artificial Sequence: Synthetic coding sequence
  source 1..762: mol_type = other DNA
atgttcaccctgatctgcaagatccaggaggacagccccgcccactgtgccgggctgcaggcaggggacgttctggctaacatcaacggagtaagtactgagggtttcacatacaagcaagttgtggacctgattaggtcaagcggcaatctcctaactattgaaaccctgaatggaacaatgatcctgaaaagaaccgagcttgaagccaaactacaggtcttaaagcagacactgaagcagaagtgggtcgaatatcgttctctacagttgcaggagcacaggctgctgcatggcgacgctgcaaactgtccgtccctcgagaacatggaccttgacgaactgtcacttttcgggccgctgccaggccccggacctgcccttgtggataggaataggttgtcctccgagagttcctgcaagtcatggctgtcatcaatgactatggattccgaggatgggtaccagacgtgtgtgagtgaggattcttcccgcggcgccttttctcggcagacctccaccgacgatgagtgtttcatccctaaagaaggtgatgacttcttacgccgctctagtagccgcagaaaccgctctattagcaatacttcctctggttccatgagccctctctgggaaggcaacttgtcctcaatgttcgggaccttacccaggaaatcacgcaagggaagcgtacgaaaacagttgctcaaatttatcccgggcctgcatagagccgtggaggaggaagaatctagattctag

SEQ ID NO: 184550 - DNA, 1203 bp, synthetic construct
  misc_feature 1..1203: note = Description of Artificial Sequence: Synthetic coding sequence
  source 1..1203: mol_type = other DNA
atggaggacggcgtgtacgagccccccgacctgacccccgaggagagaatggagttggaaaatataagacggaggaagcaagaactcctggtggagatccagcggctgagagaagagctgagcgaggccatgtcggaagtggaggggctggaagccaatgagggctcaaaaactcttcagcggaataggaaaatggcgatggggcgaaagaagttcaacatggaccctaagaaaggcatacagttcctggtagagaacgagttacttcagaacactcctgaggagatcgccagattcctgtataaaggtgaaggccttaacaagacggccatcggggactacctgggcgaacgggaggaacttaaccttgcagtgcttcatgcattcgtcgatctgcacgagttcactgatctcaacttagtacaagctctgaggcagttcctttggtcattccgtctcccaggggaggctcaaaaaattgatcgcatgatggaagcgtttgcacagcggtactgtttgtgcaatcccggggtgtttcagagcaccgacacatgctacgtcctgagttttgcggttatcatgttgaacacaagcctccataatccaaacgtaagagacaagcccggcctggaacgcttcgtagccatgaacaggggtattaatgaagggggcgatcttcccgaagagctcctgcgtaacttgtatgactctatccggaacgagcccttcaaaattcccgaggacgacgggaatgaccttactcacactttttttaatcctgatcgggaaggctggttactgaagctggctggtggtcgtgtcaagacctggaaaagacggtggtttattctcaccgataactgcttatattattttgaatataccacggataaggagccccgtggtatcataccactcgagaacttgagcataagggaagtggacgacccacgcaagcctaactgttttgagttgtacatccctaacaataagggccaactaataaaagcctgtaaaacagaagccgacggccgcgtggtcgagggcaatcatatggtgtatagaatctccgcaccgacacaggaggagaaggacgaatggattaaatctatccaagccgccgtttcagtggatcctttctatgagatgttagccgcacggaaaaaaaggattagcgtcaagaaaaagcaagagcagccttag

SEQ ID NO: 184551 - DNA, 1200 bp, synthetic construct
  misc_feature 1..1200: note = Description of Artificial Sequence: Synthetic coding sequence
  source 1..1200: mol_type = other DNA
atggaggacggcgtgtacgagccccccgacctgacccccgaggagaggatggagctcgagaatatccgcagaaggaaacaggaactgctggtcgagatccagcggctgcgggaggagttaagtgaggcaatgagcgaggttgaagggctcgaagcgaacgaaggtagtaaaacattacagagaaaccgaaagatggcaatgggtaggaagaagttcaacatggaccccaaaaagggaattcagttcctcgtggagaacgagctcctgcagaacacgcctgaagaaattgcacggttcttatataagggggagggcctaaacaagactgccatcggggattacctcggtgagagggaggagctgaatttggcagttctgcatgcttttgtggatctgcacgagtttacggatctgaaccttgtccaggcgttgcggcagtttctgtggagctttagacttcccggggaagctcagaaaatcgataggatgatggaggcattcgctcaacggtattgtttatgcaacccaggggttttccaaagcactgacacgtgctacgtattgtccttcgcggtgatcatgttgaacactagcctacacaacccgaatgtgagggataaaccaggactggaacgattcgtggcaatgaaccgcgggattaacgaaggcggagacctgcccgaagagttgctgaggaatctgtatgatagtatccggaatgagcctttcaagatccctgaggacgatggaaatgacctcacccacacttttttcaacccggaccgcgaggggtggctgttaaaactcggggggcgagtcaagacgtggaagaggcgctggttcatcctgaccgataactgcctgtattactttgagtataccacagacaaagaaccacgagggatcatccccctcgagaacctctccattcgagaagtggacgatccccgaaaaccaaactgcttcgaactgtacattcctaacaacaaagggcaactgatcaaagcatgcaaaaccgaggctgatggaagggtcgtcgaggggaatcatatggtctatagaataagcgcccctacccaggaagagaaagacgagtggattaaaagcatccaagccgcagtttcagtcgatccattctacgaaatgctggcagcaagaaagaagcgtatctcagtgaagaagaaacaggagcagccctag

SEQ ID NO: 184552 - DNA, 1200 bp, synthetic construct
  misc_feature 1..1200: note = Description of Artificial Sequence: Synthetic coding sequence
  source 1..1200: mol_type = other DNA
atggacgaggacggcggcggcgagggcggcggcgtgcccgaggacctctctctggaagagcgcgaggaactgttggatattcgacggaggaagaaagaactgatcgatgacattgagcgattgaagtacgagatcgccgaggttatgacagaaattgataacttgacttccgtggaggagtctaagaccacccagcgtaataaacagatcgccatgggacgcaaaaaattcaacatggacccaaagaaagggatacagttccttattgagaatgaccttctgcagagttcacccgaagatgtggctcagttcctgtataagggcgagggattgaataagacggtgatcggcgactacttaggcgaacgagacgagtttaacattaaagtcctgcaggctttcgtggagctgcatgagttcgcagaccttaacttagtgcaagctctcaggcaattcttatggtcttttcgccttcctggtgaggcacagaaaattgataggatgatggaagccttcgcctcaagatattgtctctgcaatcccggtgttttccagagcacggatacatgttacgtactgagcttcgccattatcatgctgaatacttccctgcacaatcataatgtgcgtgacaaacctaccgctgaacgctttatagccatgaaccggggcatcaacgaggggggtgatctgcccgaggaactgctgcgaaatctttatgaaagcatcaaaaacgaaccatttaaaatcccggaggatgacgggaatgaccttacgcacactttctttaatcccgatagagaggggtggctcctgaagttagggggaagagtcaagacctggaaacgcagatggttcattcttacagataattgcttgtattacttcgagtataccactgacaaggagcctagggggataattcctctcgagaatttgtctattcgcgaggtggaagatccaagaaaacccaattgtttcgaactttataaccccagccataagggccaggtcatcaaagcttgtaagactgaggccgacggacgtgtggtcgaaggcaatcacgtcgtgtataggatcagtgccccgagccctgaggaaaaagaagagtggatgaaaagcattaaggcgagtatctcgcgggaccctttctatgatatgttggccaccagaaaacgcagaatagcaaataagaagtag

SEQ ID NO: 184553 - DNA, 945 bp, synthetic construct
  misc_feature 1..945: note = Description of Artificial Sequence: Synthetic coding sequence
  source 1..945: mol_type = other DNA
atggccctgccccagctgcagaccgccatgctggccgccttcctgtgggaccccagggatgtcgtcctcacagcccagcccggagccgagcaatgcgccgagtcatctcagcatattcgcattctccagccccagtttagacttatccggctgaggttttggaagctctatattcagaggagggtccaggcctggcagtttctgtggtcattcagactcccgggcgaggcccagaagattgacagaatgatggaagcatttgcaagtcgatactgcctgtgcaacccaggagtatttcagtctaccgatacatgctacgttttaagcttcgccatcattatgttgaacacttctttgcacaatcacaatgtgcgggacaaacctacagccgagaggtttatcgcgatgaacagagggatcaatgaaggcggggaccttccagaggagctccttaggaatttgtacgagtctatcaagaacgaaccatttaagatccccgaggacgacggcaacgacctcacccacaccttttttaaccctgaccgcgaaggctggctgctcaaattgggcgggcgcgtgaagacttggaaaagacggtggtttatattgacggacaattgcctatattactttgaatatacaaccgacaaagagccccgcggtataatcccattggagaacctatcaatccgcgaggttgaagatccacgcaagccaaattgcttcgaactgtataatccttcccacaaaggtcaggtgattaaagcttgtaaaaccgaggctgatggacgggtggtggagggcaatcacgtagtatacagaatctcagccccatctcctgaagagaaggaagagtggatgaaatccattaaagcgagtatttctcgcgaccccttttatgatatgctcgcgaccaggaaaaggcggattgcgaacaagaaatag

SEQ ID NO: 184554 - DNA, 1185 bp, synthetic construct
  misc_feature 1..1185: note = Description of Artificial Sequence: Synthetic coding sequence
  source 1..1185: mol_type = other DNA
atggacctgtgccaccccgagcccgccgagctgagcagcggcgagaccgaggaattacagcggatcaaatggcacagaaagcaattgttagaagacatccagaagctgaaggatgagatcgctgacgtgttcgcccagattgactgtttcgaaagcgctgaggagagtcgcatggctcagaaggaaaaagagctctgtatcgggcggaagaaattcaatatggatccagcaaagggtattcagtattttatagagcataagctccttacgccggatgtgcaggacattgcaagatttctctacaagggcgagggtcttaataagacagcaatcggtacttacctgggggaacgggatccaatcaacttgcaggtgctgcaggccttcgtggattgccatgaattcgcgaacctcaatctggttcaggcccttagacagttcctctggagcttccgccttccaggagaggctcagaagattgaccggatgatggaagcgttcgcgacacgctattgtctttgcaatcccggcgtgtttcaatccacagatacatgctacgtattaagttttagtataataatgttaaacacaagcctgcacaacccgaatgtgagggatcgccctccgttcgagaggtttgtctcaatgaatcgtggcatcaacaacggatctgatctcccggaagaccagctgagaaacctttttgattctataaagtcagaaccattttcaattcccgaggacgatgggaatgatctgacgcacacctttttcaatcctgacagagaaggctggctgttgaaactgggagggcgcgtcaaaacctggaagcgaagatggttcatcttgactgacaactgtctgtactattttgaattcaccacagacaaggagccaagggggattatacctctggagaatcttagcgtccagaaagtagacgatccgaaaaagccattctgcttggaattatacaatccgagttgcaggggacaaaagataaaagcctgtaaaaccgacggcgacggacgagtggtcgagggtaagcatgaatcctaccgcataagcgcaacaagcgctgaggaaagagatcagtggattgagtctatccgggccagtatcacccgcgtaccattttatgatctcgtgtccacacgcaaaaagaagatcgcctcaaagcaatag

SEQ ID NO: 184555 - DNA, 474 bp, synthetic construct
  misc_feature 1..474: note = Description of Artificial Sequence: Synthetic coding sequence
  source 1..474: mol_type = other DNA
atggacctgtgccaccccgagcccgccgagctgagcagcggcgagacggaggaactccagaggatcaaatggcaccgtaaacaactccttgaggatatccaaaaattgaaggacgaaattgcggatgtgttcgcccaaattgactgtttcgaatcagccgaggaatcccggatggcccagaaggagaaagaactatgcatcgggcggaaaaagtttaacatggaccccgccaagggaattcagtatttcattgagcacaagttactcacccccgatgttcaggacatcgcgagattcctctacaagggcgaagggctaaataagacagctattggcacatacctcggtgagcgcgaccccatcaacctacaggttttgcaagccttcgtggactgtcacgaatttgcaaatttgaacttagtacaggctttgagatttcgggagggagcgtctgacctgggctttggcgggtag

SEQ ID NO: 184556 - DNA, 876 bp, synthetic construct
  misc_feature 1..876: note = Description of Artificial Sequence: Synthetic coding sequence
  source 1..876: mol_type = other DNA
gaccggagcaccggccacctgttcccccggggcgtgggcatggacctttgccatcctgagcctgcagaactctcttcaggagagactgaagaattacagagaattaaatggcacaggaagcagctcctcgaagatattcagaagcttaaggatgagatagcagatgtgttcgcccagattgattgttttgaatcggccgaggaatctagaatggctcagaaggagaaggagctgtgcatcggtagaaaaaagttcaatatggacccggcaaaagggatccaatatttcattgagcataaactgctgactccagatgtgcaagacatcgctcgcttcctgtacaagggagaggggttgaacaaaaccgccattggcacttatctgggcgaacgagatcctattaacctgcaagtcctgcaggccttcgtggactgccacgagttcgccaacctgaatctagtgcaggccctccgccagtttctgtggtctttcaggctgcctggagaggctcagaaaattgacagaatgatggaagcatttgcaacccgctattgcctgtgtaaccccggggtttttcaaagcacggatacctgttacgtccttagcttcagtatcatcatgctgaacacatctctccataatccaaatgtgcgggaccgtccaccttttgagcggttcgtctctatgaatcgaggcataaacaacggctccgatttgccagaagatcagctgcgggtgacctgggagtgtagccaacggaggagtcgggaaaggactttccagaaggaagaggttgcgcgaaccgaggcatgccctgactgggaacgcagaggcgttcagtgtggaagggaacccctcagacagcaccaggagtag

SEQ ID NO: 184557 - DNA, 444 bp, synthetic construct
  misc_feature 1..444: note = Description of Artificial Sequence: Synthetic coding sequence
  source 1..444: mol_type = other DNA
tgaacccacaccagcggcagcctgagcagccgggacagccaggccggggactccgcgtcgagagccggaggcagagtgaaaacatggaagcgaaggtggttcattctgacagataattgtctgtattacttcgaattcactaccgacaaggaacctagaggaatcattccccttgaaaatctgtctgttcagaaggtggatgatcccaaaaaacccttctgcctggagctctataaccctagctgcagaggacagaagattaaagcatgcaagactgacggtgacggtcgggtggtcgagggaaagcacgagtcataccgaatctctgctaccagcgcagaagagagagaccagtggatagagtccatcagggccagtattacacgcgtccccttttacgatctagtcagtacacgtaagaaaaagatcgcatccaagcagtag

SEQ ID NO: 184558 - DNA, 354 bp, synthetic construct
  misc_feature 1..354: note = Description of Artificial Sequence: Synthetic coding sequence
  source 1..354: mol_type = other DNA
atggacctgtgccaccccgagcccgccgagctgagcagcggcgagacagaggaactgcaaagaatcaagtggcatagaaagcagctcctcgaggacattcagaagctgaaagatgaaatcgccgatgtgtttgcacagatcgattgcttcgagtctgccgaagaatcccggatggctcagaaagagaaagagctctgcattggaaggaaaaagtttaatatggaccctgctaagggcattcaatacttcatcgagcataagctactgaccccagacgttcaggatattgctcggtttctatacaaaggagagggactcaataaaaccgcaattggtacatatctgggagagtag

SEQ ID NO: 184559 - DNA, 777 bp, synthetic construct
  misc_feature 1..777: note = Description of Artificial Sequence: Synthetic coding sequence
  source 1..777: mol_type = other DNA
atggtgctgtgcgtgcagggcccccggcccctgctggccgtggagagaaccggacaacgtcctctctgggcccccagcctcgagttgcccaaaccagtgatgcaaccactgccagcaggcgcctttttggaagaggtggccgaggggacccctgcccagacagagtccgaacctaaggtgcttgaccccgaagaggaccttttgtgtatcgccaagacgttctcctatttacgtgagagcggctggtattggggcagcattacagccagtgaggctagacagcacctgcagaagatgccagaaggtactttccttgtgcgagattccactcacccgtcctacttattcacactgtccgtcaaaaccacacggggaccaacaaatgtccgtattgagtacgctgactctagttttcgcctcgactctaactgcttatcccgtcctcgtattctcgctttccctgacgtcgtgtccctggtacaacattacgtggcttcatgtactgctgatacaagatccgactcccccgaccctgcgccaacccctgctctccccatgccaaaagaggacgcaccttccgatccagccctccctgccccgcctcccgctaccgcagtccacttgaagctggtgcagcctttcgtacgccgttcctccgcgcggtctctccagcacctgtgtagattggtaattaaccggttagtcgctgacgtcgattgtttgccactgcccaggcgtatggcagattacctgaggcagtaccctttccagctgtag

SEQ ID NO: 184560 - DNA, 828 bp, synthetic construct
  misc_feature 1..828: note = Description of Artificial Sequence: Synthetic coding sequence
  source 1..828: mol_type = other DNA
atgtacctggagcacaccagccactgcccccaccacgacgacgacaccgctatggatacccccttgccacgccctcggcctctcctggctgtggaacggactgggcaaaggcctttatgggcccctagcctggagctgcctaagcctgtgatgcagccccttcctgccggggctttcctggaggaggtggcagagggcactcccgctcagactgaaagtgagcccaaggtcttggatcctgaagaagatctcctctgtattgccaaaacttttagctacttgagagagtctggatggtactgggggtccatcacagcgtctgaggcccgtcagcacttacagaagatgcctgaaggcactttcctggttcgcgattctacccacccgagctacctgtttacactcagtgtgaaaacaactaggggaccaacaaacgtgaggattgagtacgccgattcttcatttcgactggattcaaactgcctaagtcgtcctcgtatactcgccttccctgatgtcgtgtccctggttcagcactatgtcgctagctgtacagcggacacacgaagcgactccccagatcctgcacccacaccggcactgcccatgccaaaagaggatgctcccagcgaccccgccttgcccgcccccccacctgcgacagccgtccatttgaaattagtccagccttttgttcgccggtcaagtgcccgttctctgcagcatttgtgccgattggtgatcaataggttagttgcggatgtcgactgtctgcctcttcccagacggatggccgactacctgcgccaatacccgtttcagttgtag

SEQ ID NO: 184561 - DNA, 1269 bp, synthetic construct
  misc_feature 1..1269: note = Description of Artificial Sequence: Synthetic coding sequence
  source 1..1269: mol_type = other DNA
atgcccgccggccggcggggccccgccgcccagagcgcccggcggccaccacctctcctgcctctactgctgttgctgtgtgtacttggggccccaagggcgggcagtggggcgcacaccgcagtcatatcaccacaagatccaacgttgctgattggcagctcactgttggcaacttgctctgtgcatggcgatccacctggcgctaccgccgaaggtctgtattggacattgaacggccggaggttaccacccgaactgtcacgggtgctgaacgcatccacgctcgcactagctctggcgaatctaaatgggtccagacagaggtctggcgacaaccttgtgtgtcacgcccgtgacgggtccatcttggccggcagctgcttgtacgttggactgccacctgaaaagcccgtgaacatcagttgctggtctaagaacatgaaggatttgacgtgtcggtggacaccaggggcccacggggaaacttttctacatactaattactcccttaagtataagctgaggtggtacggacaagataatacctgcgaggagtaccacaccgtgggcccacattcgtgccacattcctaaggatctggctctgtttacaccttacgagatctgggtagaggccaccaatcggctcggaagtgcaaggagcgatgtgctgacactggacatactggatgttgtgaccaccgatccgcccccagatgtgcatgtcagcagggtcggcgggctggaagatcagctttcagtcaggtgggtcagtcctccagccctcaaggattttttattccaggccaaataccagattcggtacagggtggaggactctgtggattggaaggtagtggacgacgtgtcaaatcaaacttcctgcagacttgccgggctgaagccgggcactgtttactttgttcaggttaggtgcaaccccttcgggatttacggctctaagaaagccggcatttggtctgaatggtctcatcccaccgcggccagtactcctagaagtgagcgaccaggacctgggggcggcgcatgtgaaccgcgcggcggagagccctcgagcggacccgtgcggcgtgaacttaaacagttcttagggtggcttaaaaagcatgcctactgttccaatctctcctttcggttgtacgaccaatggcgagcttggatgcagaaatcacacaaaaccagaaatcaagatgaaggaattctccccagtgggcgtaggggaacagcacgcggtcctgcgcgctag

SEQ ID NO: 184562 - DNA, 702 bp, synthetic construct
  misc_feature 1..702: note = Description of Artificial Sequence: Synthetic coding sequence
  source 1..702: mol_type = other DNA
atgggccggctggtgctgctgtggggcgccgccgtgttcctgctggggggctggatggcactgggacagggcggggcggccgagggagttcagatacaaataatctatttcaatcttgagacagtccaggtgacctggaatgctagtaagtactcccgcaccaatctgaccttccactaccggttcaatggagatgaagcttatgatcagtgcaccaattatttgctgcaggagggtcatactagtgggtgccttctggatgctgagcagcgggacgatattttgtacttctctatccgaaatgggactcacccagtcttcacagcctccagatggatggtatactacctcaaaccaagttcccctaaacacgtgcgcttctcctggcaccaggacgcagttaccgtcacttgttccgacctctcatatggcgacctgctttacgaggtacagtaccgctctcctttcgacacagagtggcagacacagagcaggagcgttactcaagccggtgtgcaatggtgcgatctatgccttctccagccatcaccacctagatttaagaggttctcttgtttaagcctgccctcgtcatgggactaccgccatcctccaccccgcctcgccaacttctgcattatttccagagacggagtgtcaccttgttggccaggttggtcacgcacatgtgatctccgatag

SEQ ID NO: 184563 - DNA, 771 bp, synthetic construct
  misc_feature 1..771: note = Description of Artificial Sequence: Synthetic coding sequence
  source 1..771: mol_type = other DNA
atgggccggctggtgctgctgtggggcgccgccgtgttcctgctgggaggctggatggcactggggcagggcggcgcagccgagggcgtccagattcagatcatctactttaatcttgaaaccgtacaagtgacctggaatgcatccaagtacagccggacaaacttaacttttcactatagatttaatggcgatgaggcctatgaccagtgtactaactacctcttgcaggaaggccatacgagcggctgtcttctggatgctgaacaacgcgacgatatcctgtactttagcattcgcaacggcacacatccagtattcaccgcaagccgatggatggtgtactatctgaaaccttcatctccaaagcatgtccgcttcagctggcatcaggatgctgtcactgtgacatgtagcgacctgagttacggagatctcctttatgaggttcagtaccgctcacctttcgataccgagtggcagagtaagcaagagaatacatgtaatgtcactattgagggactggacgctgagaagtgttacagcttctgggtcagagtgaaggcaatggaggatgtgtatggtcctgacacatacccctccgattggagcgaggttacctgttggcagagaggagagatccgggatgcttgtgccgagacgcccacaccacccaaacctaagctctccaagtttattttgatcagtagtctcgcaattttactgatggtgtccctcctcctgctgagcttatggaaactgtggcggtag

SEQ ID NO: 184564 - DNA, 768 bp, synthetic construct
  misc_feature 1..768: note = Description of Artificial Sequence: Synthetic coding sequence
  source 1..768: mol_type = other DNA
atgggccggctggtgctgctgtggggcgccgccgtgttcctgctgggcggctggatggccttgggtcagggaggggccgctgaaggtgtgcaaatccaaattatctactttaacctggagaccgtgcaagtgacttggaacgcttcgaaatacagtagaacaaatttgacatttcactatcgcttcaatggagatgaggcctacgatcagtgcaccaactatttgctccaagaggggcacactagtggctgcctgctggatgctgaacaaagagatgacatcctgtatttctctatccgaaacggaactcacccggtattcactgcaagccgctggatggtttactatctcaagccctccagcccaaagcacgtccggttctcctggcaccaagacgccgtcactgtgacttgtagtgacctatcctatggcgacctgctttatgaggtgcaataccggtcgccttttgacacagaatggcagagtaaacaggaaaatacctgcaacgtgacaatcgagggactggatgccgagaaatgctattctttctgggtgcgggtgaaggctatggaggacgtatatggacctgacacctacccgagtgactggtccgaagtgacctgctggcaaaggggggaaatcagggacgcctgcgctgagacgcctacgcctccgaaacctaagctgagtaagtttatactgattagctctctggctatcctgctgatggtgtctctcctacttttgagcctctggaaactgtggtag

SEQ ID NO: 184565 - DNA, 411 bp, synthetic construct
  misc_feature 1..411: note = Description of Artificial Sequence: Synthetic coding sequence
  source 1..411: mol_type = other DNA
atgcggacccccggccccctgcccgtgctgctgctgctgctggccggagcgccagccgcccggcctaccccccccacgtgctactcgcggatgcgcgcgcttagccaggagataacgcgggatttcaatttgttgcaggtatcagaaccctctgagccatgcgtgcgctacctccctcgcctctacctggacatccataactactgcgtgttggataagctgagggacttcgtagccagcccgccatgctggaaagttgcacaggttgacagcttgaaggataaggccaggaagctctatacaattatgaacagcttctgccgaagagacctggtgttccttctcgacgactgtaatgccctggaatacccgattcccgtgaccactgttcttcctgatcgccagaggtag

SEQ ID NO: 184566 - DNA, 3762 bp, synthetic construct
  misc_feature 1..3762: note = Description of Artificial Sequence: Synthetic coding sequence
  source 1..3762: mol_type = other DNA
atggccgcccaggtgaccctggaggacgccctgagcaacgtggacttgctggaagagcttcccctgccggatcagcagccatgtatcgagccccctccaagttcattgctgtaccagcccaactttaatactaatttcgaagacagaaatgctttcgttacaggcatcgcaaggtatattgagcaggctactgttcattcctcgatgaacgaaatgttggaggagggccaggaatatgcggtcatgctatacacgtggaggtcttgttccagggccatccctcaggtgaagtgtaacgagcagcccaatcgcgtggagatttatgagaagacggtggaggtgttggaacccgaggtcaccaagctcatgaactttatgtattttcagagaaatgcgatcgagcgcttctgcggagaggtccgccgcctgtgccacgcagagagaagaaaggacttcgtttcagaagcttatctgattactctggggaagttcattaacatgttcgccgtgttggatgagctgaagaatatgaagtgttcagtgaagaatgaccatagtgcctataagagggctgcacagttcctaagaaaaatggctgatcctcagagcatacaggaatctcagaatcttagtatgttcttggctaaccataacaagatcacccagtctctgcagcagcagcttgaggtgatctctggttacgaggagctgcttgccgacattgtcaacctctgcgttgactactatgagaacagaatgtatctgaccccttctgagaaacatatgttgcttaaagtcatgggattcggactgtacttgatggatggttcagtgagtaacatatataagttagatgccaagaaaagaataaatttgagcaagattgataagtatttcaaacaactgcaggtcgtgcctctgtttggtgacatgcaaattgagttagccaggtacatcaagacatcagcccattacgaggagaacaagtccaggtggacttgtactagtagtgggtccagccctcaatataacatttgtgaacagatgattcagattagggaggaccatatgcgattcatttcggagctggcccgctactctaattctgaggtcgttaccggctccgggagacaggaagcccagaaaacagacgctgaatacagaaagttgttcgatctagcgctccagggtctccagctgctgagtcagtggagtgcacacgttatggaagtctactcctggaaactcgtacatcctaccgataagtacagcaataaagactgtcctgactcagcggaggagtacgagcgcgcgactaggtacaattacacctccgaagagaaatttgcgctagtcgaggtgatcgccatgataaagggtctgcaggtcttgatgggaaggatggaatctgtgtttaaccacgccatccgtcatacagtgtatgcagcgctgcaggacttttctcaggtcaccttgcgcgaaccccttcgccaggcgattaagaaaaaaaaaaatgtgattcagtctgtgctgcaggccatccgaaaaacggtgtgtgactgggagactggacatgagccttttaacgaccctgcattgcggggggaaaaggacccgaaaagcggcttcgatattaaggtccctagacgcgccgtcgggccttcatctactcagctctacatggtgaggactatgctggaaagtcttatcgccgataagtccgggagtaaaaagacgctacgatcatctcttgagggccccacaatccttgatattgagaagttccatagggagtcctttttctacactcacctcattaatttttcagaaaccttgcaacagtgctgcgatttgagtcagctctggtttagggaatttttcctcgaactcacaatgggtcgcagaattcagtttccgattgagatgagcatgccatggattctgacagatcatatcctggaaactaaggaggcgtctatgatggagtacgtgctgtacagtttggacctttataatgacagcgctcactatgctctaaccaggtttaacaagcagtttctgtacgatgagatcgaggcggaagttaatctgtgcttcgatcagttcgtgtacaaactggctgatcagatctttgcatactacaaggtcatggctggaagcctgctcctggataaaaggcttcggagtgagtgcaaaaatcagggagcaactatccatttaccaccctcgaataggtacgagaccctgctgaagcaaagacacgtgcaactgttaggcaggtcaattgatttgaacagacttataacgcagcgagtctcagctgctatgtacaagagtcttgaattggcaatcgggcggtttgagagcgaggatctgacaagtatcgttgagttggatggcttgctggagattaacagaatgactcacaaactgttatcaagatatctgactttagacggcttcgacgccatgttccgcgaagccaaccataacgtgagcgcaccatacggccgcataacgctgcatgtgttctgggaattaaactatgattttctgcccaattactgctataacggctctacaaaccgcttcgtccgcaccgtcctgccctttagtcaggagttccagagagataagcagccgaacgcgcagccacagtacctccacggaagcaaggctctgaatctggcctattcttcgatctacggctcataccgcaacttcgtcgggcccccgcacttccaggttatctgccggttactcgggtatcaggggatcgccgtggtgatggaggaattacttaaggtggtgaagtcactcctgcaggggacgatactgcagtacgttaagacactcatggaggtgatgccaaaaatctgtcgattgccacggcatgaatacggatccccaggaatcctagagttctttcatcaccaacttaaagacatcgtggaatatgcggagctgaaaacagtgtgttttcagaacctcagagaggtcggcaacgctattctcttctgcttgctaattgaacagtcactgtccctggaggaggtgtgcgatctactacacgccgctccctttcaaaacatactacctagggttcacgtcaaggaaggcgagcgcctagacgccaaaatgaagaggctggaatctaaatacgctccacttcatctggtgcctctcatcgaacggctgggcaccccacaacagatcgccattgccagagaaggagacctgctcaccaaagagcggctctgctgtggcctgtctatgttcgaagtgatcctgactcggatacgcagttttctcgatgatccgatttggagaggacctctgccttcaaatggcgtgatgcatgttgatgagtgcgtcgagttccaccggctgtggtcagccatgcagtttgtgtactgtatccccgtcggtacccatgagtttactgtcgaacaatgctttggggatgggcttcactgggcaggctgtatgattattgttctcctgggtcagcagagacgcttcgccgttctggacttctgctatcatttgttaaaggtgcaaaaacatgacggtaaagacgaaataatcaagaatgttcccttaaagaagatggtcgaacgtatacgaaagttccagatcctgaacgacgagatcataacgatcctcgataagtatctgaaaagcggcgatggagaaggcactcccgtggagcatgtacgatgttttcagccacctatccaccagtcactggcttcgtcatag

SEQ ID NO: 184567 - DNA, 3768 bp, synthetic construct
  misc_feature 1..3768: note = Description of Artificial Sequence: Synthetic coding sequence
  source 1..3768: mol_type = other DNA
atgggccccaagcacgtgctgcggcagcccggccccagcgagcggcaccaccctgaagtgcccgcctggacccccagggcgggaccaccgtgctggctgtgtcgccagcggtggggttggacccttcacccccctggccggggatgtcccgcgctgctgttatccgaacctaggatggcggcgcaggtgaccctggaagatgcactttcaaatgttgatctgctggaggaactgcccctgccggatcagcaaccctgcattgagcccccgccgagctctctcctgtaccaaaacgagatgttagaagagggtcaggaatacgctgttatgctgtacacctggaggagctgcagtagggctatcccacaggtcaagtgcaacgaacaacctaacagggttgagatctatgaaaagactgtggaggtgctggagcctgaagtgaccaaacttatgaacttcatgtattttcagcgcaatgcgattgagcgcttttgtggggaggtaaggcggctgtgccacgcggagcgacgtaaagattttgtttccgaggcataccttatcaccctaggtaagttcatcaatatgtttgccgtcctcgatgagctgaagaatatgaagtgttctgtcaagaatgaccactccgcttataaaagagccgctcagttccttcggaaaatggccgacccacagtccatccaggagtcacagaacttaagtatgtttcttgccaatcacaataagataacgcaatctctccaacagcagctggaggtgattagcggatacgaagagctgctcgctgatatagttaacctgtgtgttgactactatgagaaccgcatgtacctcaccccaagtgaaaagcacatgctactgaaagtgatgggatttggcttatacttgatggatgggtctgtgtcaaacatctacaagctggacgcgaaaaaacggattaacctgtccaaaattgacaagtactttaagcagcttcaagtggttccactctttggagatatgcagatcgaactagccaggtatatcaagacatccgcgcactatgaagagaataaatcacggtggacatgcacttccagtggttcttcgcctcaatacaacatatgtgagcagatgattcaaattagggaggaccatatgcgcttcatttctgaactggcccgatatagcaatagcgaggttgtgactggatcaggccgccaagaggcacagaaaacagatgcggagtaccggaagttatttgatctggccctgcagggactgcagttgctgtcccaatggagcgcccacgttatggaggtctatagctggaagctggtgcacccgaccgacaagtatagcaacaaggattgtcccgattcagctgaggaatacgaaagagctaccagatacaactatacaagcgaagaaaagttcgcactggtggaagttattgccatgatcaaggggctccaggtgcttatgggaagaatggagagtgtattcaatcatgccattcggcacacagtgtacgctgcattgcaggatttctcccaagtcaccttgagagagccattgcggcaggccatcaagaagaagaagaacgtgattcaatcggtcctgcaggcaatcaggaaaacagtctgtgattgggaaacgggccacgagccattcaacgaccccgccctgcgtggtgaaaaggaccctaagagcggattcgatatcaaagtgccccgtcgggccgtagggcccagctccacacaactctatatggtgcgcacaatgctggagtcgctcattgctgataagtcgggtagcaagaaaacacttcgttcctcactcgagggcccgaccattctcgacatcgaaaagtttcaccgtgaaagcttcttctacacccacctgatcaacttctccgagactttgcaacaatgttgtgacctcagtcagctctggttccgcgaatttttccttgagttgacaatgggccgcagaattcaatttccaatcgagatgagtatgccatggatcctgaccgaccacattctcgagactaaggaggcttccatgatggaatatgttctatactccctcgatctgtacaatgatagtgcccactatgcacttactcggtttaacaaacagttcctctacgatgagatagaggcggaggtcaacctatgttttgatcagttcgtgtataaattagctgatcagatattcgcttattacaaagttatggcaggctcactgctcctagataaaagactgcgctctgagtgtaagaaccagggcgccacaatccatttgcccccctccaaccgctacgagacactgctcaagcagcgccatgtccagctgctcggacgatcaattgacctcaaccggttgataacgcaaagagtgtctgcagcaatgtacaaatcattggagttagctatcggaaggttcgaatctgaagacttgacatctatcgtagagttggacggcttacttgagatcaacagaatgacgcacaaacttctatccagatatttaacactggatggcttcgacgccatgtttcgtgaagcaaaccacaatgtatcagcaccgtatggcagaatcacacttcacgtcttttgggagctgaactacgacttcttgcccaactattgctacaacggcagcacaaatcggttcgtacggactgtcctacccttctctcaagagttccagcgtgataaacagccgaatgctcagccacagtacttacatggctctaaggcacttaatctcgcgtactcttctatctacgggtcctataggaactttgtggggcccccacattttcaagtaatctgtcgcctgctgggttaccaaggcattgctgtcgtcatggaagagctactaaaagtggtgaaaagtcttcttcagggcactatactccagtacgtaaaaacccttatggaagtgatgcctaagatttgtcgactgccacgacacgagtacggctctcctgggattctggaattcttccatcaccagctaaaggacattgtcgaatatgctgagcttaaaaccgtgtgctttcaaaacctgcacgccgctccattccagaatattttgccccgtgtacatgtcaaggaaggtgagcggttggacgcaaaaatgaaacgcctggaaagtaaatacgcaccgcttcatctagtgccacttatcgagcggcttggtacacctcaacaaatcgccatcgcgcgagaaggcgatctgctgactaaggagaggctctgttgtggactgtctatgtttgaagtgatactgacccgaattcgctcattcctggatgacccaatttggaggggtcctctcccctcaaacggcgtaatgcacgtggatgagtgtgtcgagttccaccgcttgtggtctgcgatgcagtttgtgtactgtattcccgtggggacgcacgagttcacggtagaacaatgctttggggacggactgcattgggccggatgtatgattatcgttctattaggccaacaacgaaggtttgccgtccttgacttttgttatcacctactgaaagtccaaaaacatgatgggaaagatgagatcattaaaaatgtccctttgaagaagatggttgaaagaatcaggaaatttcagattctaaatgacgaaataatcacgatccttgacaagtaccttaaatcaggtgatggagaaggcacgcccgtggagcacgtccggtgcttccagcccccaattcaccagagtctcgcgagctcttag

SEQ ID NO: 184568 - DNA, 2469 bp, synthetic construct
  misc_feature 1..2469: note = Description of Artificial Sequence: Synthetic coding sequence
  source 1..2469: mol_type = other DNA
atggccgagagcctgggcagcgccgagctgctgcggcagctgaagtctcttggcatggagcgtctgcttcacgcagtcaatactttcctccgccagagctgcacttacctacctcttctgacgttcggcgggaagacctctttcgtgagcctagacgtctacggcaccgaagctaactgcagtgcgacttcatgcagctttccgaaggcagccgcaacctggcccagaagacaagcccccggtccgttaggagaactggttagaggtccccctgatcagggtgtggcagagcagagcttttctcatgggcttttcgagtttgggatcacaaacgtcccgtgtattttctccccccctcagatgttcccttggattatccaactgtatatggtgagaactatgctcgaaagtcttatagcagacaaaagtggcagtaagaagaccttacggtcctccctggaaggccccaccatattagacatcgaaaagttccatcgggagagttttttttacacccacctgattaacttctcagagacccttcaacagtgctgcgatctttcccagctttggtttcgcgaatttttcctcgaactgacaatgggccgacggatacaatttccaatcgagatgtctatgccatggatccttacagaccatattctggaaaccaaggaagccagtatgatggaatacgtcttgtattccctagacctttacaacgactctgcccattatgccttgactcggttcaacaagcagttcctctatgacgagattgaggccgaggtgaatctgtgcttcgatcagtttgtctacaaactagctgaccagatctttgcatactacaaagtgatggcagggtcattgctgctggataagagactccgctccgagtgtaaaaatcagggggccaccattcacctcccgccatcaaaccgatacgaaaccctgctcaaacagcgccatgtgcagctcttagggcgatcgatcgacctgaacaggctgatcacccagcgcgtatcggcggctatgtataaatctctggagctcgccataggcaggttcgaatccgaggatttaacaagcattgtcgagctagatggtttacttgaaatcaacaggatgacccataaactgctgagccgttatttaactttggatgggttcgacgcgatgtttagagaagccaaccacaacgtcagcgctccctacggaaggatcaccctacatgtgttttgggagcttaattacgacttcctgccaaactattgttataacggtagcaccaataggttcgtccgtaccgtgttgcccttctcacaggaatttcaaagggataagcagcctaacgcccaaccgcaatacctgcatggatccaaggcactgaatctcgcctactcctctatctacggcagctacaggaatttcgtgggcccaccccactttcaagttatttgcagactgctcggctaccagggcatagccgttgttatggaagagcttttgaaagtcgtaaaatctttgttgcagggcaccatcctccagtatgtgaaaacactgatggaggtgatgcctaaaatttgccggttacccaggcacgagtatgggagccctggaatcctggaattcttccaccatcagctgaaagatatagtcgagtacgctgaactaaaaactgtgtgcttccagaacctgagagaggtcgggaatgcgatccttttttgtctgctgattgaacagagcctgtctctggaggaggtgtgtgacctccttcacgcagctccattccagaatattttgccccgtgttcacgtcaaggaaggagagcgcctggatgctaagatgaaaaggttggaaagcaaatatgcaccacttcacttggtccctctcatcgagaggctggggacaccacagcagatcgccatcgctcgggagggggacctgctgactaaagaacgcctctgctgtggcctctccatgtttgaggtgatactgaccagaattcggagcttccttgatgacccgatctggcggggaccacttccttccaacggcgtgatgcacgtcgatgagtgtgttgaatttcatcgcttgtggtccgcaatgcagtttgtgtattgtattccagtgggaacgcacgagttcaccgttgagcagtgctttggggatggtctgcattgggccggatgcatgatcatcgtcctgcttggccagcagcggaggttcgccgtgctagacttctgctaccacctcctgaaagtgcagaaacacgacggcaaggatgaaatcattaaaaacgtgcccctgaaaaaaatggtggagcggattcggaagttccagatcttgaacgacgaaatcataactatcctggacaaatacctgaagagcggagatggcgaggggacgccagtagagcacgtgcggtgtttccagccacccattcaccaaagcctggctagttcctag

SEQ ID NO: 184569 - DNA, 3762 bp, synthetic construct
  misc_feature 1..3762: note = Description of Artificial Sequence: Synthetic coding sequence
  source 1..3762: mol_type = other DNA
atggccgcccaggtgaccctggaggacgccctgagcaacgtggacctgctggaggagttgcccctgcctgatcagcaaccgtgcattgagccgcctccttcttccctgctgtatcaaccgaatttcaacaccaacttcgaagacaggaatgcatttgttactggaatcgctagatatatcgaacaagccaccgtccacagttctatgaatgaaatgctagaggaagggcaagagtacgcagttatgctgtacacatggcgtagctgttctagggctatcccacaagtcaaatgcaatgaacagccaaatcgggtggaaatttacgagaagacggtggaggtgctggagcccgaagtgaccaaactcatgaacttcatgtactttcaaagaaacgctattgagcgcttctgtggagaggtgagaagactgtgtcacgccgaacgaagaaaggattttgtcagtgaagcctatctcatcacattaggaaaattcatcaatatgttcgccgtgttggatgaactgaagaacatgaagtgctccgtcaaaaacgatcactccgcttataaacgggctgcccaattcttaaggaaaatggctgacccgcagtccatacaagagtcacagaacctgtcaatgtttctagctaatcataacaaaattactcagtctcttcagcaacaattagaggtgatctccggctacgaggagctcttggcggatattgttaacctctgcgtcgactattacgagaatcgcatgtaccttacgcctagcgagaaacacatgcttctgaaggtgatggggttcgggctctacctgatggatggtagcgtgagcaacatatacaaactggatgccaagaaaaggatcaacctttccaaaatagataagtacttcaaacaactgcaggttgtgcccctcttcggcgacatgcaaattgaactcgctcgatacatcaaaacttcagcccactacgaagagaacaagagcaggtggacgtgtacaagctcaggcagctcaccccaatataatatttgtgagcagatgatacagatacgcgaagaccatatgcgattcatctcagagctggccagatactcgaacagcgaggtcgttacaggctccggacgccaggaggcgcagaagacagacgccgagtaccgcaagctcttcgacctcgccctccaaggactgcagctactgtcacaatggtcagcacatgtaatggaggtgtattcatggaaacttgttcaccctaccgacaaatactccaacaaggattgtcccgactcagcagaggagtatgaacgggccaccagatacaactataccagcgaggagaagtttgccttggtggaggtgattgctatgatcaaagggctgcaagtgctaatgggtcgaatggagagcgtgtttaaccacgccatacggcatacagtgtatgccgctttgcaagatttttcccaggtaacactgagggaacctctgcgccaggccatcaaaaagaaaaagaacgtcatccaatccgttctgcaggctatccgaaagaccgtctgcgactgggagaccgggcatgaaccattcaatgatccagctcttcgcggtgagaaagaccctaagtcgggctttgacattaaggtgcctagaagggcagtgggtccgtcatctacccagctgtatatggtgagaacaatgctagagagtcttatagccgacaagtctgggtctaagaaaacactccgttcatcactcgagggccccaccatcctggatattgagaaatttcaccgcgaaagcttcttttatacccacctcattaatttctcagaaacattacaacagtgttgtgatctatcacaactgtggtttcgggaatttttcctggaactgaccatggggcgccggattcaatttccaatcgagatgagcatgccatggattctgacggaccacattctcgagaccaaggaagctagcatgatggaatacgtgctctactcactagacctgtacaacgactcagctcattacgccctgaccagattcaacaaacaattcctttatgacgagatagaggccgaggtcaatctttgtttcgaccagtttgtgtacaagctggcggaccaaatctttgcctactacaaggttatggccggttcactcctgttggacaaacgtctgcggtctgagtgcaaaaaccagggtgcaaccattcaccttccacctagtaatcggtacgaaacgctcctgaagcagcgacatgtacaactgctcgggcgctccattgatctcaatcggttaatcactcaaagagtctccgcagccatgtacaagtcgctggaactggccatcgggcggttcgagtccgaggacctgacatctatcgtcgaactcgacggactgctggagatcaacagaatgacccacaaacttttgtcccgatacctgacactggacggatttgatgcaatgtttcgggaggcaaatcacaacgtgtctgccccctacggaagaataactctccatgtgttctgggaactcaattacgattttctccccaactactgttacaatggatctacgaaccggtttgtgaggacggtccttcctttctcccaggagttccaacgggataaacagcctaatgcacagccccagtatctgcatggttctaaggccctgaatctcgcttactcctcaatttacggtagttatcgcaacttcgttggccctccccattttcaggtgatatgtaggcttctcggctatcaaggtatcgccgttgttatggaggagcttctgaaagtcgtcaagtccctgctgcaggggactatcctgcagtacgtgaagactctgatggaagtaatgccgaagatttgccgcctgccaagacacgaatacggtagtcctggcatcctggagttctttcaccaccagctgaaggatattgtcgaatacgcggagctgaaaacggtgtgctttcagaacctgcgcgaggtaggaaacgcaattttattctgtctcctgatcgaacagtccctcagtttagaggaggtgtgcgacctgttgcacgctgctccctttcagaacattctgccacgcgttcacgtgaaggagggcgagcggttggacgcaaagatgaagcgacttgaaagtaagtacgctcccctccatctggtcccgttgatagagcgattgggaacaccccagcaaatcgctattgcacgggagggtgatctgttaaccaaagaaagactttgttgtggactcagcatgtttgaagtaatcctgacccgaatcaggagcttcctggatgatccaatctggcgaggccctctgcccagtaatggtgtaatgcacgtggatgaatgcgtggagttccaccgtttgtggtctgctatgcagtttgtctattgtattcctgtaggcacacacgagttcaccgtcgaacagtgtttcggggatggcttacattgggccggttgtatgattatcgttcttctgggacagcagagaaggttcgccgtgttggacttctgctatcacctgctaaaggttcagaagcatgatggaaaggacgagatcatcaagaatgtgcccctgaagaagatggtggaaaggatccgcaagttccaaattctcaatgacgagataataacaatcctcgacaagtatctgaaatccggggatggggaagggactcccgtcgagcacgtgcggtgtttccagcctcctatccatcagagtctggcatcctcatag

SEQ ID NO: 184570 - DNA, 486 bp, synthetic construct
  misc_feature 1..486: note = Description of Artificial Sequence: Synthetic coding sequence
  source 1..486: mol_type = other DNA
atggccgcccaggtgaccctggaggacgccctgagcaacgtggaccttctcgaggaactacctctacccgaccagcagccatgcatcgagccaccgccaagctctctgctctaccaaccaaacttcaatacaaacttcgaagatcggaacgcctttgttactgggatcgccagatatatcgagcaggctaccgtccactcgtctatgaacgagatgttagaggaaggccaggaatacgctgtaatgttgtacacctggcgctcttgcagccgagccatcccccaggtgaaatgtaacgagcagcctaacagagtcgagatctatgaaaaaaccgtggaggtgctggagccggaagtaacaaagctcatgaattttatgtattttcagagaaatgccatcgaacggttttgcggagaggtgcgccgcctctgccatgctgagcgaaggaaagattttgtgagtgaggcgtatttaatcacactgtag

SEQ ID NO: 184571 - DNA, 456 bp, synthetic construct
  misc_feature 1..456: note = Description of Artificial Sequence: Synthetic coding sequence
  source 1..456: mol_type = other DNA
atggccgcccaggtgaccctggaggacgccctgagcaacgtggacctcctagaagagctgcctctgccagaccaacagccttgcatcgagcccccaccatcttctttgttatatcagccaaacttcaacaccaattttgaggatcgcaatgccttcgtgacgggaattgctcgctacatcgagcaggccaccgtgcattcctccatgaatgaaatgctggaggaagggcaggagtacgccgtgatgttgtatacttggcgtagctgctctagagccatccctcaggtgaagtgcaatgagcagcccaatagagtcgagatttacgaaaagacggtggaggtgttggagcctgaggtgaccaaattgatgaattttatgtacttccagcggaacgcgatcgagcggttttgtggagaggtgcgcaggttatgtcatgctgaaagacgcaaggactag

SEQ ID NO: 184572 - DNA, 3837 bp, synthetic construct
  misc_feature 1..3837: note = Description of Artificial Sequence: Synthetic coding sequence
  source 1..3837: mol_type = other DNA
atgaccacccacgtgaccctggaggacgccctgagcaacgtggacctgctggaggagctcccacttcccgatcagcagccatgcatcgaaccccccccatcctctattatgtatcaggcgaatttcgacactaattttgaggacagaaatgcttttgttacaggaatcgcccggtatattgaacaagccacggtccacagctcgatgaatgaaatgctggaggaaggtcatgagtacgccgtaatgctctacacttggcgctcctgctcaagagcaattcctcgggtgaaatgcaacgaacagcccaatagagtagagatttatgagaaaactgtcgaggtgctggaacccgaggtgacgaagctaatgaagttcatgtattttcagaggaaagcaatcgagaggttctgcagcgaggtgaagcggctttgccacgcggagcgccgcaaggacttcgtaagcgaagcttacctgctaaccctcggaaagttcataaacatgtttgccgtgctggacgaacttaagaacatgaaatgctctgtgaagaacgatcattcggcatacaaaagagcagcacagttcctcagaaagatggcggacccacagtctatccaagagagtcagaatctgagcatgttcctggcaaaccataatcgaatcacgcagtgtctgcatcaacagctcgaggtaatcccagggtatgaagagctcctggcagatatcgttaatatctgtgtagattactatgagaataagatgtacttgactccgagtgagaagcatatgcttctgaaagtcatgggttttggcctataccttatggatgggaacgtgagcaacatttacaagctcgatgccaaaaagcgtattaacctttcaaaaatagataagttctttaagcagctgcaagtggtgcctctgttcggggatatgcagatagagctggcaagatatatcaaaaccagcgcccattacgaggagaacaaatccaagtggacttgtactcagtccagcatttcacctcagtataacatctgcgagcagatggtccagatccgtgatgaccacatccgcttcatcagcgagctggcgcggtacagtaactccgaggtagtgaccggctccggccttgacagccagaagtccgacgaagaatacagggaactctttgatctcgcgctgcggggcctccaactactgagtaaatggagtgctcacgtcatggaggtctattcctggaaactcgttcaccctactgataaattttgcaacaaagactgtcctggcaccgcagaagaatatgagagagccacacgttacaactacaccagtgaggaaaagtttgccttcgtggaagtgattgctatgattaaagggctccaggtactgatggggagaatggagagtgtgttcaatcaggccattcgaaacactatatatgcagcacttcaggactttgcacaggtgaccctccgggagccccttaggcaagccgtaagaaaaaagaagaatgtgttgatttcagtactgcaggccatccgcaagaccatttgtgattgggagggcgggagggagccaccaaacgacccctgccttcgtggggaaaaggatcctaagggaggattcgacataaaagtgccacggagagccgttggaccaagtagtacccaggcctgtcagtggtcgcccagggccctgtttcaccctactggcgggacccaaggccgtcgtgggtgcaggagtttactgtatatggtaaggactatgctggagtccttgattgcggacaagtccggttcaaagaaaacactccgttcttctctcgacggaccaatcgtgttagccatcgaagactttcacaaacagagtttcttcttcacccatctgctcaacatcagcgaagctctccaacagtgttgtgaccttagccaactttggttcagggagttttttctcgagctcacaatgggaagacggatccagttcccaatcgaaatgtcaatgccttggatactcaccgatcacatattagaaaccaaggaaccttctatgatggaatacgtcttgtacccccttgacctctataatgatagcgcttattatgccctgacaaagtttaaaaaacagtttctgtatgacgagattgaggctgaggtaaacttgtgcttcgaccagttcgtgtataagctcgctgatcaaattttcgcgtattacaaagccatggccgggtcagtgctgctggataagaggttcagggcagagtgtaaaaactatggggtcatcattccttacccaccctcaaaccgctatgaaaccctactgaagcagcgccacgtgcagcttctaggtcgctccattgaccttaaccggctaatcacccagaggatctcagcagcaatgtacaaatcccttgaccaggccatctctaggttcgaatccgaggacttgaccagtatagtggaactcgagtggttgcttgaaattaacaggcttactcaccgcctgctgtgcaagcacatgacgctcgattcattcgatgctatgtttagagaagccaatcataatgtgtctgccccatatggccggattactctgcacgtcttctgggagctgaattttgacttcctcccaaattattgttacaatgggtcaactaaccgattcgttagaactgctatccccttcacacaagagccgcagcgggacaagcctgccaacgttcagccatactacctctacggatctaaaccacttaacatcgcatactctcatatttattcgagttatagaaatttcgtgggcccccctcacttcaaaaccatatgtagacttcttggataccaggggatcgcagtagtcatggaagaactcttgaagatcgtcaagagcctgctgcagggaacaatcctccagtatgtgaaaaccctcatcgaagtcatgccaaaaatatgcagattgcctcgacacgagtatggttcaccggggatcttggaattcttccaccatcagctgaaagatatcatcgaatatgcggagctgaagactgacgtctttcagtcactgcgcgaagtgggaaatgccatcctgttttgtttactgatcgagcaggctctaagccaggaagaggtttgtgatctactgcatgctgcaccattccagaacattcttcccagggtatatattaaagagggggagaggctggaagtgcgcatgaagaggctcgaggccaagtatgctcccctccacttggtaccccttatcgagcgactcggcacgccacagcaaatcgcaatcgctagggagggtgatttactcactaaggagcggctttgttgtggcctgagcatgtttgaggtaatcctcacccgtatccgcagctatctgcaggaccctatttggcgtggcccgcctcctactaatggcgtgatgcatgttgatgagtgtgtagagtttcacaggttgtggagtgcaatgcaatttgtctactgcataccagttggtaccaatgagttcacagctgagcaatgcttcggcgatggactgaactgggccgggtgttctatcattgtgctgctcggtcagcaacggcgatttgacctgttcgacttttgctaccaccttctgaaagtccaacgccaggatgggaaggacgagatcataaaaaatgtcccgctgaaaaagatggccgatcgcatacggaagtaccaaatcttaaataatgaggtctttgctattttgaataagtacatgaaatccgtggagacagattcgtccactgtggaacatgtgcgttgctttcaaccaccaatccaccaatccctcgcaaccacgtgctag

SEQ ID NO: 184573 - DNA, 3762 bp, synthetic construct
  misc_feature 1..3762: note = Description of Artificial Sequence: Synthetic coding sequence
  source 1..3762: mol_type = other DNA
atgaccacccacgtgaccctggaggacgccctgagcaacgtggacttgctagaggagctcccactgccagaccagcagccatgtatcgagccaccaccgtccagcataatgtatcaggctaacttcgatactaacttcgaggaccgcaacgccttcgtgactggaatcgctcgctacatcgaacaggccacagtgcatagtagcatgaacgagatgctggaggaaggccacgagtacgccgtgatgttatacacatggaggagttgctctagggcaattcctaaggttaagtgtaacgaacaaccaaaccgcgtggagatctatgagaaaaccgtcgaggtccttgaacctgaagtcaccaagcttatgaagtttatgtatttccagcgaaaagccatcgagagattctgttctgaagtgaagagactttgccacgctgagagacgcaaagactttgttagtgaggcctatcttttaacactcggaaaattcatcaacatgttcgcagtgctggacgaactcaagaacatgaagtgttcggtgaaaaacgaccactctgcctacaagcgggctgcccaattccttcgtaaaatggccgaccctcagtctatacaggaaagccagaatctgagcatgtttctggctaatcataataggatcacacagtgtctgcaccaacagctggaggtcattcccggatatgaagagctgctggcggatattgtgaatatttgcgttgattactacgagaataaaatgtacctcacgccctctgagaaacatatgctcctgaaagttatgggcttcggcttgtatctcatggacgggaatgtgtccaatatttataagctggacgcaaagaaaaggattaatctgtctaagattgataaattctttaagcagctccaagtcgttcctctctttggcgacatgcaaattgagctggcccgttatattaaaacaagtgctcactacgaagagaacaaatctaagtggacttgcacccagtcctcaattagcccacagtataacatttgtgagcagatggtacaaattcgggacgaccacattagattcatcagcgagctcgcacgctatagtaattccgaggtggttaccggcagcggactcgattcccaaaaatcagatgaggaataccgggagttgttcgatttagccctgaggggactgcagctgctctctaagtggtctgctcacgtgatggaagtgtacagttggaagcttgtgcaccccacagacaaattctgtaacaaagattgcccgggaacagcagaggaatatgagcgggcaacaaggtataactacacaagcgaggagaagtttgctttcgtcgaagtgatcgctatgatcaagggactgcaggtgctgatggggcggatggagtcagtcttcaatcaggccatccgcaacacaatatatgccgcactgcaggacttcgcacaagtgacactgagggagcctctaaggcaagctgtcagaaaaaagaagaatgtcctcatttctgtcctgcaggccataagaaagacaatatgcgattgggaggggggtcgcgaaccccctaacgatccgtgcctgcgtggcgaaaaagaccctaagggggggtttgatattaaggtgcctagacgcgccgtcgggccttcctcgacccagctgtacatggtgcgaacaatgttagagagcctgatcgctgataaatctggatccaaaaagaccctgagatcctccctcgacggtcctatcgtcctggctatcgaggacttccataagcagtctttcttttttactcatctgctcaacatctcggaagctctgcagcaatgttgtgatttgtcacagctctggtttcgggagtttttcctggagctgactatggggaggagaatacagtttccaattgagatgtcgatgccatggatattaaccgatcatatcctggagactaaagagccctccatgatggagtatgtgctctatccccttgatttatacaatgactcagcttattatgccctcacaaagttcaaaaaacagtttctctacgatgagatagaagccgaagttaatttatgctttgatcagttcgtatataagctagccgatcagatattcgcctattacaaggctatggctggatccgtcttgttagacaagaggttccgtgcagagtgtaagaactatggcgtgatcattccatatccacccagcaatagatatgagactctgctcaagcagagacatgtccagctcctcggtaggagtatcgacctaaatagactgattacacagagaatatccgccgctatgtataaatcactggatcaggctattagccgttttgaatccgaggatctgacttcaattgtagaattagaatggcttctcgaaatcaacagactaacacaccgattactgtgtaaacacatgaccctggatagttttgacgcaatgttcagggaagctaaccacaacgtgagtgccccctatggcaggataaccttacatgtgttctgggagctgaactttgactttctgccgaactattgctataatggatctacaaaccgatttgtacgtacagccattccttttacacaggagccacaaagggacaaacccgccaacgtgcagccttactacctctatggatctaagccgttgaacatcgcctactcccatatctattccagttatcggaacttcgtgggtcctccacactttaagacaatatgtaggcttctgggctaccaaggaatcgctgtcgtcatggaagaacttttgaaaatcgtgaagtctctcctccaggggaccatcctgcagtacgtgaaaacattgattgaagtgatgcctaaaatttgtcgcttgcctcgacatgaatatgggagccccggtattctcgaattctttcaccaccagttgaaggacatcattgaatacgcagaactcaagaccgatgtgttccaatctctgcgggaggtggggaatgctattctgttctgtttactcatcgagcaagccctgtcacaggaagaagtgtgtgacctgctgcacgctgccccattccaaaatatactgccgcgcgtctacattaaagaaggggagagactggaagtgagaatgaaacggctggaggcgaagtacgcccccctacatctggtgcctcttattgagagactgggcaccccccaacagattgccatcgcccgcgaaggggacctgctgacgaaggaacgcttatgttgcgggctatccatgttcgaagtgatcctgactcgtatacgatcttacttacaggatcccatctggcggggacctccacccactaacggcgttatgcacgttgacgaatgcgttgagttccaccgcttgtggagcgctatgcagttcgtatactgcatccccgttggcaccaacgagttcaccgctgagcagtgcttcggagatggcctgaattgggctgggtgctcaatcatcgtgcttctgggacagcagcgtcgctttgatctgttcgacttttgttatcatctcctaaaggtgcagcgccaggacgggaaagatgaaattattaaaaacgtccctctgaagaaaatggcagaccggattcggaaataccagatcctgaacaacgaggtgttcgcaatcttgaacaagtatatgaagagcgtagagacagactcatccactgtcgaacatgtcaggtgctttcagccgcccatccaccagtccctcgctactacttgttag

SEQ ID NO: 184574 - DNA, 3762 bp, synthetic construct
  misc_feature 1..3762: note = Description of Artificial Sequence: Synthetic coding sequence
  source 1..3762: mol_type = other DNA
atgaccacccacgtgaccctggaggacgccctgagcaacgtggaccttctggaggagcttcctctccccgatcagcaaccatgtatcgagcccccaccaagttccattatgtaccaggccaatttcgataccaatttcgaagatcgtaacgcttttgtgacgggcatagcccgatatatcgaacaggctaccgtacatagctccatgaatgaaatgcttgaagaaggtcatgaatatgcagttatgctgtacacgtggcggtcctgttcaagggccattcccaaagttaagtgcaacgaacagccaaatcgcgtcgagatatacgaaaagaccgtggaagtccttgagccagaagttacgaaactgatgaagttcatgtactttcagaggaaagccattgaacggttctgcagtgaagtcaagcgactctgccacgctgaaaggcgcaaggacttcgtttcggaggcttacctgctgacgctaggaaaatttattaacatgttcgccgtgctggatgagttaaagaacatgaagtgctcagtcaaaaacgatcattcagcctataagagggctgcacagtttctccgcaagatggctgatccccaatctattcaagagtcacagaaccttagcatgttcttagcgaaccacaatcggattactcaatgccttcaccagcaactggaagtgattcctggatatgaagagctgctggctgatattgttaacatatgtgtggattattacgagaacaaaatgtatcttacgcctagcgaaaagcacatgttgctaaaggttatgggctttggcctgtacctcatggacggtaatgtgtcaaacatttataagcttgatgccaagaaaagaatcaatttaagcaagatcgataagtttttcaagcaactgcaagttgtgcctctgtttggagatatgcagattgagctcgcgcgctacattaagactagcgcccattatgaggaaaacaagagcaagtggacctgtactcaatcttctatttctccccagtacaacatttgtgaacagatggtgcagatcagagacgaccatatccggtttattagtgaacttgcgcggtattccaactccgaagtagtgacaggttctggactggatagtcagaagagcgacgaggaatatagagagctgtttgacttggctctgagaggcctccagctcctgtccaagtggagcgcccacgtgatggaagtttacagctggaagctggtgcaccccactgacaaattctgcaataaagactgcccaggaacagctgaagaatacgagagagctaccagatacaattatacctccgaagagaaatttgccttcgtcgaagtgatcgctatgataaaaggattacaagtgcttatgggaaggatggaatctgttttcaaccaggctatacgaaatactatctacgctgccctccaggacttcgcacaggtgacgttacgagagcccttgcggcaagcagtgcgtaaaaaaaaaaatgtgcttatatccgtgctgcaggctatccgcaaaacaatttgtgactgggaaggcgggcgggaacctccaaacgatccctgcctgaggggagagaaggatcctaagggcggattcgacatcaaggttccacgccgggctgtgggcccctcatctacccagctgtacatggttcggaccatgttagaatccttaattgctgacaaatcgggttccaagaaaactctccgttcctcactcgatgggcctatagtattagcgatcgaggactttcataagcagtctttcttcttcactcatctcctgaatatctcagaagcgctgcagcaatgttgtgacctcagccagctttggttccgggaattcttcttagaacttaccatgggtcgtcgtatacagtttcccatcgaaatgtctatgccctggatcctgactgatcacattctcgaaacaaaagagccctctatgatggaatacgtactatatcctttggacttatacaatgatagtgcctactatgcgcttaccaaatttaagaagcagtttctttacgatgagatcgaggctgaggtgaatttgtgcttcgaccagttcgtctacaaactggcagatcaaatctttgcttattacaaggccatggctggttctgtcctgctagataagcgctttagggctgagtgcaaaaattatggagttataatcccatatcctccctctaatcgctacgagaccctgctgaaacagaggcacgtccagttgctcgggcggtccatcgacctcaataggctcatcacccagcgaatctcagctgccatgtataagtctctggaccaggcaatcagtcgatttgaaagtgaggacttgacaagcattgtcgagcttgaatggttgctagaaatcaaccgactgactcaccgcctgctgtgtaagcacatgactctggacagttttgatgccatgttcagagaggctaatcacaacgtgtcagccccgtacggacgtatcactttacatgtgttctgggaactgaatttcgactttttacctaattactgttataacggctctacgaataggtttgtgaggaccgccatccccttcacacaggaaccccagagggataaaccagcaaacgtacagccatattacctctatggatctaagcctcttaatatagcctattcccacatttattcctcttacagaaacttcgtgggcccaccccatttcaagacaatatgtaggctgttgggctatcagggcattgccgtggtgatggaagagcttcttaaaattgtcaaatccctgttacaggggacaatattgcaatatgtgaagacgctaattgaggtgatgcctaagatatgtcgactccctaggcatgaatacggttcccccggtatactggagttttttcaccatcagctgaaagatatcatagagtatgcggaacttaagacggacgtatttcagtctctgcgagaggtgggaaatgcaatcctcttttgcctcctgatcgagcaggccctaagccaggaagaggtctgcgacttattgcatgcagcaccgtttcagaatattctccctagggtctatatcaaagagggagagcggctggaagtgaggatgaaaaggttggaggcgaaatacgctccactgcacttggtgcctctgatagagagactgggcacaccccaacagatcgcaatcgcacgagagggcgaccttctgactaaggagagattgtgttgtggtctgtccatgtttgaggtgattcttacaaggatccgtagctacctgcaggaccctatctggagagggcccccacctactaacggcgttatgcacgtggatgagtgcgtggaattccatcggctctggtccgccatgcagtttgtgtattgtatccccgtcggtacgaatgagttcaccgcagaacagtgttttggggacggacttaactgggccggttgcagtatcatcgtgctgcttggtcagcagagacgcttcgatctcttcgacttctgttatcatttacttaaagttcaaaggcaggacgggaaggatgaaattattaaaaacgtaccactgaagaagatggcagatcgcataaggaaataccaaatcctgaataatgaggtgtttgcaattctgaataaatacatgaagtctgtggaaacagacagcagtaccgtagagcacgttaggtgtttccagcctcctatccaccaaagcctcgcaacgacttgttag

SEQ ID NO: 184575 - DNA, 2859 bp, synthetic construct
  misc_feature 1..2859: note = Description of Artificial Sequence: Synthetic coding sequence
  source 1..2859: mol_type = other DNA
gagaagcggcggcggtggacctgcacccagagcagcatcagcccccaatacaacatctgcgagcagatggtgcagattcgggacgaccatatcagattcatctccgaactggccaggtattccaatagcgaggtggtgaccggcagcgggttagacagccagaagagcgatgaagaatatagggaactttttgacctagccctgaggggactgcagttgttatcgaaatggagtgcgcatgtaatggaagtctactcctggaagctggttcatcctacagataaattctgtaataaggattgtcccggcactgctgaagagtacgaacgagcaactaggtataactacacatctgaggagaagtttgcctttgtggaagtgattgcaatgattaaagggttgcaggttctgatgggcagaatggagtccgtcttcaaccaggctattagaaataccatctatgccgcgctccaagacttcgctcaggttacactccgggagccccttaggcaggccgtgcggaaaaagaaaaatgtgctgatcagcgtgctccaagctatacgtaaaaccatttgcgactgggagggggggcgtgaaccccctaacgacccttgtctgcgtggggaaaaagacccaaaaggcggcttcgacattaaagtccctcgccgggctgtaggcccaagctccacacaggcctgccaatggagtcctagagcgctattccatcctactggcggtacacaggggcgacgcggatgtcgctccctcctttacatggtgcgtacaatgcttgaaagcctcatcgccgataagagcggatctaagaagacactccggagcagcctggacggacctatcgttctcgcaatcgaagactttcataagcagagctttttcttcactcacttgctgaacatctccgaggcgctgcagcagtgttgcgatttatcgcagctgtggtttagagaattctttctggaattaacaatggggagacgtattcagtttcctattgaaatgagcatgccctggatcctgacggatcacatcctggaaactaaagagccctccatgatggaatacgtgttatatccactcgatttatataatgatagtgcatactacgccctgacaaagttcaaaaagcaattcctctacgatgagatcgaggcagaggtgaatctctgctttgatcagtttgtgtataagttggcggatcagatttttgcctattataaggccatggccggaagtgtgctactagacaagaggtttcgcgcagagtgcaagaattacggagttattattccctatccacccagcaacagatacgagactctactcaagcagagacatgttcagctgctagggcgcagcatagaccttaaccggcttataactcagcgcatatcggccgcaatgtacaaatcactcgatcaagccattagcagattcgaatccgaagacctgaccagtattgtggaactcgaatggttgctggaaattaacagactgactcacagactgctgtgtaaacacatgaccctggactctttcgacgccatgtttagagaggccaaccacaacgtgtcagccccctatggaagaatcacgcttcacgtattttgggaactcaactttgactttctcccgaattactgctacaacgggtcgaccaacagattcgtgagaactgcaatcccctttactcaggagccacaacgggacaaaccagcaaatgtgcagccctactacctgtatggttccaaaccactcaacattgcatactcccacatctatagttcgtatcggaacttcgtgggccctccacactttaaaactatttgtcgactcctggggtaccagggcattgccgtggtcatggaggaattgttgaagattgtgaagagtttgctgcaaggcacaatcctgcagtacgtgaagacgttaatcgaagttatgcccaaaatttgtcgtctcccccgacacgagtacggctctccggggatcctcgagtttttccaccaccagctgaaggacataatcgaatatgctgaattaaaaaccgatgtttttcagagcctgcgcgaagtcgggaatgcaatcctcttctgcctcctgatcgagcaggcattatctcaagaggaagtttgtgacttgttacatgctgcccctttccagaatatactgcccagggtttacatcaaagaaggagagcggctggaggtgcgtatgaagcgactcgaggcaaagtatgcccctctgcatttggtcccactaatcgagagacttggtacaccccaacagatagccatcgcccgcgagggtgatttgttgactaaggaacgcctttgttgcggacttagcatgtttgaagtcatccttacccggatccgctcatatttgcaagatccgatttggcgggggccaccgcctactaacggagtgatgcacgtcgatgaatgcgttgaatttcaccggctgtggtcagctatgcaattcgtttactgcatcccggttggcacaaatgagttcacggcagagcagtgcttcggggacgggctcaattgggcaggctgctcaatcattgttctgttgggacagcagagaagatttgatctgttcgacttttgttatcatttgttaaaagtccagcgccaggacgggaaggacgagatcatcaagaatgtgccattaaaaaagatggccgacagaattcgcaaatatcagatcttaaacaacgaggtgttcgccattctgaacaaatatatgaagagtgttgaaacagatagcagtactgtcgagcatgtgcgttgtttccaacctcccatacaccagagtctggccacaacgtgctag

SEQ ID NO: 184576 - DNA, 651 bp, synthetic construct
  misc_feature 1..651: note = Description of Artificial Sequence: Synthetic coding sequence
  source 1..651: mol_type = other DNA
atggccggcagcgtgctgctggacaagcggttccgggccgagtgcaagaattatggggtgatcatcccgtacccgccttccaatcgctatgagacccttctcaaacaacgccatgtacagctcctgggccgaagcattgacctgaacagactgatcactcagcgaattagcgccgcaatgtacaaatctttggaccaagctatttcccgcttcgagtcggaggacctcaccagtatcgtggagctggaatggctgctcgaaataaaccgactgacccatagattgctttgtaaacacatgactctggacagctttgatgctatgtttcgtgaggctaaccataacgtgagcgcgccctacggcaggatcactctgcatgtgttctgggagttgaactttgatttcttacccaattactgctacaacggatctaccaaccgttttgtacgcaccgccagcttccacccgcgtaccactaccaggcaaacttgtcagagacctgccctcctgcctctatggatacaggcctcacagcactgcctgcaacctcatctccagctcctccaagagtttagaggcgctacctcttttcaggattacgctgatagctgggtgatcagagcctccttatggtcctggcgcaactgctag

SEQ ID NO: 184577 - DNA, 3537 bp, synthetic construct
  misc_feature 1..3537: note = Description of Artificial Sequence: Synthetic coding sequence
  source 1..3537: mol_type = other DNA
atgaccacccacgtgaccctggaggacgccctgagcaacgtggacctgctcgaggagctaccacttccaaacgaacagcccaaccgcgtcgagatctatgagaaaactgtagaggtcctcgagccggaggtgacaaagttaatgaaattcatgtatttccaaagaaaggcgattgagagattttgttccgaagtgaaacggctgtgccacgccgagaggaggaaagatttcgtgtctgaggcctacctgctcacgctgggcaaatttatcaatatgttcgctgtcttggatgagctgaaaaacatgaaatgctccgtcaagaatgatcatagcgcctacaagcgggccgcccagttcctacgcaagatggcagaccctcagtcaatacaggagagccagaatctgtccatgtttcttgcgaaccataaccgcataacgcagtgtcttcaccagcaactggaggtcattcctggctacgaagaactactcgctgatatcgttaacatttgcgtggactactacgagaataaaatgtatctgacaccctcagagaagcatatgttactgaaggtgatggggttcggactctatctgatggatggcaatgtatccaatatatacaaactggatgctaagaagcgcattaatctgtcgaagatcgataaattcttcaagcagctccaagtggtgcccctgttcggggatatgcaaatcgagctggccagatatattaagacctccgcccactacgaagaaaacaagtcaaaatggacctgcacccagtcttctattagcccccagtataacatttgcgaacagatggtgcagattagagatgaccatattaggtttatcagcgaactcgctcgatacagtaactctgaggtggtgacggggtcaggattagactcacagaagagcgacgaggagtaccgagagctctttgacctggccctgcgaggattacaactgctcagtaaatggagcgcgcatgttatggaagtgtatagctggaaactagtgcacccaacagacaagttttgcaacaaagattgcccgggaaccgcagaagaatatgagagggccaccagatataactatacaagcgaagagaagttcgcttttgtggaagtcattgctatgattaagggactgcaggtgttgatggggcgcatggagtcagtcttcaaccaggcaatacgaaacaccatctacgcagccctgcaggattttgcgcaggtaacgctgcgcgagccactcagacaggccgtgaggaaaaaaaagaacgtcctgatctccgttctacaagcaattcgcaagaccatttgcgattgggaaggggggagagagccacctaacgatccatgtctacgaggggagaaagatccaaaaggtggcttcgatatcaaagtgcctcgcagggccgtcggtccctcctctacccagttatatatggttcgcaccatgcttgagtcactcatcgctgataaaagtgggagcaaaaagaccctgaggtcctctctggacggaccgattgtgctggctattgaagatttccataagcagagtttcttcttcacccatttgctgaatatcagcgaagcattacagcagtgttgtgatctttctcagctgtggtttcgcgagttcttccttgaactgactatgggtcggaggatccagttcccaatagaaatgtcgatgccgtggattctgaccgatcatatcctcgaaacaaaagagccctccatgatggagtatgtgctgtatccactcgatctctacaatgattctgcttattatgctctgacgaaatttaaaaaacagttcttatatgacgagattgaggccgaggtaaatctgtgctttgaccagttcgtgtataagctcgctgaccagatctttgcttattacaaagccatggctgggagcgtccttctggacaaaagattccgagccgaatgtaaaaactatggtgtgattataccctatcccccatccaatagatatgagacccttctaaagcagcgccacgtccagctgctcggcagatctatcgatttgaaccgcttgatcacacagaggatctcagctgcgatgtacaaatcactggatcaggcgataagccgctttgagtctgaagacctcactagtatagtagagcttgagtggctgctagaaattaatagactcacgcaccgcctgttatgtaagcatatgacactggacagctttgatgccatgtttagggaggccaatcacaatgtctctgctccctacggcaggataacactgcacgttttttgggaactcaatttcgattttctgcccaattactgctacaacggaagtactaacaggtttgtgagaacggccattccgttcactcaggaacctcaacgagataagcctgctaatgttcagccttactacttgtacggatccaaacctttgaacatcgcgtactctcacatctattccagttacaggaacttcgtgggccctcctcactttaaaaccatctgccggcttctaggctaccaagggatcgctgtagtaatggaggaactgctgaagattgttaagtccctattgcagggcaccatactgcagtacgttaagaccctgatcgaggtgatgcccaaaatctgccgtttaccacgacatgagtatgggtcacccgggatcctagaatttttccatcaccagctgaaagacataatagaatatgccgagttgaaaactgacgttttccagtcattgcgcgaggtgggaaacgccatcctcttttgcctgctgatcgagcaggcactgagtcaggaggaggtgtgcgacctgctccacgcagcgccttttcagaacatcctcccgcgggtgtacataaaagagggagagcggcttgaggtccgaatgaaaagactggaagccaaatatgccccccttcacctcgtgccactcatcgagcggttaggcactccacaacagattgccattgcccgagagggtgaccttctaacaaaagaacgcctctgttgcggcttgagcatgttcgaggtgatcctgacgagaatcagaagctaccttcaagaccctatatggagaggacctcctccaacaaacggggtcatgcacgtggacgagtgcgtggagtttcatcgcttatggagtgccatgcagtttgtttattgtattcctgtgggtacaaacgaattcacagccgaacagtgttttggtgacggcctaaactgggctgggtgttctatcatcgtgctcttgggccagcagaggagattcgacctatttgacttctgttatcatttgttaaaggttcaaaggcaggacggtaaggacgagattatcaagaatgtacctttgaagaagatggcagaccgcattcgtaaatatcaaatactcaacaacgaagtctttgcaatactgaataaatatatgaagagtgtcgaaacagattcatcaacagtggaacatgttagatgttttcaaccgccaatacatcagtcattagctacaacctgttag

SEQ ID NO: 184578 - DNA, 4617 bp, synthetic construct
  misc_feature 1..4617: note = Description of Artificial Sequence: Synthetic coding sequence
  source 1..4617: mol_type = other DNA
atggagccccggatggagagctgcctggcccaggtgctgcagaaggatgttggaaaaagactccaggtcggacaggagttaattgactatttctcggacaaacaaaagtccgcagacctggagcacgatcaaactatgttggataaactggtggatggacttgccacatcatgggtgaattcttctaattataaagtcgttctccttggcatggatatcctgagcgccctggtgacccgactgcaagatagattcaaagcacaaatcggaactgtcctgccttccctgatcgaccgtctgggcgacgccaaagattcagtgcgagaacaggatcagacactgttgctgaagattatggatcaggctgcaaacccccagtacgtctgggatcgcatgctcggaggctttaagcacaaaaatttccgcacaagagagggtatctgtttgtgtctcattgccacgctcaacgcttccggggcccaaactcttaccctgagtaagatcgtgccccacatctgcaatctgttaggggaccccaatagccaggttcgtgacgctgctatcaacagcttggtcgagatctaccggcatgtgggcgaacgagttcgtgccgacctgtccaagaaagggctcccgcaatcacgcctgaatgtaatttttaccaaattcgacgaggtgcaaaaatccggcaatatgattcagtctgccaacgataaaaatttcgatgatgaggactctgtggacggtaacaggccctcctccgcctccagtacctcttccaaagctcccccctcttctcggcggaacgtcggaatgggtactaccagacgcttaggcagctcaaccctcggtagcaaaagcagtgctgctaaggagggggctggcgccgtggatgaagaggactttattaaggcttttgatgacgtacccgtggtgcagatttattcatctagagatcttgaggagtctatcaacaaaatccgcgaaatcttatcggacgataagcatgattgggaacaacgggtcaatgcactaaagaaaatacggagtctgctcctggccggcgccgcagagtatgacaattttttccagcatttgcggctgttggatggtgctttcaagctgtccgcaaaggacctgcggtcacaggtcgttcgggaggcatgcattacgctgggtcatcttagcagtgtgctgggaaacaaattcgatcacggagctgaagccatcatgcccacaattttcaatctcatcccaaactcagctaaaatcatggccaccagcggtgttgtcgcagtgcggctgatcatccggcacacgcatattcctcgcctgattcccgtgattacttccaactgcacgagcaagtccgtggccgtgaggaggaggtgttttgaatttctggaccttctactgcaggagtggcagacacatagtttggagcggcacatctccgtgttggcagaaacgatcaagaaaggaatacacgacgccgactccgaagctcgaattgaggctaggaagtgttactgggggtttcactctcatttttccagagaggctgagcatctctaccacacactggaatcttcttatcagaaagccctgcagagtcacctcaagaactcagatagcatcgttagcctaccccagtcagataggtcctcttcatcttcccaagagtctctgaatcgacccctgagcgccaagagatctccgaccggcagtaccacatcccgtgccagtaccgttagtaccaagtcagtttccacgacaggctccctccaacggtcccgatcggatatcgatgtgaatgccgcagcgagcgccaagtcaaaagtgtcttcttccagcggtactacacccttcagttctgccgctgcattgccacccggcagttacgcgagcttgggaaggatccgtactcggaggcagtcttcaggaagtgccaccaacgtcgctagtacccctgataatcgtggcagatctcgtgctaaggtagtttcacagagccagaggtccagatctgccaaccccgcgggggcggggtctcggagcagctctcccggcaaactgctgggctcaggctatggaggcctgacagggggttcatctcgggggcctcccgtgacacccagctcagagaaacgttcgaagatcccccgatcccagggttgtagccgcgagacttcgcctaatcggatcggcctggcaagatctagccgaatacctcgccccagcatgtcccagggatgttcaagggatactagcagggagtccagccgtgacactagccctgcaaggggattccctcctttggataggtttggcttagggcagcccgggcgcatccccgggtccgttaacgctatgagagtcctcagtacgtccaccgatttggaagccgctgtggcagatgccctgaaaaaacctgttcggaggaggtacgaaccctacggcatgtactccgacgatgatgctaactcggacgcatcaagtgtctgttctgagcgctcttatgggtcccgcaatggtggtattccccattacctccggcagaccgaggatgtggctgaagtgctgaaccactgcgcctcttccaattggtccgaaagaaaagaaggcttgttaggtctccagaacctactgaagagtcagagaactctatcccgcgtggagctgaagaggctgtgcgaaattttcacccgtatgtttgcagatccccactccaagagagtgttttccatgtttttagaaacgcttgtggactttattatcatccataaggacgacctgcaagattggctgttcgtgttgttgacacagctgcttaaaaaaatgggagctgacctcctggggagcgtccaagctaaggtacagaaggctctggatgttacccgcgattccttcccttttgaccagcagttcaacatcctcatgcgtttcattgtggatcagacccaaactcccaacctcaaggtgaaggttgccatactgaagtatatagagtccctcgcacgccagatggaccctaccgactttgtgaattctagcgaaacgcgcctggccgtgtcgagaataatcacctggacaaccgagccaaagagttccgatgtgcgcaaagccgcccagattgtgttgatttccctattcgagttgaacacaccggaattcactatgctactcggagctctgcccaaaacattccaggacggggccactaagttgctgcataatcacttgaaaaactccagtaatacctccgtcggtagtccgagtaatacaatcggtagaactccctcccgtcatacaagctccaggaccagccctctgacttcccctacgaattgctcccacgggggtctcagccctagccgcttatggggatggagcgccgacggtttggctaagcaccctcccccattctctcaacccaactctatcccaactgcgccttctcataaggcccttagacgaagctatagtccctctatgctggattatgataccgagaacctgaactcagaggaaatttactcaagccttcggggagtgaccgaagccatcgagaagttttcatttcggagccaggaggacttgaacgagcctatcaaacgggatggaaaaaaagagtgcgatatcgtctcccgcgacggaggagcggcatccccagcgacggaaggccgcgggggaagtgaagtggagggaggccggactgctctggacaataagacgtctttgctgaacactcaacctccacgagccttccctggcccacgagcccgggattacaatccatacccttattcggatgccatcaatacatacgataaaactgccctaaaggaggcggtttttgatgacgacatggagcagttaagagatgttcccattgaccacagtgatttggtagcagatcttcttaaagaacttagcaatcacaatgagcgagtagaggaacggaagggcgccctcttggaattgctgaagattactcgagaggattctctcggagtttgggaggagcacttcaagaccatcctgctcttactgcttgagaccctgggggataaagaccactctattcgagccctggcccttagggtgctaagagaaatactacggaaccagcctgcccggttcaagaattatgccgagttaacaattatgaagacactggaggcccacaaggacagccacaaggaagttgtaagggccgctgaggaggctgccagcacccttgcaagctccatccatcctgagcagtgcatcaaagtgctctgtcctatcattcaaactgccgattatcctatcaacctggcggcgatcaaaatgcagactaaggtggtggagcggatcgccaaggagtcactgctacagctgctcgtggacatcattccaggacttctgcaaggttacgacaataccgagtccagcgtaagaaaggccagcgtgttctgcctggtggcaatttactctgtgatcggcgaggacctgaagccacatctcgcccaactgacagggtccaaaatgaaactgctgaatttatacataaaaagagcccagaccaccaacagcaatagctcctcaagttccgacgtttccacacactcctag

SEQ ID NO: 184579 - DNA, 4437 bp, synthetic construct
  misc_feature 1..4437: note = Description of Artificial Sequence: Synthetic coding sequence
  source 1..4437: mol_type = other DNA
atggagccccggatggagagctgcctggcccaggtgctgcagaaggacgtgggcaagagactgcaagtcgggcaggaattaattgactactttagtgacaaacagaagtcagccgatttagaacacgaccagaccatgctcgacaagttggtagatggcctggccacgagctgggttaatagttcaaattataaagtcgtcctgctgggaatggatatcctgagcgccctggtgactcgcctccaggaccgtttcaaggctcagattggaactgttttgccttctctgatcgatcgattgggtgacgccaaggacagcgttagggaacaggatcagaccttgctgttgaagataatggatcaagctgccaaccctcaatatgtgtgggatcggatgcttgggggattcaagcataaaaatttcagaacaagggagggtatttgcctctgcctgatcgccactttaaacgcatcaggagctcagaccttgactcttagtaaaatcgtgccacatatttgcaatctacttggcgaccccaattcccaggtgagggatgcagctattaacagcttggttgagatctataggcatgtcggggaacgtgtcagggccgatctgagcaagaaaggacttcctcagtcacgattaaacgttattttcacaaagtttgacgaggttcagaagagcgggaatatgatccagtctgccaatgataaaaatttcgatgatgaggatagcgtcgatggcaatagacccagcagcgcctcctccacatcttctaaggctccaccaagtagtcgtagaaacgtcggcatgggcacaactagaagactgggctcatccactctgggttctaaatcctccgccgctaaagagggcgctggggccgttgacgaggaggatttcattaaggcttttgacgacgtgcctgtggtgcaaatctatagctccagggacttggaggagagtatcaataagatccgagagattctgtccgacgacaagcacgactgggaacagagagtgaacgccttgaagaaaatccggagtctactcctggcaggcgccgcggagtacgataacttttttcagcacctgcggctcctcgacggtgcatttaaactatcagcgaaggacctgcgcagccaggtggttcgcgaggcatgcattaccctcggccatctttcgtctgtgctgggaaataagtttgaccacggggcagaggctataatgcccacaatctttaaccttatcccaaatagcgccaagatcatggcgacttccggagttgtagccgtacgtctgataattagacacacccatattccgcgcttgattcctgttattacttcaaactgtaccagcaaaagcgtcgccgtgaggcggagatgtttcgagtttttggacctgcttctgcaggaatggcaaacccactctctggagcgacatatctctgttcttgcagagacaataaaaaaaggcatccatgatgcagacagtgaggctagaattgaggctcgtaaatgctactggggctttcactcgcattttagccgcgaggccgaacacctctatcataccctggaatcatcctatcaaaaagctctgcagtcacatttgaagaattcagacagcatcgtgtccttacctcagagtgaccgttcctcctctagttcccaggaatctctcaataggccgctgtctgcaaagcggtcccccaccggctccacaacaagccgcgcctccacagtgtccacaaagtccgtgtcgacaaccggttcactccagcgttcccgcagcgacatcgacgtgaatgctgcagcttcagccaagtccaaagtatcatctagcagcggcaccacacctttctcatccgcagccgctctgccccctggtagctatgcgtccctggatggcaccaccaccaaggctgaagggaggatccgtaccaggagacagagctccgggtccgcaactaacgttgcatcaactcccgacaatagaggccggagccgagccaaagttgtgtcgcagagccaacgctcaaggagcgccaatcccgccggtgctggaagccgtagttccagccccggcaaactgcttggctccggctacggaggtttaaccggggggtcaagccgaggtcccccagtgacacctagctccgagaagcgttccaagatcccaaggtcccaggggtgttcgcgggaaacttcccccaataggataggactggaccggtttgggctaggccagcccgggcggatacctgggagtgtgaatgccatgagggttttaagcacttccaccgatttagaagccgccgtcgcagacgcactactcttaggggactcacgcagtaagaagaaacctgtgaggagacgctatgaaccatacgggatgtacagtgacgacgacgcaaacagcgacgcatccagcgtttgtagcgagcgctcctacggatcgcgtaacggtggaatcccccactatctgcggcagacagaggatgtcgcagaggtgctgaatcattgtgcttcgtcaaactggagtgagcgtaaggagggtttattaggtttacagaacctcctcaagtcccaaaggaccttgagcagagtagaactcaaacgcttgtgtgagatttttacaagaatgttcgcagatcctcacagcaaagtgttctctatgtttttggagacccttgtcgacttcatcatcatccacaaagatgacctacaggactggcttttcgtgttgctgacacaactcctgaagaaaatgggcgccgatctcctcggaagtgtgcaagctaaggtgcagaaagctctggacgtcacaagggactcttttccatttgaccaacaattcaacatcctcatgaggtttatcgtggatcaaacccaaactccaaatcttaaggtcaaggtagctatcctgaagtacatcgaatccctcgctaggcagatggacccgacagactttgtgaatagctcagagacacgacttgctgtctcccgtatcatcacttggacaacggagcctaagtcatctgacgttcggaaggccgcccaaatagtcctcatctccctgttcgagctcaacacacctgaattcaccatgctgctaggagccctgccaaaaacgttccaggacggcgctacgaagttgctgcacaaccatctgaaaaactctagcaatacctcagttggctctccatccaacaccataggacgtaccccctccaggcacacctccagcagaacttccccccttacatcccctaccaactgcagccacgggggcctgagtccatccatgctggactacgacaccgaaaacctgaactcagaggagatatacagtagtctcaggggcgtcacagaagcaatcgagaagttctcttttcggagccaggaagatctgaatgaaccaattaaaagggacgggaagaaggaatgcgatatcgttagcagggatggcggcgccgcctcgcctgcgaccgagggacggggagggagtgaggtggaaggcggccgaaccgctttggacaacaagacctctttgttgaatactcagcccccccgcgcttttcctgggcctagagcacgcgactataacccatacccatacagcgatgcgataaacacatatgacaaaacagcgctgaaggaggccgtgtttgacgacgacatggagcaattaagggacgttccaatcgatcacagcgatctggtggctgacctgttgaaagagctttcaaatcacaacgagcgggtggaggagcgcaaaggcgcgttactggagcttctgaaaatcaccagggaggatagcctgggtgtgtgggaagagcacttcaagacgatactgttactgttgctggaaacattaggtgacaaagatcacagcatacgcgctcttgcgcttcgtgtcttgagggagatcttgagaaaccaacccgccaggtttaaaaactacgctgagctcaccattatgaagactttagaggcacacaaggattctcataaggaggtggtgcgggctgccgaggaagccgcatccactctcgcaagcagcattcaccctgagcaatgtataaaagtgttatgccctataattcagacagcggattatccaataaatcttgctgctattaagatgcagaccaaggtcgttgagcgcattgctaaggaatccctgttgcaattgctggttgatataattccaggcctgcttcaaggctatgacaatacggagtcgtcagtaagaaaggcctctgtgttttgcctagtggctatctatagtgtgatcggggaggacctgaagccccatctggcacagctcactggctcgaaaatgaaactccttaacttgtatattaagcgagctcagacaactaatagcaattccagtagcagttccgatgtgtctactcattcctag

SEQ ID NO: 184580 - DNA, 4416 bp, synthetic construct
  misc_feature 1..4416: note = Description of Artificial Sequence: Synthetic coding sequence
  source 1..4416: mol_type = other DNA
atggagccccggatggagagctgcctggcccaggtgctgcagaaggacgttggaaagaggttgcaggtggggcaggagctcattgactacttttctgataagcagaagagcgccgacctggagcatgatcagaccatgctggacaagcttgtggacggacttgctaccagctgggtcaactcttccaactataaggttgtgctcttggggatggacatactctctgcccttgtgacgcgtctgcaggaccggtttaaggcccaaattggtacagtgctgccatccctgatcgaccggctgggcgacgcaaaggactcggtgcgagagcaggatcagacgctcctgctgaagattatggaccaggcagcaaacccacagtatgtctgggatcgcatgctgggggggttcaagcacaagaactttcggactagggaaggaatttgtctctgcctgattgctacccttaacgcatccggcgctcaaactctaacgctatccaaaattgtacctcacatctgcaatctgctaggggacccaaactcccaggtgagagatgccgccataaacagtctcgtcgaaatctacagacatgtcggcgagcgggtgcgcgctgaccttagcaagaaaggattgcctcagagcaggctgaacgtgatcttcactaaattcgatgaggtccaaaagtcaggcaatatgattcaatccgctaatgacaagaacttcgacgatgaagatagcgtggacggcaacaggcctagttccgcatcgagtacaagctctaaagcccctccaagtagccggcggaatgtaggtatgggcacaacacgccgattagggtctagtacgctgggatctaagtcaagtgctgccaaggagggggcgggagccgtcgacgaggaagatttcattaaagcatttgacgacgtaccagtggttcagatatacagctcgagagacctggaggagtccataaacaaaattcgagaaatcctgagcgacgataagcatgactgggaacagcgcgttaatgccctgaaaaagatacgatctttactgctggctggcgcggcagagtacgataacttctttcagcatttaaggctcctggacggggccttcaagctctccgccaaggaccttaggtcgcaagttgtccgcgaagcttgtattaccctcggccatctatcgagcgttcttgggaataagtttgatcacggtgcggaagctatcatgcccacgatcttcaatctgatccccaatagtgcaaaaattatggctacctcaggcgtcgtggcggtgcgactcatcatccggcatactcacataccgcgcctcattccagtgattacaagtaactgcacgagtaaatcagtggccgttaggagaagatgtttcgaatttcttgatctcctgctacaggagtggcagacccactcacttgaaagacatatctctgtgctcgccgagaccattaaaaaaggtatccacgacgccgactccgaggcccgcatcgaggcccggaagtgctattgggggttccatagccatttttctagagaagccgagcatctctaccacactctggagtcaagctatcagaaggctctgcagtcccacctgaaaaattctgatagtatcgtgtcattgccgcagtccgatagatccagctcatcgtcccaagaaagcctgaatagacctctgagcgccaagcggagccccactggaagcacaaccagccgagcttctacggtttcaactaaaagcgtctccacaaccggttcactgcaacggtcgaggtccgacattgatgtgaacgccgccgcgagtgcgaaatccaaggtgtcatccagttccggtacgactccttttagctccgcagcagctctgccccccggctcttacgcttctttggggaggattcgcactcggcgccaaagctcaggaagtgcaactaatgtcgcttcaacaccagacaacaggggacggtctagggccaaggtagtatcccagtcacagaggagccgcagcgccaaccctgcaggggccgggtcccgatcctcttcccctggcaagctgctagggagtgggtacggcggactgactggcggttctagtcgtgggccccctgtcaccccctctagcgaaaaacgtagtaaaattccacgcagtcaaggctgttcccgcgagacttctccaaaccgcatcggcctggatcgatttgggttaggccaacctggccgaattcccggcagcgtgaatgccatgagggtcttgtcaaccagtaccgacctcgaggcagccgtagcggatgccttactgctcggcgatagccggagcaagaagaagcccgtgcggcgacggtacgaaccctatggtatgtactcagacgacgacgcaaattccgacgcctccagtgtttgctccgaacggagctacggtagcaggaacggtggcatcccacactaccttagacagacagaggacgtggctgaggtcttgaaccattgcgcctcctctaattggagcgagcgtaaggaaggtctgctggggctacaaaaccttctgaagagtcaacgaaccctgtccagagtggaactgaaacgtctctgcgagatcttcactcgaatgtttgcggacccgcattccaagcttgttttttccatgtttctcgaaactcttgtggattttatcatcattcacaaggatgacttgcaggattggctgttcgtgctgctcacacagcttctgaaaaaaatgggcgcggaccttctgggatctgtgcaggcaaaggtccagaaggccctggatgttaccagagatagttttccgtttgatcagcagtttaacatcctgatgcggttcatcgtggatcagactcaaaccccaaatctaaaagtgaaggtggcgattcttaaatatatagagtctctggctcgccagatggatcctaccgatttcgtgaactcatctgagacccgtcttgcagttagcagaattatcacctggaccactgaaccaaaaagctctgatgttagaaaagccgcccagattgtcctcatcagcctgttcgagcttaacacacctgaatttacaatgctgctgggcgccctgcctaaaacatttcaggacggagccaccaagttgctccataaccacctcaagaacagttctaacacaagtgttggaagtccaagcaacacaatcggccggaccccttctagacacacctcatccagaaccagtccgctcacaagtcccacgaactgctcccacggcgggctgagcccctcaatgctggattatgacacagagaacttgaacagcgaagagatttacagctctctgagaggcgtcaccgaagctatagagaagtttagcttccggtcacaggaagacctgaatgagccaataaagagggatggtaagaaggagtgtgacattgtctcacgagatggtggagcagcctctccggctactgaggggcgtgggggaagcgaggtggaaggaggacgtacagccctcgacaacaagacgtctcttctgaacactcaacctcctcgagcttttcctgggcccagagccagagattataacccgtatccgtattccgatgcaattaatacttacgataagaccgctctgaaagaggccgtctttgacgacgatatggaacagcttagagacgtgcctatcgaccatagtgacttggttgccgacctgctcaaggagctttctaatcacaatgagcgcgtggaagaacgtaaaggagcactactggaactcttgaaaatcacacgcgaagattcactcggagtgtgggaggagcatttcaaaactatccttttgctgttgctggaaacccttggagacaaagatcatagcattagggcactggctttacgcgtgctccgggagatactcagaaatcagccagcaaggtttaaaaactatgcagagctcacgatcatgaaaacgctggaggcccataaggactcccacaaagaagttgtcagagcagccgaggaggctgctagtacactggcctccagcatccaccctgaacagtgtataaaggtcctctgtcccatcatacaaacagcagattaccccataaatctggctgctattaagatgcagaccaaggtggtcgaaaggatcgcgaaagagtctctcctgcagttattagttgatattatcccgggcctcctgcaaggttacgataacacggaaagctcagtgaggaaggcttccgtgttttgcctagtcgccatttattccgtcattggcgaggacctgaagcctcacctcgctcagctgactggcagtaagatgaaactcctgaacctctatattaagcgagcgcagaccacaaacagcaactcatctagcagttccgacgtcagcactcactcttag

SEQ ID NO: 184581 - DNA, 2115 bp, synthetic construct
  misc_feature 1..2115: note = Description of Artificial Sequence: Synthetic coding sequence
  source 1..2115: mol_type = other DNA
tgaaccaagttcgacgaggtgcagaagagcggcaacatgatccagtccgccaacgataagaacttcgacgacgaggactcggtcgacggaaatcgaccctcgtctgccagctctacgagctccaaggctcctccttcctctcgcaggaacgtgggcatgggaacgacgaggcggctcggcagcagcactttggggtctaagagttccgcagcaaaagaaggggcgggtgctgtggacgaggaagacttcatcaaggcatttgatgacgtccccgtcgtgcaaatttatagctctcgtgatctggaagaaagcatcaacaaaatcagggaaatcctgtcggacgacaaacatgattgggagcagcgagtgaatgctctcaagaagatcaggagcttgctgttagctggtgcggccgagtacgacaacttttttcagcacctgcgcctgctggatggcgcattcaaactttcagccaaggacttgcggtcccaggtggtgcgagaagcctgcatcaccctgggccatttaagctccgtacttggtaacaaatttgatcacggcgcagaggccatcatgccaacgatcttcaatctcataccaaattctgctaaaatcatggctacctccggcgtcgtggccgtgagattaatcattcggcacacacacatcccacgacttatacccgtaatcacctctaactgcacaagtaaaagtgtggccgttcggaggcgctgcttcgagttcctagatctgctcctgcaggagtggcaaacacattcccttgaacgacacatcagtgtgctcgccgaaacaatcaaaaagggtatccacgacgcggattcagaggctcgaatagaagcgagaaaatgttattggggattccattcacattttagcagggaggcggagcacctgtaccatacactggaaagttcataccaaaaagctcttcagtcgcacttgaaaaacagtgatagtattgtttccctgcctcagagtgataggagttcaagcagttctcaggaaagccttaaccgccctctgtccgcaaagaggtcgccaactgggtccacaacctcccgcgcctcaacagtttctaccaaatcagtgtctacaaccggcagtttacagaggtcccggtcagacatagacgtaaatgccgctgcaagcgctaaaagcaaagtgtcttcatcatccgggactactccattctcgtcggctgccgctttaccacctggctcatacgcatcacttggccgcatcagaacgcgacggcagagcagcggatcagcaactaatgtggcatctacaccagacaacagggggcgtagcagggccaaagtggtgagtcaatcacaacgcagccgatcggcaaacccagcaggcgcaggtagtagaagcagcagccctggaaaactcctggggagtgggtatggagggttgacaggtggctctagccggggtccacccgtgaccccctcatcggagaaaagatcgaagatccccaggagtcagggctgctcccgagagaccagtccaaataggattgggctcgacagatttggactcggacagcctggccgaataccaggctctgtcaacgcaatgcgcgtgctgagtacgtctaccgacctggaagcggctgtcgctgacgccttgctcttaggagactctcggtctaaaaagaagcctgtgcgcagacgctatgaaccctacggcatgtacagcgatgacgacgctaattccgacgcctcctcagtttgcagcgagcggtcttacggcagccgaaatggcggcattccacactacttgcgccagaccgaggacgtcgccgaggtgttgaatcactgcgccagctcaaactggagcgaacgtaaggaaggtcttctggggctgcagaacctgctgaaatcacagcgcacacttagtagggtggagctcaaaaggctgtgcgagatttttactcggatgttcgctgatccccattcaaagattgcagacagtgaggcggagtgtgaggataaagaagggaatctttttcccagcgaggtatcctgtacagtgagcttccagtacgtcttcggcgactcatgcggtttttataataacagctag

SEQ ID NO: 184582 - DNA, 4485 bp, synthetic construct
  misc_feature 1..4485: note = Description of Artificial Sequence: Synthetic coding sequence
  source 1..4485: mol_type = other DNA
atggagccccggatggagagctgcctggcccaggtgctgcagaaggatgtcggaaagaggctgcaggtggggcaggagttaatcgactactttagtgataaacagaagagtgcagaccttgaacatgaccagaccatgctcgacaagcttgtagacggattagcgactagttgggttaactcgtcaaattataaggtggtgctgttaggtatggatattttatccgctttggttacacggcttcaggatcgatttaaagcccagattggcactgtactccctagccttatcgatcgcctcggtgacgcgaaggattctgttagggagcaagaccagacactcctgttaaaaattatggaccaagcggcaaacccccagtacgtgtgggacaggatgctgggtggcttcaaacacaaaaactttcgcacacgagaggggatttgcctgtgcctcatagcgactttaaatgcaagcggcgcacagacacttacactttctaaaattgtcccacacatctgtaatcttctgggggatcccaattctcaggtgcgagacgcagccatcaactccctggtggaaatctacagacacgtgggcgagagagtgcgtgcagacctatccaagaaagggctgcctcagtctcggctgaacgtaatcttcacaaaattcgatgaggtccaaaagtctggaaatatgatccaaagcgccaatgacaaaaattttgatgacgaggattctgtggacggtaaccgcccctcgtcggccagctccacctccagtaaggcgccccccagtagcaggcggaatgtcggcatgggaactacgagacggctgggttcctcaactctaggttctaaaagtagcgctgccaaagaaggcgccggcgcagtggacgaagaggatttcatcaaagccttcgacgatgttcctgttgttcagatatattcgtcgcgcgacctggaggagagcatcaacaaaatcagggagatactgagtgatgataaacatgactgggagcagcgagttaacgccctgaaaaaaatccggagcttgctgctggcaggcgctgccgaatatgacaatttctttcaacacttacggctcctggatggcgctttcaagctgtccgcgaaagaccttcggtctcaagtggtgagggaagcttgcatcactcttgggcatctgtcttccgtcctgggtaataagtttgaccacggcgcggaggcaattatgcccacgattttcaacctcatccccaattccgcaaagatcatggcaacttccggggtggtggccgtgagactaattattcggcacacacacatcccgcgcctgatcccggtgatcacgtctaattgtacgtctaaaagtgtcgccgtcaggaggcgttgctttgagttccttgatctgttgttgcaggagtggcagacccattcgctggaacgacacatctccgtccttgctgaaactattaaaaagggcatccacgatgcagatagcgaagcgcggatcgaggcaaggaaatgctattggggattccattcacatttcagcagagaagctgagcacctgtatcatactctggagagctcatatcagaaggcattgcaatctcacttgaagaacagtgatagcattgtgagtctgcctcagtcagataggtcatccagctcttcccaggaaagcctcaacaggccattgagcgccaagagaagtcccaccggctccaccacatccagagcctcaacagtcagtaccaagagcgtgagcaccactggcagccttcagcgttcaagatccgatatagatgtgaatgctgccgccagcgctaaaagcaaggtgagctcaagcagcggcaccaccccctttagttcagcagccgcgctcccaccaggcagctacgcctccctaggaagaatcagaaccaggcgtcagagcagtggaagtgcaacgaatgtggcatccacccctgacaatagaggcagaagccgggccaaggttgtttcacaatctcagaggtcacgtagtgctaaccctgctggagcaggctctaggtcgtccagtcctggtaaacttctggggagcggctacgggggccttactggaggctcgtctagagggccaccagtaactccgtccagcgaaaagaggtccaaaataccacgctcccaggggtgttcgcgggaaacgagtcccaatagaatcggactggaccgattcggactgggacagcctggtcggatcccgggatccgtgaacgctatgagagtgctgtctacctctactgaccttgaggcagccgtggctgacgcacttgtgagaggcaccagcaccggcaaaaagaaaccggtgcggcggcggtacgagccatatggaatgtacagcgacgacgacgccaactcagatgcgagttctgtatgcagcgaacggtcttacggcagtaggaatggtggcatccctcattacctcagacagacggaggacgtggcagaagtgttaaatcactgcgcgtcctctaactggagtgagagaaaggaagggttgttaggtctccaaaatttactgaaatcacagcgcacactctcccgggtggaactgaaacgactgtgtgaaatttttacacggatgtttgcagaccctcatagcaaaatcgccgatagtgaggctgagtgcgaagacaaagaaggcaacctgttcccatctgaagtctcttgtaccagggtctttagcatgttcttagaaactttggtcgacttcattataatacacaaagatgacttgcaggactggctgtttgtgcttctgacacagctgctaaaaaaaatgggtgcagatctgctcgggtccgtccaggcaaaggtgcagaaggcactggatgtgactcgagacagctttccctttgatcagcagttcaatatcctgatgaggtttattgtggatcaaactcagaccccaaacctgaaggttaaagtggccatcctgaaatatattgagagtttggcgaggcagatggatcccaccgattttgtgaattcaagcgagactaggttggccgtgagtcgcatcatcacttggactacggagcctaaatcttcagacgtgcgaaaagccgctcagattgtgttaatctccctcttcgaattgaatacgccggagttcaccatgttgctcggagccctgccaaagaccttccaggatggtgccaccaagttgttacataatcatctgaagaattcctcaaatacatcggttggctcacccagtaatactattggaaggactccgtcccggcacacctcttccagaacgtctccattaaccagtccgaccaattgctcacacggcggtctaagcccctctatgctcgactatgataccgagaatctgaattccgaagagatttacagttctctccgcggggtaaccgaggctattgaaaaattttcgtttcggtcccaggaggatcttaacgaaccaatcaagcgggacggcaagaaagaatgtgacattgtgagccgagacgggggcgccgctagcccagccaccgaaggcagaggcggctctgaagtggaagggggaagaaccgccctggataacaagaccagccttctcaatactcagccccctcgcgcctttccaggacctcgagccagagattacaacccatacccttatagtgatgctattaacacatacgataagacagcacttaaagaagccgttttcgacgacgatatggagcaattgcgggatgttccaattgatcacagtgacctggtggccgatctcttaaaggagctatctaaccacaacgaaagagttgaggaaaggaagggcgcactgcttgaattgctgaagatcactagggaagattccctgggcgtttgggaagaacattttaaaaccattcttttgctgctgctggagactcttggggataaggaccattccatccgagctttggccctgagggtcctgagggagatccttagaaaccagccggctaggtttaagaattatgccgagctaactatcatgaaaacactggaagctcacaaggatagtcacaaggaagtggtcagggctgccgaagaagccgcctcaacattggcgagttcaattcatcctgaacagtgcatcaaggtgctgtgcccaatcattcagacagcagactacccgatcaacctggccgctatcaaaatgcaaaccaaggtggtggaacgaatcgcaaaggagtccttactccagcttctcgtggacataatacccgggcttttacagggttatgacaatacagaatcaagtgtacgcaaagcgagcgtattttgcctggtcgctatctattccgtgatcggcgaggacctgaaaccacacctagcacagctgaccgggagcaagatgaaactgctgaatctgtacataaagagagcccagactaccaactctaattcttcatccagctccgacgttagcactcattcatag

SEQ ID NO: 184583 - DNA, 4434 bp, synthetic construct
  misc_feature 1..4434: note = Description of Artificial Sequence: Synthetic coding sequence
  source 1..4434: mol_type = other DNA
atggagccccggatggagagctgcctggcccaggtgctgcagaaggacgtgggaaaacgcctccaggtgggccaggagctgattgactatttctcggacaagcaaaagtcagctgacctggaacatgaccagaccatgctcgacaagttagttgatgggttagccacctcctgggtgaattcctcaaactacaaggtagtcctgctgggaatggacattctgagcgcacttgtcaccaggctacaggacagattcaaggcccagatcggcaccgttttaccatctctgatcgacaggctcggggacgccaaagactctgtgcgagagcaagaccagaccttgctgctgaagattatggaccaggcggccaaccctcagtatgtctgggacaggatgctgggcggttttaaacacaagaacttcagaacacgcgaggggatctgcctgtgtctgattgctaccttaaatgcatctggggcccagacactcaccctgtcaaagatcgtaccacacatttgtaacctcctgggcgaccccaactcacaagttagagacgctgctataaattcactggtagagatatacaggcacgttggggagcgagtgcgggctgatctgagtaagaagggcctacctcagtcaagacttaacgtgatttttactaagttcgatgaggtccaaaaatccggtaacatgatacagtcggcaaatgataaaaactttgatgatgaggattctgttgacggaaacaggcccagctcagcatccagcacctcctcaaaagcaccaccatcctcccgtcgaaatgtcggtatgggcaccacccgccgattgggaagttcgacactgggttccaagtcatccgctgctaaggagggtgccggcgccgttgatgaggaggactttataaaagcatttgacgacgtcccggtcgtgcagatctactcatctcgcgacctcgaggagtcaattaataagatacgtgaaatcctttcagatgataaacatgactgggagcaacgcgtcaatgcccttaagaaaatccggagcctactactagcgggcgctgccgaatacgacaatttcttccagcacttgagattgctcgatggagcttttaaactttcagccaaagatctccggtcgcaggtagtgcgcgaagcttgcatcactctgggccacctatcaagcgtgttaggaaataaatttgatcacggagctgaggctatcatgccaactatcttcaatctaatcccaaattccgcaaaaatcatggcaacaagtggagtggtagccgtccgactgatcatcaggcacacacacatccccagactaatcccagtgatcacctccaattgtacatccaagtccgtcgctgtgcggcgtcggtgtttcgagtttctggatctgctgctgcaggagtggcagacacactccctggagagacatataagcgttctggctgaaaccatcaaaaaaggaatccacgacgcagacagcgaagccagaattgaggcccgtaagtgctactggggctttcacagtcacttttcccgtgaggcggaacatctttaccacaccctggagtccagctaccaaaaagccttgcagagccacttgaagaacagcgactctattgtaagcctcccccagagcgatcggtcctcgtctagttcccaagagtcattaaatcgccctctgagtgctaagaggtccccaacagggagtactacctctcgggcctctacagtgagcacaaagtcggtatctacaacaggctccttgcaacgatctaggagcgacatagatgtgaacgctgccgcctccgccaagagcaaggtttcctcgtcttccggaacgactcccttctccagtgccgctgccctcccacctggcagctatgctagccttgaatcccgccatatgagggaggatatggaatacatcggcctggactctggcaggatcagaacccgacggcagtcatccggaagcgcaactaatgtcgcttctacccctgataatcggggacggtcccgggctaaagtcgttagtcaatcccagcctggcagccggtccagctcacctgggaaactcctcgggtccgggtacggcgggttgaccggcggctcttccaggggcccgcctgtgacccccagttccgagaaaagatccaagattccacgctcacagggttgctccagagagacctctccaaacaggattgggctggacagattcggtctcggccagccaggcaggattccggggtccgtcaatgcgatgcgggtcctctccacctctaccgaccttgaggccgccgtggctgatgctttgctgctgggcgactctcggagcaagaagccggtaagacgaagatacgaaccctacgggatgtatagcgatgacgacgccaatagtgatgcctcatccgtgtgcagcgagaggagctacgggtcacggaacggaggcataccgcattatttgcggcagaccgaagacgtcgccgaggtgcttaaccactgtgcaagctcaaattggtccgagcggaaggaggggctgctgggattgcaaaacctgctgaagtctcagcggacattgtctcgggtagagctaaagagactctgcgagatatttaccagaatgttcgcggacccacattctaagcgcgtattctccatgtttctcgaaactctggtggattttattattatccacaaagacgatctacaggattggttgtttgtcctgttaactcagttactgaagaagatgggcgccgatctcctgggctctgtccaggcaaaggtccagaaagcactggatgtgacgagggattcattcccatttgatcagcagtttaacatcctaatgcgcttcatagttgatcaaacccaaaccccaaacttaaaggttaaggtcgccatcctcaaatacatagaaagtcttgctagacaaatggacccgaccgattttgtgaattcttcagaaactaggctagccgtgtccaggataattacatggaccacagaacccaagtccagcgatgtacgcaaagctgctcagattgtcctgatctctctctttgaactcaacacacccgaattcaccatgctgcttggagctctgcctaagaccttccaggacggagccaccaaacttctgcataatcacctgaagaacagctcgaatacctcagtggggtctcctagcaacactattggtcgaactccatccagacatacaagctcgcggacatcacccctgacatcaccgactaactgcagccacgggggactatctccgtcaatgttggactatgacaccgaaaacctgaattccgaggagatctatagtagcctccggggagtcactgaggcaatagagaaattcagctttagatcgcaggaggatttaaatgaaccaatcaagagggacggaaagaaggaatgtgacattgtgtccagggacggtggggccgctagccctgccacagagggtcggggcggaagcgaggtcgagggagggaggacggcactcgacaacaaaacctcactgttgaacactcaacccccacgcgcctttccaggaccacgcgcacgggattacaatccgtacccatacagcgacgcaataaacacatatgataaaacggccctgaaagaagctgtctttgatgacgatatggagcagctgagagatgttccaatcgatcattcggaccttgtggcagatctgctgaaggagctgagcaaccataacgagcgggtcgaggagcgcaagggtgccttgttggagctccttaagattactcgagaggatagccttggtgtgtgggaggagcacttcaagaccatcctccttctgctattggagactcttggtgacaaggatcattccataagggccctagctctgcgtgtcctgcgggagattctgcgaaaccagccagctaggttcaaaaattacgctgagctcaccattatgaagacacttgaggcacacaaggactctcataaggaggttgtgagggcagccgaagaggcggctagcactctggcgtcaagtattcaccctgagcagtgtataaaagtgctgtgtccaataatacagactgcggattatccgatcaacctggctgccataaaaatgcagaccaaagttgtcgagcgcatcgccaaggaatctttactccagctcctagtggacatcatacccggcctgttgcagggttacgataacactgaatccagcgttcgtaaagccagcgtgttctgcctggtcgcaatttacagcgtgattggggaggatctgaagccacatctcgctcagctgaccgggtccaagatgaaactcctcaatttatacatcaagagggcgcaaactactaacagcaattccagctcatctagcgatgtctctacacactcttag

SEQ ID NO: 184584 - DNA, 3768 bp, synthetic construct
  misc_feature 1..3768: note = Description of Artificial Sequence: Synthetic coding sequence
  source 1..3768: mol_type = other DNA
atgctgcagaactgcagcgacaagaacttcgacgacgaggacagcgtggatggtaataggccgtcgtcagcgagttcaactagtagcaaagcgccgccttccagccgaaggaatgtgggcatgggcacaacacggagactcggctcctccaccctggggagtaaatctagtgccgccaaagagggggcgggtgcggtagacgaagaggactttatcaaggccttcgacgatgttcccgtggttcagatttactcctcgcgggacctggaagagtcgattaacaagattagggagatcttatccgacgataaacatgactgggagcagagggtaaatgctctcaaaaagattcgcagcctactgcttgctggcgcagcagaatatgataacttcttccaacacttgcgcttgttggacggggcctttaaactgagcgcaaaggatctacgcagccaagtcgtacgggaagcttgtattaccctggggcatctcagctccgtgttggggaacaaattcgaccacggcgccgaagcaattatgcccacaatctttaacctgattccaaactctgcaaagatcatggcgaccagcggggttgtggccgttaggctaatcatacgtcacacgcacattccacggctaatcccagttatcacgagcaactgcacatccaagtcggtggccgttcggcggaggtgctttgaatttctcgacttgctcctccaagaatggcagacccacagtctggagcgccacataagcgtgctcgcagagaccattaaaaaaggaatccatgatgccgactcagaggcccgaatcgaggcaaggaaatgctactggggcttccactcccatttttctcgggaagcagagcatctttatcacactctggaaagttcctaccagaaagctctccagagccacttaaagaatagcgactctattgtgtcacttcctcaaagcgacagatcgtcatcatcctcccaagagtctttgaacaggcccttgagcgctaagcggtctcctaccggcagtaccacctctcgggcttcgactgtttctaccaaaagcgtgtccaccactgggtccctgcagcgctccaggtcagacatcgacgtcaatgccgctgctagcgccaaatccaaagtgtcatcatccagcggaactacccctttctcatccgctgccgcactgccgccggggtcctatgcttccctcggtcggatccgaacaaggcggcagtcgagcggctccgccaccaacgtcgcttccacgccggacaatcgtggacgatctcgggcgaaagtggtatctcaatcccagaggtctcggtccgctaaccccgccggagccggaagcagatcctctagtccgggtaaacttctcgggtccggttacgggggcctcactggtggtagcagccgcggccctccagtaacaccaagcagtgaaaagcgctctaaaattcccaggtcccaaggctgcagtcgtgaaacatcacccaaccgaatcgggctggaccgctttggacttggtcagccaggacgtattcccggctccgtgaacgccatgagggtacttagtaccagcacggacttggaggccgcagtggcggacgcgctgaagaaaccggtgaggcgcagatacgagccatacggaatgtactctgacgatgacgctaactcagatgccagcagcgtgtgcagcgaaaggtcttatgggtccaggaatggggggattccccattacctgcggcagacagaagatgtcgcagaagtgctgaaccactgcgcatcatcaaattggtcagagcggaaagagggcctgctgggtcttcagaatttgctgaaaagtcagcgcacactaagccgggtggagctaaaacgcctctgcgaaattttcacaagaatgtttgctgacccccactctaagatcgctgattccgaggctgagtgtgaagacaaggaggggaacttattcccatccgaggtttcttgcacgcgagtgttctcgatgtttcttgaaacattggtggactttataatcatccataaggatgacctccaggattggcttttcgtgctgttgacccaacttcttaagaagatgggtgctgatttactgggatctgtccaggcaaaagtccagaaggccctcgatgtcacaagggattccttcccatttgatcagcagtttaacattctgatgagatttatcgtcgatcagactcagacaccaaatttaaaagtgaaggtggccatcctgaaatatatcgaaagcttggctcgtcagatggaccctaccgatttcgtgaattccagtgagacgcggttggccgtgagccgaatcatcacttggaccaccgaacccaagtctagtgacgttcgcaaggcagcccagattgtcctgatttccctgtttgagctgaacacccctgagttcacaatgctgctgggagcacttcctaagacctttcaagacggcgccacaaaactcctgcacaatcacctgaaaaatagctcaaatacctccgtgggttcaccctcaaacactataggccggactccgtcaagacacacttcatccaggaccagccctttgacctccccgactaattgctcacatggaggtctgtccccatccatgctcgactatgatactgaaaacctgaacagtgaggagatctattccagtcttcgcggggtgacagaagcaattgagaaattttccttcaggtcccaagaggatcttaatgaacccattaagagagatggcaagaaggagtgtgacattgtgagtcgagatggaggggcagcctcccctgcgacagaggggcgcggtggaagcgaggttgaaggaggccggactgctctcgacaacaagacatcactccttaatacgcaaccacctcgggcttttcctgggcctagagcccgagactataatccgtacccgtactccgacgctatcaacacttatgataaaaccgccctgaaagaggcagtcttcgacgatgacatggagcagctgagggacgtgcccattgatcacagtgacttagtggccgatcttcttaaagaactgagcaaccacaacgagagagtggaggaacggaagggtgccctgctggagctgctaaaaattactcgagaggacagcctgggcgtgtgggaggagcactttaagaccatcctgctgttgcttcttgagacgcttggtgataaggatcattccatccgggcacttgcactgagagtgttgcgtgagatactgaggaatcagcctgctcgtttcaaaaactacgcggagttgacaattatgaagaccctggaggctcacaaagattctcacaaagaggttgtgagggccgctgaggaagcagccagtaccctcgccagttctatccatcccgagcagtgtatcaaagtcctttgtcctatcatccagaccgcagactatccgataaacctggccgcaataaaaatgcagaccaaggtggtcgaacgcatcgccaaggaaagcctcctccaacttttagttgatattattccagggctgctccaagggtatgacaatacagaatcttcagtcagaaaagccagcgtgttttgtctagttgcaatttatagcgtgatcggtgaggacctgaagccacacctagctcaactgaccggatcaaaaatgaagctgctaaatttatatatcaaaagagcccagactacaaattcaaatagctcctcttctagcgacgtctcaacccattcctag

SEQ ID NO: 184585 - DNA, 3738 bp, synthetic construct
  misc_feature 1..3738: note = Description of Artificial Sequence: Synthetic coding sequence
  source 1..3738: mol_type = other DNA
atgaccaccggcaaggacaagaacttcgacgacgaggacagcgtggacgggaacaggccctcttccgccagctccacatcttccaaggcgccccccagttcacgacggaatgtggggatgggtaccacccggcggttagggtccagtactctggggagtaaatcttcagctgcaaaggagggggcgggcgcggttgatgaagaagattttatcaaagcatttgacgacgtgcctgtggtgcagatatacagctcccgagacctggaggaaagtatcaacaaaatccgtgagattctgagcgatgacaagcacgattgggaacagcgggtgaatgctctgaagaagattcggtccctgctgcttgccggcgccgccgagtatgacaacttcttccaacacctccggctgttggacggcgccttcaaactgtctgccaaggacctgcgctcacaggtggtaagagaggcttgtatcactctgggccacctctcgtcagtgctggggaataagtttgatcacggcgccgaggccatcatgcccacaattttcaatctgattccgaattctgcgaagatcatggctacaagcggtgtggtagctgtgaggctgataattcgccacacacacatccctcgattaattcctgttatcactagcaactgtacatccaagagcgtcgctgtgcgtcgaaggtgcttcgaatttcttgatttgcttcttcaggaatggcagacacatagcctggagagacacattagtgtgctggccgagactattaagaaggggatccacgatgctgattctgaagctcgaatcgaggctagaaagtgttattgggggttccactctcatttttcccgagaagccgagcacctgtaccacaccctggaatcgagctatcagaaagcactacaatcccacctgaagaattctgacagcatcgtgtctctgcctcagtcagacagatcttcaagctcaagccaggagtccctgaaccgaccactgagcgcgaaacggagcccaacagggtcaaccaccagccgagccagcaccgtttcaactaaatctgtttcgaccacaggctcactgcaacgctcacgaagtgacatcgacgtcaatgccgcagcttcagccaagagcaaagtgtcatcctcctccggcactacccctttctcttcagccgctgcgcttcctcccggttcctacgcttctctggatggtaccacgacaaaggccgagggaaggatccgcacaagacgccagtcctcggggtctgccacaaacgtggcctctactccagataatagaggccgtagccgggccaaggtggtcagccagtctcagagatctcgcagcgcgaatccggctggcgctggatcgcggagcagcagccccgggaagttgctggggagcgggtatgggggccttacaggaggcagtagccgtgggcctccagttacaccatcctccgagaaaagatcaaaaattccacgcagtcaggggtgtagtagggaaacaagccctaacaggatagggttagatcgcttcggcctgggacagccaggcaggattcccggatctgtgaacgccatgagagtcctcagtactagcacggacctcgaggctgccgtggcagatgcgctattacttggcgattcccgctcgaagaagcctgtgcgccggcgttacgaaccatacggaatgtattccgatgatgacgccaattctgatgcgagcagtgtctgttccgaacggtcttatggctcccgtaatggtggtatcccccattatctaagacaaaccgaggatgtcgctgaagtcctcaatcactgcgcatctagcaattggtcggaacgcaaggaggggttgctgggcctgcagaatcttctgaaatcccaaagaaccctgtcaagagtcgaactgaaaagactgtgtgagatcttcactagaatgtttgccgatcctcacagcaaagtgttttctatgtttctcgaaactctggtcgattttatcataattcacaaggatgacttacaggattggctgttcgtgttgctaacacagctgctcaaaaaaatgggtgcagacttacttggaagcgtgcaggcaaaagtgcagaaggctctggacgttactcgggattcattcccgtttgatcagcagttcaacatcttgatgcggttcatcgtcgaccagactcagactccaaacctgaaagttaaggttgcaatcttgaaatacatcgagtctctggcccggcagatggaccccaccgattttgtcaattcctccgaaacccgtctcgcagtgagccgcattatcacatggaccaccgagcccaaaagctcggatgtgagaaaggccgctcaaattgtgctcatctcgttgttcgaacttaatacaccggaatttaccatgctgttgggcgcacttcctaaaaccttccaggacggagctactaaactattgcacaatcacctcaaaaacagctcgaatactagtgtcggtagccctagcaatactatcgggcggacaccttcaaggcatactagttctcggacgtcaccactgacatccccgacaaactgctctcacggcggactcagtccatccatgctggattacgacacagagaatctgaactccgaggagatctattcaagtctgcggggagtgacggaagcaattgaaaaattcagtttccggtcccaggaagacctcaacgagcccataaagagagatggcaagaaggagtgcgatattgtcagccgcgatggcggagcagccagtcctgccaccgagggcagggggggtagtgaggtggagggtggcagaactgccttagacaacaaaacttcccttctcaacacccagccgccccgtgccttccctgggccaagggcacgggactacaacccatacccatacagtgatgctataaacacttacgataaaactgccctgaaagaggcagttttcgatgatgacatggaacagttgagagatgtgccgatagaccactccgacctcgtggctgatctcttaaaggagctcagtaaccacaatgaacgggtcgaggagcggaagggcgcactgctcgagctcctcaaaatcacacgagaggattctctcggtgtttgggaagagcactttaaaacgattctgctgttgttgctggaaaccctgggcgacaaagatcactcaattagggctctggcccttcgagttcttcgggaaatccttcggaatcagccggccagattcaagaactacgcggagttgacaattatgaagaccctggaagcccataaggacagtcacaaggaggtggtgagagctgccgaggaagcagcgagcactcttgctagctcaattcatcctgaacagtgtattaaagtgctatgcccaataatccagactgctgactaccctattaatctcgctgccataaaaatgcagactaaagtggttgagcgaatcgctaaagaatccttgcttcaactgctggtcgacataatcccagggctgcttcagggctacgacaatacagagagcagcgtccggaaggcctccgtgttctgcttggtggcgatttactccgtgatcggggaggatttgaagccacacttggctcagctgaccggaagcaaaatgaagctgttaaatttatacatcaaaagagctcagacaactaactctaactcctccagcagtagcgatgtgagtactcactcatag

SEQ ID NO: 184586 - DNA, 2988 bp, synthetic construct
  misc_feature 1..2988: note = Description of Artificial Sequence: Synthetic coding sequence
  source 1..2988: mol_type = other DNA
atgggcctgcggaaccacttccccggcgaggccgagaccctgtacaacagcctggagccttcctaccaaaagtccttacaaacttatctgaagtcctctgggtctgtggcaagtcttccccaaagtgacagaagtagtagcagtagccaggagtctttgaacaggcccttttcctccaagtggagtaccgcaaaccctagcacagtggccggccgggtaagcgccggttcatccaaagcgtcaagtttgcctgggtctttacagagaagcaggtcggatatcgatgtcaacgccgcggccggggccaaggcccatcacgcagcgggccagtctgtccgttctggtagactcggcgccggcgcgctgaacgccggatcttatgccagcctggaagatacttcggacaagttagatggcacggcgtcagaggatgggagagtgagggctaagttaagcgcaccccttgctggaatggggaacgccaaagctgactcacgtggaaggagtagaactaaaatggtgagtcaaagccagcccggtagtcggtccgggagccctgggcgcgtgttgaccacaaccgccctgtccaccgtctctagtggcgtgcagagagtactggtgaatagcgcttcagcacagaagaggagtaaaatccctcgcagtcagggttgctcccgagaggcgagtccgtctcggctttcggtggcgagaagtagtcgcattcccaggccctctgtgtcacagggatgtagccgtgaagcaagcagagaatcctctcgggacaccagccctgtgcgatctttccagccactggggccaggctatggaatctctcagtcgagccggctcagctctagcgtgagcgcaatgcgtgttctgaacacaggcagcgacgtggaggaggccgtcgctgatgcactaaaaaaaccagcccgccgaagatatgaaagttatggcatgcacagtgacgacgatgccaattctgacgcatcctcagcttgtagcgaacggtcctatagctctaggaacggttccattcccacctatatgcggcaaactgaagatgtggctgaagttctaaatcggtgcgcatcatctaactggagtgaaaggaaggagggtctgcttggcctgcaaaacctcctgaaaaatcagcgcactctgagccgcgtggagctaaagagactctgcgagatcttcacacggatgtttgccgatccacatggaaagcgtgtattcagcatgttcctcgaaacattggttgatttcatccaggtgcataaggacgacctgcaagactggctcttcgtgctgctgacccagcttctgaagaaaatgggcgcagacctgctgggatccgttcaggcgaaagtccaaaaagccctggacgtcacaagagaatcattccccaatgaccttcaattcaacattctcatgagatttactgtggaccagacgcagacaccaagtttaaaagtgaaagtggctattctcaaatacatcgagacactggctaagcagatggacccaggcgactttatcaactcctccgaaactaggttggctgtgtcaagggtgatcacttggacgacagaacctaagagcagtgacgtccgaaaagctgcccagagcgtgcttataagtttattcgagctcaatactcctgaatttactatgctactgggcgctctccctaagacatttcaagacggggccacaaagttactacataaccacctaaggaatacagggaacgggacacagtctagcatggggtcccctttgactagacctactcctcgctcgccagcgaactggtcatccccccttacaagtccaacaaatacatctcaaaataccctgagtccctccgcgtttgattatgataccgaaaatatgaacagtgaagacatctatagcagcttgagaggcgtgacagaagccattcagaatttcagcttcaggtcccaggaggacatgaatgagccccttaagcgtgactccaaaaaggatgatggtgatagcatgtgtgggggcccaggcatgagcgaccctagagcggggggcgatgcgactgactcaagtcagacagcacttgacaataaggcatccctcttgcactctatgcccactcactcatcacctcgatcaagagattataacccctataactacagcgatagtatctccccttttaataaatctgctctcaaggaggccatgtttgatgatgacgcagatcaatttcccgacgacctctcgctggaccactccgatctagtagcagaactgctcaaagagcttagtaaccacaatgaacgagttgaggaacgcaagatagcactgtatgagttgatgaagttgactcaggaggagtccttttcagtttgggacgagcactttaagacgatcctgctactgcttctcgagactctaggggacaaagagccaactatcagagccctggcgctcaaagtgctccgggagatcttgcggcaccaacccgcgcgctttaaaaactacgctgaactgaccgtgatgaaaacgctggaggcccacaaggatccgcataaagaggtagtgcgcagtgcagaagaagccgcgagtgttttagccacttccatatcaccggaacagtgtatcaaggtgttgtgcccaatcattcagacagccgattatcccatcaacctggctgccatcaagatgcagaccaaagtgattgagagagtatccaaagaaaccctcaacctactgcttcctgagatcatgccgggcctgatacaaggctatgacaattcagagtccagcgtgcgtaaggcctgcgtcttctgcctggtggccgtacatgcagtgattggtgatgagcttaaaccccatctctcccagctcacaggttccaaaatgaagctgttgaacctttacattaaaagagcacagacagggtccggcggcgccgatccaaccacagatgtcagtggccagagctag

SEQ ID NO: 184587 - DNA, 1296 bp, synthetic construct
  misc_feature 1..1296: note = Description of Artificial Sequence: Synthetic coding sequence
  source 1..1296: mol_type = other DNA
atgcggcggctgatctgcaagcggatctgcgactacaagagcttcgacgatgaagagtctgtcgacggtaaccggccttcctcagccgcttccgcctttaaagttcccgcccccaagacctccggtaaccctgcaaacagcgcaaggaaacccggcagtgcaggaggccccaaggtgggcggcgcttcaaaggaggggggcgctggggcggttgacgaagacgattttattaaggctttcacggatgtcccttcaatccagatatactcgtcacgagaattggaggaaactctgaataaaatacgggaaattttatctgatgacaaacacgattgggaccagcgagccaatgctcttaagaagatccggtcccttctagttgctggggccgcgcagtatgattgtttctttcagcatctgagactgctggacggcgctcttaagctctcagctaaggatctgagaagccaggtggtacgagaggcatgcattacagttgcacacctgtccacagtgctgggaaataagttcgaccacggggccgaggctatcgtgccaactctatttaatcttgtgccaaacagtgctaaagttatggctacaagcggctgtgctgcgattcggtttattatccgacatacccatgtgccaaggttaattcccctgatcacgtcaaattgcacatctaagtcggtgcccgttagacgtagatctttcgaattcctggatctactgttacaagaatggcaaacacattccctggaacgccatgccgccgtgcttgttgagacaataaaaaaagggattcacgacgccgacgccgaggctcgcgtagaagctcgtaagacatacatgggtttgcgaaaccacttccctggagaggccgaaacactttataacagcctggaacctagttatcagaagtccctgcagacgtaccttaagtcttccggctcagttgcctctctacctcaatccgacaggtcctcgtcgagcagtcaggagtcactaaacaggccattttcttccaagtggtcaaccgccaatccttccacagtcgcaggaagagtctcagctggaagcagcaaagcatcttcactccccggcagcttgcaacgctccagaagcgacatagacgttaacgccgcagccggagctaaggcccaccatgctgccggccagagcgtgcggagcggccgcctgggcgctggcgctctcaacgcgggaagctacgccagtctcgaatgtgaagccttctggaggtccggcagaaccgctaagttgtacagtgtctag

SEQ ID NO: 184588 - DNA, 4518 bp, synthetic construct
  misc_feature 1..4518: note = Description of Artificial Sequence: Synthetic coding sequence
  source 1..4518: mol_type = other DNA
atggagccccggagcatggagtacttctgcgcccaggtgcagcagaaggacgtaggagggcgactacaagtcgggcaggagctgctgctgtatctcggcgccccaggggccatttcggatttagaggaggatcttggcaggctcgggaaaaccgtggatgctctcaccggctgggtgggatcttccaattatcgagtgtccctaatgggcctggagatccttagcgcgttcgtggacaggctctcaacgagattcaagtcgtatgtcgctatggtgatcgtggctcttattgatcgcatgggcgacgcgaaagataaggtgcgcgatgaggctcaaacccttatcctcaagttaatggatcaggtggcaccgcccatgtatatatgggagcagctggcctccgggttcaaacacaagaatttccggtcacgggaaggagtgtgtctctgcttaatcgaaacccttaatatttttggggcacagcccctggtcattagtaagcttatccctcatttatgtattctcttcggcgattcaaattcacaagttagagatgccgcgatccttgcaatcgtagagatctatcgacatgtgggagaaaaagtacgcatggacctatacaagaggggaatccctcccgcacgacttgagatgatttttgcaaagttcgacgaagttcaatcctccggaggcatgattctgtcagtgtgtaaggacaaatcattcgatgatgaggaatctgtagatggcaatagaccctccagcgccgcttctgccttcaaagtccctgctcctaagacttcagggaatccagccaactcagccaggaagcctgggagcgccgggggacccaaagttggcggtgcttccaaggaaggtggtgccggcgccgttgatgaggatgatttcataaaagcctttacagacgtgcccagcatccaaatttactccagtagggaactagaggagactcttaataaaatcagggagatccttagcgatgataagcatgactgggatcaaagggcaaatgcgctcaaaaagatcagaagtctgcttgtggctggtgcagctcagtacgattgtttcttccagcacctgcggctgctggacggggctctgaagctgagcgctaaggacctccgtagccaggttgtgcgggaggcctgcataaccgtggcccacctcagcaccgtgttaggtaataaattcgaccatggtgcagaagccattgttcctacactatttaacctggtgccaaactcagccaaggtgatggcgacctccgggtgcgccgccatacggttcataatccgccacacccatgtcccacggctgattcccctgattacgtcaaattgcactagcaagagcgttccagtgaggaggcgcagtttcgaatttttggatctgctactgcaagagtggcagacccatagcctggagcgtcatgctgccgtgctagtggagacgatcaagaagggaattcatgatgcagacgcggaagcaagagtagaggctcgaaagacgtacatgggactgcgcaaccattttcctggcgaagcagagactctgtataacagtctggaaccttcttaccagaaatctctgcagacatacctgaagagcagtggttccgtggcatctctcccccagtcagacaggtcgagttcgtcttcacaggagagcttgaatcgaccgtttagttcaaagtggtccaccgctaacccttctactgtggctggcagggtaagtgctggaagcagtaaggccagttcattgcctggatccctgcagagaagccgctccgacatagacgtgaatgccgccgccggcgctaaagcacaccatgcagcaggccaatctgttagaagtggccggctcggtgcaggtgccctgaatgcaggtagctatgctagcttagaagatacttccgacaagttagacgggacagccagcgaagacggcagagtgagagctaagctgagcgctccacttgcaggcatgggcaatgcaaaggcagattcgagaggccggtcccggaccaaaatggtcagtcagtctcaacccggcagccgttcagggtcacctggtcgcgtactaactaccaccgccctgtctacagtatcctctggcgtgcagcgggtgctcgtgaacagtgcctccgcccagaagcgtagtaagatccctagaagccagggatgtagtcgcgaggccagtcctagcagactctctgtggcaagatcatccagaattcctcgtccttcagtttcacaggggtgctcccgtgaggcgagtcgggagtccagcagagataccagcccagttcgttcttttcagcccctcgggcctggctacggcatttctcagtcctcaagactgtcatcaagcgtgtccgcgatgcgcgtgctgaataccggttctgacgttgaggaggcagtggccgatgcattgaagaaacctgcgcgtcgtcgctacgagagctacggcatgcattcggatgatgatgcgaatagcgatgcatccagtgcatgtagtgagaggtcctattccagtagaaacgggtctatccccacctacatgcggcagaccgaagacgtcgcggaagtcctgaaccgttgcgctagctcaaattggagtgaaaggaaggagggcttacttgggctgcaaaatttgctgaagaatcagcgcactctaagccgtgtggagttgaagcggctgtgtgagatcttcactagaatgtttgctgacccacacgggaaagtcttttcaatgtttctggaaacattagtggactttatccaggttcacaaagacgacctgcaggactggttgttcgtgctcctgacgcaactgctgaagaaaatgggcgctgacctattgggtagcgtacaggctaaagtccagaaggccctcgatgtaaccagggaatcctttcccaatgacctccagttcaatatattaatgcgatttaccgtagatcagactcagactcccagtctcaaggtcaaagtcgccatattaaaatatattgaaactctggccaagcagatggaccctggagattttattaattctagtgaaacgcggttggccgtgtcacgagtgatcacatggacaactgagcctaagtcttcggacgtgaggaaggccgcccaatccgtgttgatctctcttttcgagcttaatactccagaatttacgatgctcctcggagccctgcctaagacatttcaggacggcgccacgaaacttctgcacaaccatttgagaaacaccgggaacggtacacagtcaagtatggggtcaccgcttacaagaccgacccccagaagcccagctaattggtcaagccccctcacatccccaaccaatacatcccagaatacgctgtccccttccgcatttgattacgacacggagaatatgaactccgaggacatttactcatccttgcggggggtgacggaagccatccaaaacttttctttccggtcacaggaagatatgaacgagccactgaagcgggattcaaagaaggatgatggcgattcaatgtgcggcgggccgggtatgtcagaccccagggctggcggggatgctaccgattcgagccagaccgcactagataataaggcatctctgctccatagtatgcctacccatagctccccccggagcagagactacaatccttacaactactctgattccataagcccgtttaataagtcagcgctgaaggaggcaatgtttgacgacgacgccgatcaatttcctgacgacctgtccttggaccattctgacctggttgctgaattgctgaaggaactaagtaaccacaacgagagagtcgaagaacgaaaaatcgctctgtatgaactgatgaagttaacgcaagaagagtctttctccgtgtgggacgagcactttaagacaatcctccttctgcttctagaaacactgggcgataaggaaccaacaattcgtgccctggcattgaaagttcttagagagatcctccggcaccaacccgccagatttaaaaattatgctgaactgacagtgatgaagacactggaggcccataaagatcctcataaggaggtagtgcgttcggcggaagaggccgcctcggttttggcgacatccatatctccggaacagtgcatcaaagtcctgtgccccataatacagaccgctgattaccctattaacctggccgcaatcaagatgcagactaaagttattgaacgggtgtctaaggagactcttaaccttcttctgcccgagattatgccgggtttaatccaggggtacgacaattctgagtcttcagtcaggaaagcatgtgtattttgcctcgtagccgtgcatgccgtgattggcgacgaattgaagcctcatctgagccagctcaccggatcaaagatgaagctgctcaacttgtatatcaagcgggcgcagacaggctccgggggggcggatccgacgactgacgttagtggtcagagctag

SEQ ID NO: 184589 - DNA, 4542 bp, synthetic construct
  misc_feature 1..4542: note = Description of Artificial Sequence: Synthetic coding sequence
  source 1..4542: mol_type = other DNA
atggagccccggagcatggagtacttctgcgcccaggtgcagcagaaggacgttggcggtcggctacaggtcggccaagagcttttactatatctgggcgcacccggcgccatttctgatcttgaggaagacctgggtagactagggaagaccgtggatgcccttaccggctgggtgggatccagcaactatcgcgtgtctctgatgggcctggaaattttgagtgcgttcgtggacaggctttctacccgctttaagtcctacgtggccatggtgatcgttgcgctcattgaccgtatgggcgacgccaaagacaaggttagggatgaggctcagacactaatcctgaagctgatggatcaggtggccccccccatgtatatctgggaacagctcgccagtggatttaaacacaagaacttccggtcgcgagagggcgtatgtttatgtctgatagaaaccctcaatatcttcggggctcaacctttggttatttctaagctgatccctcatctctgcatcctgtttggggacagcaattctcaggtgcgtgatgccgcgatcctggctattgtggaaatttaccggcacgtgggggagaaagttagaatggacctgtacaagcgcggaatcccacctgcccgactcgagatgattttcgccaagttcgacgaggtccagagttcaggtggaatgattctgtctgtttgtaaggataagtcttttgatgacgaggagtcagtggatggaaacagaccaagctctgcagcttccgcatttaaagtccccgcccccaagacgtccggcaatccagcaaacagcgccagaaagcccggctcagcaggcggcccgaaggtcggcggcgcctcaaaggagggcggggccggtgctgtcgacgaggacgactttattaaggctttcaccgatgtccccagcatccagatttacagctcccgagaactagaagagacattaaacaaaatccgagagatcttgtcagatgacaagcatgactgggatcagcgggccaacgccttaaagaaaattcgatcacttttggtcgcaggtgcagcccagtacgactgcttcttccagcatctgcgcctactggacggtgcattaaagctgtcagcgaaagacctgagaagtcaagtcgtgagagaagcgtgtatcaccgtcgcacatctgtccactgttctgggtaacaagtttgaccatggcgcagaagccatcgttccgaccctcttcaacctggtgcctaattccgctaaggtgatggccactagcggatgcgcagccatccggtttatcataagacatacgcacgtaccccgattgatccctctcatcaccagcaactgcactagtaaaagcgttcctgtacgacggaggagcttcgaatttctcgatctgctgctccaggaatggcaaacccattccctggaacgccacgccgccgtgctggtggaaaccatcaagaaggggatccacgacgctgacgcagaagccagagttgaagcgagaaagacctacatgggacttcgtaatcacttcccaggcgaagcggaaactctgtataactctttagagccttcctaccagaagtccctgcaaacgtatctgaagagttccggctccgtcgcctcccttccacaaagcgaccggtcttcgtctagttcccaggaaagcttaaaccgcccattttctagcaagtggtcaaccgccaatcccagcaccgtggccgggagggtgtctgctggctcttctaaggcaagtagccttccaggaagcctgcagcgttctcgaagtgacattgacgtcaatgctgctgctggggcgaaggcacatcacgctgcgggacagagtgtacgcagtggccgcttgggcgcaggcgccctaaacgctggatcctatgcctccctggaagacacatccgacaaattggatggaaccgcctctgaggatggccgggtgagagccaagctgtctgcgcccctggccggtatgggtaacgcgaaggcggacagccgcggacggtcacgtactaagatggtgtctcaatctcagccgggctctcggtctggcagtccaggtcgtgttctgacaactaccgcgctgagcacagtgtcctccggtgtgcagcgggtgctggttaacagcgcctccgctcagaaaaggtctaaaatcccaaggtcccaggggtgctcaagagaggcctctccaagcaggttgtctgtggcaaggtcatcacggattccccgtccaagtgtgtctcagggctgttcccgcgaggcgagcagggaatccagccgcgatacgtctccagtgagaagcttccaaccgttgggcccaggatacggaatctcacagagtagcaggctgtcctcctctgtgagtgcaatgcgagtgctcaacacgggctcagacgtagaagaggcagtggctgacgctctcctcctgggagatattcgaaccaaaaagaaaccagcgagacggcgctacgagtcttatggaatgcactctgacgacgacgcaaactccgacgcgagttccgcttgctcggagcgaagttactccagtcgaaatggctctatccccacatatatgcggcagacggaggacgttgctgaggtgttgaaccgctgcgcttcctccaattggtccgagcgcaaggagggcctgctggggctgcagaatctactcaagaaccaacgaactctgagccgagttgagctgaaaaggctttgtgagatcttcacccgcatgttcgcagatcctcacgggaaagtcttttcaatgttcttagagaccttagtggacttcattcaggtgcataaggacgatttacaggactggctcttcgtcctgctgacacaacttctgaaaaaaatgggagctgatctgctgggttctgtgcaggccaaagtgcagaaggctcttgatgtgacaagggaatccttccctaatgacctgcaatttaatatcctcatgaggttcactgtcgaccaaacccagacccctagtcttaaggtgaaagttgcaatccttaaatatattgagacccttgcaaagcagatggatccaggggattttattaactccagcgaaacccgtctcgcagtaagcagggttatcacgtggactactgaacctaaatccagtgatgttaggaaagcagcccagtcggtgctgatcagtctgttcgagctcaacacacctgaattcacaatgttgctcggtgccctgcctaagactttccaggacggggctactaaactgctccataatcatcttaggaatactgggaacggcacccaatctagcatgggttcgcccttgactaggcccacaccacgatctcccgcaaactggtcttctccacttacgtcccccactaacactagtcagaacactcttagtcccagtgctttcgactacgacacagagaatatgaattccgaggacatctacagttccctgagaggcgtaacagaggctatccaaaacttttcattccgtagccaggaggacatgaacgaaccactgaagcgcgatagcaagaaggatgatggcgactctatgtgcggcggtccaggcatgagcgacccaagggctggaggagacgctacagactccagccaaactgcgctcgataacaaagcatcactcctgcacagcatgcctacacatagcagcccccggtctcgggactacaacccatacaattactccgacagcataagtcccttcaataagtccgctctgaaggaggcaatgttcgatgacgacgcagaccagttccctgacgatttaagcctcgaccatagcgacttggtcgctgaactactgaaagaattgagcaatcacaacgagcgcgtagaggagaggaaaatcgctctctatgagctgatgaaactcacccaagaagaatcgttcagtgtctgggacgagcatttcaaaactatactgcttttactgctggagacccttggcgataaggagcccactattagggctctggccttgaaggtgcttagagagatcctccgacatcaacctgcccgtttcaagaattatgccgaacttaccgtcatgaaaacactggaggctcacaaggacccacacaaggaagtggtgaggtcagcagaagaggcagctagtgtgttggccacctccatctctccggaacagtgcatcaaggtgctatgtcccatcattcagacagccgattacccgattaacttagctgccataaaaatgcagactaaagtgatagagcgcgtttccaaggagaccttgaatctgctgttgcccgaaataatgcccggactgatccagggatatgataacagcgagagctctgtgagaaaagcctgcgtattttgtctcgtggccgttcatgctgtgataggtgatgaacttaaacctcatctctcccaacttaccggctcaaagatgaagctgctcaatctgtatatcaagagggctcaaaccggcagtggcggcgctgaccccactacagacgtgtcaggccagtcctag

SEQ ID NO: 184590 - DNA, 4545 bp, synthetic construct
  misc_feature 1..4545: note = Description of Artificial Sequence: Synthetic coding sequence
  source 1..4545: mol_type = other DNA
atggagccccggagcatggagtacttctgcgcccaggtgcagcagaaagatgtgggcggtagactccaggtgggccaggaactcctgctctatttaggggccccaggcgcaatcagcgatctggaagaagatctcggcagacttggcaaaacggtggatgctctgaccgggtgggtaggatcttctaattatcgcgtgagtcttatgggattggaaattttgtccgcttttgtagaccgactttcaacacgcttcaagtcctacgtggccatggtgattgtagcattgattgaccgaatgggcgacgcaaaggacaaagttcgtgatgaggcccaaacccttatattgaagctcatggatcaagttgcccctcctatgtatatatgggagcagttagcctccggttttaaacacaaaaattttcgcagcagagaaggtgtctgtctctgtctcattgaaactttgaacatatttggtgcacagcccctagtcatctctaagcttattccccacctatgcatcctgttcggggatagtaattcacaggtacgggatgcagccattctggcgattgtggagatttatcgacatgtcggtgaaaaagtcaggatggacctctataaacgcgggataccccctgctagactggagatgatattcgccaaattcgacgaggtccagtcgagtggcggcatgatcctgagcgtgtgcaaagataagtcttttgacgacgaggaatctgtggatgggaaccgaccctcaagcgccgcttctgcttttaaggtgccagcaccgaaaacttccgggaacccagcgaactcagcacgaaagcccgggagtgcgggggggcctaaggtgggcgctggcgcctctaaggaggggggcgccggggcggtggacgaggacgatttcatcaaggcatttacagacgttccaagcatccagatctactcatcacgtgaactcgaagagacattgaataagatccgggagatccttagcgatgacaaacacgactgggaccaacgggccaatgccctgaaaaagattcgctcgttactggtggccggagctgcacaatacgactgtttttttcagcacctgcggctgcttgatggcgccctgaagttatctgctaaggatctgagatcacaggttgtgagagaagcatgcattacagtggcacacctgtccactgttttaggaaataagttcgaccacggggccgaggctatcgtccctactctgtttaatctagtaccgaatagtgctaaagtgatggctaccagcggatgcgcagccatcagatttatcattcgccacacgcatgtgccgagactgatccctctgatcacctccaattgcacctctaagtcggtaccagttcggaggagatccttcgagtttttggacctccttcttcaggagtggcagacgcactctctggaacggcacgctgctgtcctcgtggagacaattaaaaaaggaatacacgacgcagacgccgaggcacgggtggaggcccggaagacgtatatgggacttagaaaccactttccaggagaggcagagactctgtacaattctcttgaaccgtcctatcagaaaagcctgcagacttatctcaagtcttccggctccgtcgccagcttgccacagagcgatcgctcatcatcttcttcacaagaatccttgaaccggccattcagctccaagtggtccactgccaatccctccaccgttgccggccgagttagcgctggaagctctaaggcatcctccctgcccggcagcctgcagcgctctcggtccgacatcgacgttaacgctgctgctggagctaaggcacaccacgccgccggccaatccgtgcgttctggccgactgggtgcaggagcactcaatgccggcagttacgcatcactggaggacactagcgacaagctcgacggtaccgcctcagaggatggccgggttcgggctaaactgtcagcccccctcgctggaatgggcaatgccaaggctgactcccgcggcagatccaggaccaaaatggtgtcgcagagccagcccggttctcgttccgggtctccgggccgcgtgctgaccactacagcccttagtaccgtttcatccggagtgcagcgggtattggtgaatagcgcatcggcccagaagcgctcaaaaattcctcgatctcagggctgctcccgcgaggccagtcctagcaggctgagtgtagcccggtcttctagaatacctaggcctagcgttagtcagggatgttcccgggaagcctcccgggaatcttccagagacacttctcccgttcgctcctttcaacctttaggccccggatatggcatcagtcagtcttctaggttgtcctccagtgtgtccgcaatgagggttctcaatacagggagtgacgtcgaagaggccgtggctgacgccctgctcttgggggatatccgcacaaaaaagaagccagccagacgccggtatgagtcctacgggatgcattcagatgacgacgccaactctgacgcttcaagtgcatgtagtgaacgatcttactcgagtaggaatggaagcatccccacttacatgagacagaccgaagacgtggctgaggtactgaatcgctgcgccagctctaactggagcgagcgaaaggaaggacttctggggctgcagaatctgcttaaaaaccagaggaccttaagccgggttgaactcaagcgactgtgcgaaattttcactagaatgtttgctgacccccatggaaaagtcttttcgatgtttcttgaaacactggtggattttatccaggtacacaaggacgacctccaggactggttatttgtgcttctgacccaactactcaaaaaaatgggcgccgatctgttgggatccgtacaggcaaaggtgcagaaggcactagacgtaacaagagagtcattccccaacgacttacagttcaatatattaatgaggttcaccgtggatcagacgcagactccgtccctcaaagtcaaggtggccattctgaagtacatcgagacacttgcaaagcagatggaccccggagacttcatcaattcatcggaaacccggcttgctgttagccgtgtgataacctggaccactgagcctaagagctccgacgtgaggaaggcggcccagtccgttctaattagtctattcgagctgaacactccagaattcacaatgttgcttggtgccctgcctaagacctttcaggatggagcaactaaactcctccataaccacctcagaaacaccggtaacggtacacagagttccatggggagccctcttacccgtcccacgccaagatcccctgcgaactggtcatcccccctcacatcgcccactaacaccagtcagaacacactctctcccagtgcatttgactatgacactgagaacatgaattccgaagatatctacagctctttacggggcgtcacagaggcaatacagaacttttcctttagatcacaggaggacatgaatgaacctctcaagagggactctaagaaagatgatggcgattctatgtgcggcgggccgggaatgtccgatcctagagcgggaggcgacgccacagatagcagtcagacagcactggacaacaaggcaagtctccttcattctatgcccactcatagcagtccacggagcagagactacaacccatacaactactctgattcgattagtcctttcaataaaagcgctctcaaagaggccatgttcgatgacgatgcagatcaattccccgatgatctatccctggaccacagtgaccttgtggccgagttgctgaaagaactctcaaaccataatgagcgtgtggaggagcggaagattgcattgtatgaactgatgaaactgacacaggaggaaagcttcagtgtgtgggacgagcacttcaaaactattctgctgctgctgttggagaccctcggtgacaaggagcctaccattcgtgccctagccttgaaggtgctacgcgaaattctgcggcaccagccagcccgcttcaagaattatgcagagctgacggtgatgaagacgctggaggcacacaaggacccccacaaggaggtcgtccgcagtgcggaggaagcagcaagtgtcctcgcaacgagtatcagtcccgaacagtgcataaaggtgctatgccccattatccagaccgccgactaccctataaacctagcagctattaagatgcaaacaaaggtgatagagagggtctctaaggaaacactgaacctgctgctccccgaaatcatgcctggcctgatccagggttatgacaatagcgagtctagtgttaggaaggcttgcgttttttgcctcgtcgccgtccacgccgtgataggggacgagctcaaaccccacctgtcgcaacttacgggaagcaagatgaagctcctaaacctgtatattaagcgtgcgcagactggctctggaggggcagatccaactacagatgtgtcagggcagtcttag

SEQ ID NO: 184591 - DNA, 3882 bp, synthetic construct
  misc_feature 1..3882: note = Description of Artificial Sequence: Synthetic coding sequence
  source 1..3882: mol_type = other DNA
atggccatgggcgacgacaagagcttcgacgacgaggagagcgtggacggaaatcggcctagttccgctgcctctgcttttaaagtccctgctccgaagacgtctggtaaccccgccaacagtgccaggaaacccgggagcgcagggggccccaaagtgggaggcgcttcaaaggaaggcggtgcaggcgccgtggacgaagacgatttcatcaaggcatttacagacgtcccctccatccagatttacagctctcgcgagctggaggaaaccttaaacaagattcgcgagatactgagtgatgacaagcatgactgggaccaaagggctaacgccttgaagaaaattagatctcttttggtagccggggccgcacaatacgattgtttttttcaacacttgagactgctcgacggggcgctaaaattaagtgctaaggaccttcgatcccaggtcgtgagagaagcctgtattaccgtagcccatctgagtacggtgctgggcaacaaatttgatcacggagccgaggccattgtgccaaccctgtttaacctagtgccaaactcagcaaaggttatggctacatcaggatgcgccgcaatccgctttattattcggcacacacacgtgcccaggctcattcctcttatcactagtaactgcaccagcaaaagcgtccccgtacggaggcgatcattcgaatttctcgacctgttgctgcaggaatggcagactcattccctggagaggcacgctgccgtgctcgttgagacaattaaaaagggtatccatgatgcagatgcagaggcccgtgtcgaagcgaggaaaacatatatgggtctgcggaatcacttccccggggaggccgagaccctgtataactccctggagccctcgtaccagaagtcactccagacgtacctgaagagttccgggtccgtggcctctctccctcaatccgaccgcagttcctccagcagtcaggagagcctgaatcggcccttcagcagcaaatggtctaccgccaatcctagcactgtcgcgggcagagtgtccgctgggagtagcaaagcctcaagtctgcccggatccctgcagaggtcccggagcgacattgatgtgaatgctgccgctggagctaaagcgcatcatgccgctgggcaatctgtgcggtcgggtagacttggcgccggagccttaaatgctggcagttacgcgtctctcgaggacacatccgataaactggatggcaccgctagcgaggacggcagggtccgagcgaaacttagcgcacccttggccggtatgggcaacgctaaagctgacagtagagggaggtcccgcaccaagatggtgagtcaatcccaaccaggcagtcgatcaggttcacctggaagagtcctcactactaccgctctatctacagtctcatccggcgtgcagagggtcctagttaattctgcaagcgcgcagaagcgtagtaaaatcccgaggtcacagggttgctccagagaggcatccccttcacggctttccgtagctcggagctcaaggatcccccgcccttctgtatctcaggggtgctcccgggaagctagcagagaatccagtcgagacacctctcctgtgcgctcctttcagcctcttgcgtcgcgccatcacagccgaagtacaggtgctctctacgcaccagaagtatatggagcaagtggcccagggtatggaatctcccaatcatctaggctgtctagctccgtgtcagccatgcgggtgctgaacacaggatctgatgtggaagaggccgtcgccgatgccctaaagaaaccggctcgtaggcggtacgaaagttacggaatgcatagtgacgacgatgcaaattccgacgcctcttctgcctgctcggagaggtcttatagttccaggaacggctccatacccacttacatgagacagactgaagacgtggcagaggtgttgaacaggtgcgccagttccaactggtctgaacgaaaagaagggctcttggggttacagaacctactcaaaaatcagcgaaccctgtcccgggttgagttaaaaagactgtgtgaaatctttactaggatgtttgctgacccccatggaaaggtcttttcaatgtttctggagacactcgtggacttcatacaggttcacaaggatgacctgcaggattggctgtttgtgctactcacgcaactgctgaagaaaatgggcgcagacctgttgggtagcgtacaagctaaagtccagaaagctctggacgttacccgggagtcttttccaaatgatctccagttcaacattctgatgaggttcacggtcgatcaaacccaaacccctagtctgaaagtgaaagtggccatcctgaagtatatcgagacactcgccaaacagatggacccaggagacttcatcaatagtagcgaaacgaggttggcagtgtccagggtgataacatggaccacagagcccaagagcagcgatgtgcgaaaggcggctcagagcgtcttaatatctttatttgagctgaacacgcccgagtttacgatgttacttggtgccctcccaaagacttttcaagacggtgccactaagctactgcacaaccatctgcgaaacacaggcaacggcacacaaagcagtatgggaagccccttaacacggcccactccacgttcacctgccaactggagttcgcccttaacctctcccaccaacacttcacagaacaccctttcccctagcgccttcgattatgacaccgagaatatgaatagtgaagatatctacagctccctccggggtgtgacagaagcaatccagaacttttccttcaggtcccaggaggatatgaacgagccactgaagcgagactcaaagaaggatgatggtgactccatgtgcgggggcccgggcatgtcagaccccagggcgggcggcgatgcaacggacagcagccagactgccctggataataaagcctctctgcttcacagtatgcctacccactcatcgccaagaagcagggattataatccctataactattcagattcgatcagtccattcaacaaaagtgctttgaaggaggctatgtttgacgacgacgcagaccagttcccggacgatttgtctttggatcatagcgatctggtggcagagctgctgaaggaactttcaaatcacaacgaacgtgtggaggaacgcaagatcgccctctacgaactgatgaagctgactcaggaagagtcattttctgtgtgggatgagcactttaaaacaatactgttactgctgctcgaaaccctcggtgacaaagagccaaccatcagagcgcttgccctcaaggtgttacgcgaaatcttacgccatcaacccgcccggtttaaaaactacgctgaactgacagtgatgaaaacattggaggctcataaggacccccacaaggaagtcgttcgttctgccgaagaggccgcttctgtactggccaccagtattagccctgagcagtgcattaaagtactgtgtcccattatccaaaccgcggattatcccataaacctggccgcaattaaaatgcagactaaggttatcgagcgcgttagcaaagagacactgaaccttctcctgcccgagattatgcccgggcttatccagggatacgataattcagagtcctccgtccggaaagcttgcgtcttctgtctagttgccgttcacgcagttattggggatgagctgaagccccatttgagccagctgacaggctcaaaaatgaaactgcttaacctgtacatcaaaagagcccaaacaggcagcgggggagcggaccctaccacagacgtctctggacagagttag

SEQ ID NO: 184592 - DNA, 3192 bp, synthetic construct
  misc_feature 1..3192: note = Description of Artificial Sequence: Synthetic coding sequence
  source 1..3192: mol_type = other DNA
atgcggcggctgatctgcaagcggatctgcgactacaagagcttcgacgacgaagaatcggttgatggcaaccggccgtctagtgcagccagcgcttttaaggtgcctgcaccaaagaccagcggtaacccagcaaactcagcccgaaagcctggttcagctggggggcctaaagtgggtgagcttctgagtattatgatctacagcagcagggagttggaggagaccctgaacaagattagagaaattctctcggacgacaaacacgattgggaccagagggccaatgctttaaaaaaaattaggtcactcctcgtcgccggggccgcacaatatgactgtttcttccaacacttgcgtttgctggatggggctctgaagcttagcgctaaagacctgcgatcccaagtggtccgggaggcctgtattacagtcgcccacctatctacagtcctgggaaacaagttcgaccatggtgccgaggctatcgttcccaccctgttcaatttagtccctaattcagccaaagtaatggctacctctggctgcgctgccatccgcttcattattcggcatacccacgtgccccgcctcatcccacttatcacgtctaactgtacctctaagtccgttcccgtgcgtaggcgtagtttcgagttcttggatctactgcttcaggagtggcagacacattcactcgagcggcatgcagcggtcctggttgaaacgatcaaaaagggtattcacgacgctgatgcagaggccagagtcgaagcccgcaaaacatatatggggcttcggaaccacttcccaggtgaagccgagacgctttacaactccctagaaccttcataccagaaaagtttacaaacttaccttaagtcctcaggctcagtggccagtctgccccaatctgacaggagctcctcgtccagccaggaatccctgaaccgacctttctcgtcaaaatggtctacagcaaacccctccaccgtggctggtcgcgtcagcgctgggtcaagcaaagcctcgtcgctgcctgggtcactgcagcgatccagatctgacatcgacgttaatgccgcagcaggtgctaaggcacaccacgctgcgggccagagcgtccgctctggacggctcggcgccggggcacttaacgctggctcctacgccagcctggaggatacctcagacaagcttgatgacttgttttcggacaacggaagagtgcgggcaaagttatccgctcccttggccgggatgggtaacgcgaaagccgatagcaggggccgcagcagaacaaagatggtgtcacagagccagagaagtagttctcccgacaagaatgagggttcccagagcgcgaacacgataggagccgggtcaaggagcgggtccccaggaagagtcctgactacaaccgccctctccacagtgtccagcggcgtccagcgcgtcctggtgaatagtgcttccgcccagaaaaggagtaaaattcccagatcccagggatgttcacgtgaggcttctccttcaagactctccgttgcccggtcaagccggattccacggccatctgtgtctcagggatgctccagagaggcctccagagagagttccagggatacaagtccagtgcgctctttccagcccttgggtcccggctacggcatatctcagagcagcaggctttcatcgagtgtctccgcaatgagggtgctcaacaccgggtcagacgtggaggaggcagtggccgatgccctggtgctctttgacttcaaaactaagaagaaaccagcaaggaggcggtacgaaagttacggaatgcactcagacgatgacgcaaactctgatgcatcaagcgcttgttcggaaaggtcatattcttcccgcaacggttcgatccctacctacatgcggcagacagaggatgtggctgaagtattgaatagatgcgctagcagtaactggtccgaaagaaaagagggacttctggggctgcaaaatctgctgaagaatcagcggaccctgtctcgcgtggagttgaagcgcctgtgtgagatcttcacacggatgttcgctgaccctcacggtaaggtgttttctatgtttcttgaaacattggtggacttcattcaagttcacaaggacgacttgcaggactggctgttcgtcctgctaacccagctgctcaagaagatgggcgcagacttgcttggcagtgtgcaggcgaaggtgcagaaagctttagacgtaactcgtgagagtttccccaacgatcttcagttcaacatactcatgaggttcaccgtggatcagactcagacccctagcttgaaggtaaaggttgcgatattgaagtatatcgaaaccctcgctaaacagatggatcccggcgattttattaatagtagcgaaacaagacttgcagttagtcgggtaatcacctggaccactgagcccaaaagttctgatgtgagaaaagctgctcaaagcgtgttgatctcactatttgagctgaatacccccgaattcacaatgttactgggagcactacccaaaaccttccaggacggagcaactaaactgcttcataatcatctgagaaacaccggaaatggaacacaatcgtcaatgggaagccccctcacgagaccaacacctcgatctccggctaactggtcctctccattgacttcgccgaccaacaccagtcagaacaccctgtctccctcagcatttgactacgacacggaaaatatgaacagcgaagacatttacagcagcttgcgtggggtgacagaagctatacagaacttcagctttcggtcccaggaggacatgaatgagccgctgaaacgcgacagtaaaaaagatgatggtgatagcatgtgcggggggcctggcatgtcagatccccgggcgggaggcgacgccacagatagtagccagacggctctcgacaacaaggccagcctcctgcatagcatgccaactcacagctcaccacggagccgtgactataacccttataattactctgactcaatcagcccattcaacaaaagtgcgttgaaggaagctatgttcgacgatgatgctgaccagtttcccgacgacttgtctctagatcactcagacttggtcgctgagttgttgaaggagttgagtaatcacaacgaacgggtttag

SEQ ID NO: 184593 - DNA, 1680 bp, synthetic construct
  misc_feature 1..1680: note = Description of Artificial Sequence: Synthetic coding sequence
  source 1..1680: mol_type = other DNA
atgcccccccccagccccgacagcgagaacggcttctaccccggcctaccatccagtatgaaccccgccttttttccttcttttagccctgtcagccctcacgggtgtactgggctctccgtaccaacaagcggaggcggaggtggcggtttcggcgggccgttttcggcaactgccgtgcccccgcctcccccccctgcaatgaatatccctcagcagcaaccgcccccacccgccgctccccaacaaccccaaagcaggcgtagtcctgtcagcccgcagctacagcaacagcaccaggcagccgcagctgcgtttttgcagcagagaaattcatacaatcaccatcagcccctgctcaagcagagtccctggtccaatcaccagagctccggctggggcacaggcagtatgtcctggggcgcgatgcatggacgcgatcatcggcggaccggtaatatgggcattcctgggacaatgaaccagataagtcccctcaagaaacctttttccggtaacgtcatcgcaccacctaagtttacaagaagtaccccctcactgaccccgaaaagctggatcgaggacaatgtttttcgcacggacaataatagtaacacccttctccccctgcaggaccggtccagaatgtacgattcacttaacatgcactctctggagaattctctcatagatatcatgcgagccgagcatgatcccctcaaaggacggctatcatatcctcaccccgggacagacaacctgcttatgttaaacggccgatctagcctgtttcctattgatgatgggctgcttgacgatggccactcagaccaagttggcgtgctgaatagcccaacctgttattcggctcaccaaaatggagaaagaatcgagcgcttctcccgaaaggtgttcgtgggtggcttacccccggacattgacgaggacgagattactgcctcattccgaaggttcggaccgttagtggttgactggccacacaaagccgagagcaaatcctattttccacctaaaggatatgctttcttgctgtttcaggaggagtcatcggtccaggccctgatagatgcttgcatcgaggaagatggtaaactctatctttgcgttagtagccctactattaaagacaagccagtgcaaatcaggccttggaacctatccgacagtgactttgttatggacggcagtcagcccctggaccctcggaagacgattttcgtgggaggcgtacctcgtccactgcgcgccgtggagctagccatgatcatggaccggttgtacggcggcgtttgctacgcaggcatcgataccgacccggaactaaagtaccctaaaggggccggcagggtggccttctccaatcagcagtcctatatagccgcgatctccgctaggttcgtgcagttgcagcacggcgacatagacaagcgggtggaggttaagccttacgtgctcgacgatcagatgtgtgatgaatgccagggagcgagatgtggtggaaagtttgctcccttcttttgcgctaacgtgacctgtctccagtactactgtgagttctgctgggccaacattcatagtcgagccgggcgagagttccataagcccctggtgaaagaaggcgccgatcgtccgcggcaaatccacttcaggtggaactag

SEQ ID NO: 184594 - DNA, 1731 bp, synthetic construct
  misc_feature 1..1731: note = Description of Artificial Sequence: Synthetic coding sequence
  source 1..1731: mol_type = other DNA
atgcccccccccagccccgacagcgagaacggcttctaccccggcttaccaagctccatgaatccagcattctttcctagctttagtccagtgagccctcatggttgcaccggcctgagcgtgcccccaccacccgcgatgaatattcctcagcaacaaccccctccacctgccgctccgcagcagccccagtcaaggcggtcccctgtttctcctcagctgcaacagcagcaccaagctgcagctgccgccttcctccagcagcgcaacagctacaatcatcaccagccgctgctaaagcaaagcccctggtcgaaccaccaaagctccggatggggcactgggtctatgtcgtggggggctatgcacggtagagatcaccggagaacaggcaacatgggaatcccaggaacgatgaatcagatctctcccctcaagaaaccattcagtgggaatgttattgctccacccaaattcactagatcaactcctagtctgacaccaaaatcctggattgaagataacgtcttccgcactgacaacaactctaacactctcctgcccttgcaagtgagaagcagcctgcaattgccagcttggggtagcgactccctgcaggactcttggtgtaccgcggcagggacatcgagaatagatcaggaccgatctagaatgtacgatagtctgaatatgcacagtcttgaaaattcattaatcgatattatgcgggccgagcacgatcctctcaagggtcggctgtcttacccccatccaggcactgacaacctgctaatgcttaacgctcgatcctatggacggaggagggggaggtcgtctcttttccccattgacgatgggttgctcgacgacgggcactcggatcaggtcggagtgcttaactctcccacttgttacagcgctcaccagaacggcgaaagaatcgagcggttttctcgcaaagtgttcgtcgggggcctgcctcccgatatagatgaggatgagatcaccgcctcattccgacggttcggtcctctggtcgtggactggccccataaggccgaaagcaaaagctattttccgccgaaggggtacgcctttctgttgtttcaggaggagagctctgtccaagccctcattgatgcatgtattgaggaggacggtaaactgtatctgtgcgtgagttccccaaccatcaaagacaagcccgtgcagattcgaccgtggaatctgtccgactctgacttcgtaatggatggcagccagcctctcgacccgcgtaagacgatcttcgtagggggggtgccacgtcccttgcgggccgtggagctggccatgatcatggacaggctgtacggtggtgtgtgctatgccggaatagacactgatcccgaactgaagtatccaaagggagcgggtcgagtggccttttcaaaccagcagagctatatagccgcaatctccgcccgcttcgtccaactgcagcatggggatattgacaaacgcgtggaagtaaaaccttacgtccttgacgaccagatgtgtgacgaatgccagggagcccgctgtggaggaaagttcgccccctttttctgtgctaacgtgacctgtctacagtactactgcgagttctgctgggccaacatccatagtagagccggcagggaatttcacaaaccactggtgaaggagggcgctgatcgcccccggcagattcactttcgttggaactag

SEQ ID NO: 184595 - DNA, 1704 bp, synthetic construct
  misc_feature 1..1704: note = Description of Artificial Sequence: Synthetic coding sequence
  source 1..1704: mol_type = other DNA
atgcccccccccagccccgacagcgagaacggcttctaccccggcttgccgtcttccatgaacccggcattctttcccagtttctcacccgttagtccccacggctgcactggactgtctgttccgacaagtggaggaggaggcggagggttcggggggccctttagcgcaaccgctgtgcctcctccgccgccgcccgctatgaacatcccccagcagcagcccccgccccccgccgcaccacaacagcctcagagccgaagaagccctgtgagtccgcagctgcaacagcagcaccaggctgcggcggctgccttccttcagcaacggaactcttataaccatcatcagccgttgttaaagcagtcgccctggtcaaaccaccagagtagcggctggggcacaggcagtatgtcgtggggggctatgcacggccgggaccatcggcgcactgggaatatgggcatccctgggacaatgaatcagatcagtcctcttaagaagcccttcagtggaaatgttattgccccaccaaaatttacccgctccactcccagcctgacacctaagagctggatagaagacaatgtttttaggacagacaataactctaataccctgttacctctccaagacagaagtcggatgtacgatagcctcaatatgcactcccttgagaactctcttatcgatatcatgagggcagagcacgacccccttaaaggtcgactgtcctatccacaccccgggactgacaatctgctaatgttgaacgcacgcagctacggacgacgccgcgggagatccagtctttttccaatagacgacgggctgctggatgatgggcatagcgatcaggtgggtgtcctgaattcacccacttgctattctgcgcaccagaacggtgaaaggatagaacggttctcaagaaaggtcttcgtcggtggattacctcccgacatcgacgaagacgagatcaccgccagtttcagacggttcgggccattagtcgtggactggccccataaagccgaaagtaagagctacttcccacccaaaggctacgcttttctgctgttccaggaagagtccagtgtacaggccctgattgatgcatgtatagaagaagacggaaaattgtatctctgtgtgtcaagcccaaccattaaagacaaacccgtgcagataagaccttggaacctgtcagactccgattttgttatggatggctcccagccgctggacccacgtaagacaatttttgtgggcggggttccgcgccctcttcgcgctgttgagctcgctatgatcatggatagactgtatggaggggtttgttatgccggcatagatactgaccctgaactgaagtacccgaagggcgccggtcgagttgctttctctaaccagcagagctacatcgcggcgatctccgctaggtttgtacagctgcagcacggcgatatcgacaagcgcgtagaagtaaaaccatatgtcctcgacgatcagatgtgcgatgaatgtcagggcgcacgctgtggaggaaagttcgcaccctttttctgtgctaatgtgacatgcctccagtactactgtgagttctgttgggcaaacatacactccagggccggccgtgaattccacaaaccattggtcaaagagggtgccgatagacctcgccagatacactttcggtggaactag

SEQ ID NO: 184596 - DNA, 1689 bp, synthetic construct
  misc_feature 1..1689: note = Description of Artificial Sequence: Synthetic coding sequence
  source 1..1689: mol_type = other DNA
atgcccccccccagccccgacagcgagaacggcttctaccccggcctgccatccagtatgaaccctgccttttttcccagtttcagtcccgtgtctccacatggctgcacagggctgtccgtgcctacctctggaggcggaggcggtggattcggcgggccgttcagcgccaccgcggttcctccacctccccctcccgctatgaatattccacaacagcagccacccccacccgccgccccccagcagccccagtccaggaggtccccggtcagtccccaattgcagcagcagcaccaagctgctgcagccgcctttctccagcagcggaactcatacaaccaccatcagcccctcctcaagcagtccccttggagtaatcaccagtcttcaggatgggggaccgggtcgatgtcgtggggagccatgcacggacgagaccacaggaggactggcaatatgggtattcctggcactatgaatcagatctcgcccctgaaaaagccattcagtggtaacgtcatagccccacccaagtttacacgctccacaccttccttaactcctaaaagctggattgaggataacgtgttccgcaccgataacaactcgaatacccttctacctctccaggtccggatggaccggagccgaatgtatgatagcctcaatatgcactcgttggaaaactcattgatcgacattatgcgcgctgagcacgatccattaaagggacggttgtcctaccctcacccaggcaccgacaacctgctgatgctaaatggacggagcagtcttttccctatcgacgacggcctcttggacgacgggcatagtgaccaggtgggagtccttaactcaccgacatgctattccgcccaccaaaacggcgagaggattgagcgtttttcccggaaagtcttcgtgggggggcttccacccgatattgatgaggatgagattaccgcctctttccgccgcttcggccccttagtcgttgactggccacataaggcggaatcaaagtcgtactttccacccaagggatatgcattcttgttgttccaggaagagtcatctgtgcaggcactcatcgatgcttgcatcgaggaagacggaaagctctatctctgtgtgtcaagcccgaccattaaggataagcctgtgcagatccgaccgtggaacctgtcggattctgattttgtaatggatgggtcccaaccactcgaccccagaaagaccatcttcgtcgggggggtccctcgcccgttacgtgctgtggagttggccatgatcatggacaggctgtacggaggcgtttgttacgccggcatagatacagaccctgagttgaaatatccaaaaggagcgggtcgggtggccttttcaaatcagcagagctacattgccgcaattagtgccagattcgtccagctgcaacacggagatatcgacaagcgcgtggaagtcaagccctacgtgcttgatgatcaaatgtgcgacgaatgccagggagcacgctgcggaggtaagttcgcccctttcttctgtgccaatgtgacttgcctccagtactactgcgagttctgctgggctaacattcattccagagctggccgagaatttcataagcccttggtaaaggaaggtgcggataggccgagacagattcatttccgttggaactag

SEQ ID NO: 184597 - DNA, 3024 bp, synthetic construct
  misc_feature 1..3024: note = Description of Artificial Sequence: Synthetic coding sequence
  source 1..3024: mol_type = other DNA
atgcgggacttcggcttcggcgtgctgcagaccgcccccctgcggtcaagctccccaggtccgctgttctgcggagaggcctacgggccatatgccgtcggctcggtgaatccactaccgagtgctaccccgttcggacccctctcccccccccccctgcccgttaccggatttttagaggcagccagcccttttagcgtgcctctggggggtggggctggctcccctgcggcagccgctagttcctcatcccccttcctggcccatcagcagacgatgcaggatgagttactgctcgggctgactcagcaacctgcccgaccgctctccggtgccgccgcaacagagaagctgccagaccaccatcctggcggggggaccatcgcgggagtgactcacctgctgccttctcaggacttcaaaccttcattgcaccacccaagctcgtcatccgcttcatcatgctgctgctgcagaacctcgagccctcaggatttttcaaagagacagcagcagcagttgtcttctcagaagaggaaagagttcagcccccctcacctgccccatccacccgactctaagccgccacctccccctcctcctctgcactgtcccggaaggttcagcccaccaccaccacccgccggtccactgcttcagccagcccaattggcccagcggcagcaacagcaaccgcctcagcagttttctttactccatcagcagcatttgtctccacaggactttgctccacgtcagcggccagcagaccttccccctctgccacaactcccaccatccccgcctgccgcacccagaaggcggcacggcggtgccggttctccaaggaagaccccggctgctggggagggaagcgccgccgaatccccaaacgctggcttggcttcctcaactcctgtgaacccagcacccgggtctatggagtccccgaatcatccactgctgaattccccaagcaatctgttaccagggggcgcactcggggcgggtgccttcagtagtctgcagtctccagacctgccacatcctggggggggtgggggaggcggagggggagggcctccaggcggtggagggggcggcgggtcggcatcaccacctcctctccccggttttggtactccctggtccgtgcaaaccgcctccccccctccacagcctcaacagcccccgcctacgcagcctcagcaacagcccccgccccctcagcagcctccacagcctcagccccagcctccaggtagcagcgcgacgacacctggcggcgggagcggtggatcgcttagtgccatgccacccccgtcacccgatagcgagaatggtttttatcctggcctcccctcctcaatgaatccggcatttttcccatcattctctcccgtgagcccccatgggtgcacagggctttccgtgcccacgtcaggaggaggagggggcggtttcggcggaccattctcagccacagccgtgcccccacctcctccgccggcaatgaatatcccacagcagcagccccctccccctgctgcacctcagcaaccacagagtcgccgcagccctgtttcgcctcagctgcaacagcaacatcaagctgctgcagccgccttcctccagcagcgcaattcgtataatcaccatcaaccccttctgaagcagagtccgtggtcaaatcaccagtcttcaggttggggaactggatccatgagttggggtgccatgcacggcagagatcatcgtaggaccggaaatatgggcatacctggaactatgaaccagattagccctctcaagaagcccttctcagggaacgtgatagcaccccccaagtttactcgcagcacaccctccctgaccccaaagagctggatcgaagataacgtgttccgcaccgacaataacagcaacaccctcttaccactgcaggttaggatggaccgctctcgaatgtacgattcacttaatatgcacagtctggagaactctctcattgatattatgagagccgagcacgaccccctgaaaggccggcttagttatcctcaccctggaaccgacaatctactgatgttgaacgctaggtcttacgggcgacgccggggccgatcttctttgtttcccatagacgatggtctgcttgacgacggacactcagaccaggtaggcgttctgaattcacccacctgctactccgcccatcaaaacggggagaggatcgaaagatttagccgcaaggttttcgtcggaggcctccccccagatattgatgaggatgaaataacagcaagttttcgcagattcggtcctctggtggtcgattggccacataaagcggagtcgaagagttatttccctccaaagggctatgccttccttcttttccaagaggaaagctcagtccaggcccttatcgacgcatgtattgaagaagatggaaagctttacttgtgcgtgtccagtcctactatcaaggataaaccagtccagatcagaccctggaatctatcagactctgacttcgtgatggacggctcccagcccttggacccgcgcaagaccatcttcgtagggggagtaccacgaccacttagagccgtggagctggctatgattatggacagactgtacggtggtgtatgttatgccggcatagataccgaccctgaactcaagtatcccaagggcgccgggagggtggccttctctaatcaacagagctacattgctgcaatttctgcaaggttcgtgcagttacagcacggggatatcgacaaaagggtcgaggtgaaaccctatgtgttagatgatcagatgtgtgatgaatgtcagggcgctcggtgtggtggcaaattcgcgccatttttttgcgctaatgtgacctgcctccagtattattgtgaattttgctgggctaacatccattctcgcgctggaagggaattccataaacctttagtgaaggagggcgccgatagacctcgacaaatacattttcgctggaattag

SEQ ID NO: 184598 - DNA, 1770 bp, synthetic construct
  misc_feature 1..1770: note = Description of Artificial Sequence: Synthetic coding sequence
  source 1..1770: mol_type = other DNA
atgcccccccccagccccgacagcgagaacggcttctaccccggcctgccctcatctatgaaccccgctttcttcccttcattctctcctgtgtctccccacggctgtactggtctcagcgtgcccaccagcggcggtgggggcgggggcttcggagggccgttctccgcaactgctgtcccaccccccccacctcctgcaatgaacatcccgcagcagcaaccaccgccgccggctgcaccccagcaaccacagagccggcggtcacccgtttcccctcagctgcagcagcaacaccaggcagccgcggctgcctttctccagcagcggaactcttacaaccatcaccaaccgctactgaagcagagcccctggagtaaccaccaatcctctggctggggaactggtagtatgtcctggggggccatgcacggccgagaccataggaggacaggcaatatgggcatcccagggacaatgaatcagatttcccctctgaaaaaaccctttagcggcaatgtgattgcccccccaaaatttacccggtcgacaccatccctcacgcctaagagttggatagaggataacgtgttcaggaccgataataatagcaacacactgctacctctgcaagtgaggagctcgctgcaattacctgcatggggctctgattcacttcaggactcttggtgcaccgcagctggcacctcgcggatagaccaggaccgatcccgcatgtatgacagcctcaacatgcattcgctcgagaatagcctgatcgatatcatgagggccgagcatgaccctctgaagggtcgactgagctatccacatccgggaactgataaccttctcatgctgaacggaagatcctctctgttccctatagatgatggcctgctggacgatggacactcagaccaggtcggtgttctgaactcaccaacctgctacagtgcacaccagaatggagagagaatcgaaagattctcccgcaaggtgtttgtaggaggattacccccagatatcgacgaggacgaaatcaccgcctccttcagacgcttcggccccctggtggtggattggccccacaaagctgaatccaagtcatactttccaccgaagggttacgccttcctcttattccaagaagaaagttccgtgcaagcactgatcgatgcatgtatcgaggaagacggtaagctgtatctgtgcgtgagctcacctaccataaaggacaagcctgtgcagatccggccctggaacttgtcagactccgatttcgttatggacgggtcccaacctctcgaccctagaaagacaatctttgtcggaggcgtacccagacccctgcgcgctgtcgagttagctatgatcatggataggctgtacggtggcgtttgttacgctggaattgacaccgaccccgaacttaaatatccaaagggagccggtagagtagccttttcgaaccaacagagctacatcgcagctatttccgctagattcgtccagctgcaacacggcgatattgacaagagggtcgaagtcaagccctatgtgcttgacgatcagatgtgtgacgaatgtcagggagcgagatgcggcgggaagttcgctcctttcttctgtgcaaatgttacttgcttgcaatattattgtgagttctgttgggcaaacattcactcccgcgccgggagagagtttcataagcccctcgtgaaggaaggtgccgaccggcctaggcaaatacacttccggtggaattag

SEQ ID NO: 184599 - DNA, 3105 bp, synthetic construct
  misc_feature 1..3105: note = Description of Artificial Sequence: Synthetic coding sequence
  source 1..3105: mol_type = other DNA
atgcgggacttcggcttcggcgtgctgcagaccgcccccctgcggtcctcttcccctggtcccctgttttgcggggaagcctacggcccatatgccgtaggatccgtaaatcccttgcctagcgccactcctttcggacccttgagtccacctccgcttcccgtcaccggcttcctggaggccgcaagcccattctctgtgccactagggggcggcgccggctcccctgccgcagctgcctccagttcatccccttttcttgcacaccagcagaccatgcaggacgaacttttgttgggactgactcagcagcccgcccgacctctgtctggtgctgcagccacagagaaactacctgatcatcaccctggtggcggaacgattgcaggcgtaacgcatcttcttccctctcaggacttcaagccttcactccaccatccatcctccagctctgcctccagctgttgctgttgccggacaagcagtccccaggacttttctaaaaggcagcagcagcagctgtcttcccagaaaagaaaggagttttctccaccacacttaccacatcccccagacagtaaacccccgcccccccccccccctctgcactgcccaggcaggttcagtccccccccccctcctgccgggcctctgctccagcccgcccagctggcccagcggcagcagcagcagcccccccaacaattctctctgctgcaccagcagcatttgagtccccaagatttcgcccccagacagcggcctgccgacctacccccacttcctcaactgcccccaagtccgccagccgcaccacggcgtaggcacggcggagctgggagccccaggaagacaccagcagcaggtgagggaagtgcggccgagtccccgaacgccggactcgcctctagcacacctgtgaaccccgctccaggatccatggagtccccgaaccacccactgcttaactctcccagcaacttactgcccggcggggctctgggcgccggagcattttctagccttcaaagcccggacctcccccaccctggcggtgggggaggagggggcgggggaggacctccggggggcgggggcggtgggggatccgctagtccgcctcccctacctggttttggaacaccatggagtgtgcagactgctagtcccccaccacagccccaacagccccctcccactcaaccccaacagcagccccctccaccacagcagcccccccaaccccagccccaacctccgggtagctccgcaaccacccctgggggaggtagcggagggtcattgagcgccatgcccccaccctcccccgactccgagaacggtttctaccccggactgccttccagcatgaatcccgcatttttcccgagcttcagtccagtctccccccatggctgtaccggcttgagtgttccaacatcaggtgggggtggtggtggtttcggtggtccattttccgctacagctgtgccccctccccctccgccagccatgaacatcccacagcaacaacctcctcctccagctgctcctcagcagccccagtctagaagatccccagttagccctcagctgcaacagcagcaccaggccgcagcagccgcctttcttcagcaacggaatagctacaaccatcaccagcccttgctgaagcagtcgccttggtcaaaccaccagtcttccggatggggcacaggtagcatgagctggggcgcaatgcacggccgcgaccaccgtcgcacgggcaacatgggaattccagggaccatgaatcagattagcccacttaagaagccattttcgggcaacgtaattgctcctcctaaattcacacggagcacacctagcttaaccccgaaaagttggatcgaggataacgtctttcggacagataataattcaaacacacttttaccactacaggtaagatcttcgttgcaactacccgcttggggatcagattccctgcaagattcgtggtgcaccgccgccggtacaagccggattgaccaggatcgatcaaggatgtatgactctctgaacatgcactcactggaaaacagtcttattgatattatgcgagccgagcatgacccgctgaagggtagacttagctacccccatccaggaacggataatctattgatgctgaacgcacggtcctacggtagacgccgggggagatccagcctcttccccattgacgatggcttactcgacgatggccatagtgaccaggttggagtgctgaacagcccaacatgctattctgcacaccaaaatggagagcgtattgaacgatttagtagaaaggtgtttgttggcgggctcccccctgatattgacgaggacgaaatcacggccagcttccgccggttcgggcccttagtcgtggactggcctcataaggcagagagcaagtcttacttcccaccaaaaggctacgcctttctcctgttccaggaagagagctcagtgcaggcccttatcgacgcgtgtatcgaagaggatggtaagctgtatctttgtgtctcttccccaacaatcaaagataagcccgtgcagatcaggccctggaatctgagcgatagcgattttgtgatggacgggtcacaacctttggacccccggaagactatatttgtcggtggtgtacctaggcccctgagggctgtggagctggctatgattatggaccggctgtatggaggcgtttgttatgctgggatagatacggatccagaattgaagtacccgaagggagccggtagagtggcattctccaaccaacagtcatatatagccgccatttcagccaggtttgtacagcttcagcatggggatattgataagcgggtggaggtgaagccttatgttctggatgaccagatgtgcgacgaatgccagggagcccggtgcggcggcaaattcgcccccttcttctgcgccaatgtgacttgtctccagtactactgtgagttctgctgggccaacatacactctagggctggaagggaattccacaagcctctggtgaaggagggcgctgaccggccaagacagattcatttccgatggaattag

SEQ ID NO: 184600 - DNA, 3081 bp, synthetic construct
  misc_feature 1..3081: note = Description of Artificial Sequence: Synthetic coding sequence
  source 1..3081: mol_type = other DNA
atgcgggacttcggcttcggcgtgctgcagaccgcccccctgcggagttctagccctgggcccctgttttgtggtgaggcctacggaccttacgcggtcggcagtgtgaatcccctgcctagtgccactccatttgggccccttagccctccccctctcccagtgactggttttctagaggcggcttccccatttagcgtccccttaggaggcggagccggcagccctgccgcagcagctagcagcagcagtcctttcttagcccatcagcaaactatgcaggacgagctgctactgggtttaactcaacagccagctagacctttgtctggagcagccgctactgaaaagctcccagaccaccacccaggtgggggaactatcgctggcgtcactcacctcttgccatctcaggacttcaaaccctcactccaccaccctagtagttcctcagccagctcatgttgctgctgccgcacctcctctcctcaagacttttctaagaggcagcaacaacagctgtccagccagaagagaaaagaattctcccctccgcacctgccacaccctccagactccaaacccccaccacccccccctcccttacactgccctggacgcttttctcctccccctccccccgcaggccccctgctgcagcccgctcaacttgctcagcggcagcagcagcagccacctcagcagttctccctcctccaccagcaacatctgtcccctcaagactttgccccccgccagcgtccagccgacctgccccctctaccccagctcccgccatctccacccgctgcccctcgccgcaggcacggcggagcaggcagcccacggaaaacacctgcggctggggaggggagtgccgctgaaagtccgaacgccggcttggcttcaagtacacctgtcaatccagccccaggctcgatggagagccctaatcatccactcctgaattcaccgtccaacctgctgcccgggggagctctaggcgctggtgccttcagcagcttgcagtctccggacctgccccaccctggggggggcgggggtggcggtggtggggggcccccaggaggaggcgggggggggggcagcgcgagccccccaccactgccaggctttggtactccttggagcgtgcagacggcatcacccccacctcagccccagcagccaccgccgactcagccacagcaacagcctccgccaccccagcagccaccgcaaccacaaccccagccccctggttctagcgccacaacacctggcggaggctccgggggctctttgtccgctatgccaccaccctcccctgatagcgagaatgggttctaccctggcttgcccagctcaatgaaccccgctttcttcccatccttctcacctgtgtcccctcatggctgtaccggtctgtcagtccccacatccggcggcgggggcggaggcttcggaggaccttttagtgccacggcagtgcccccgcctccccctcctgctatgaacataccacagcagcaacccccccccccggctgccccccaacagccgcagtctagacgatctccggtgtcaccgcagctgcagcagcagcaccaggctgcagcagcagccttcttgcaacagagaaatagctataaccaccaccaacctctactgaagcagtccccgtggagcaatcaccagagctctggatggggcaccggatctatgagctggggagccatgcacggccgcgatcaccgcaggaccgggaacatgggcatacccggaacaatgaatcaaatcagccccctgaagaagccttttagtggtaatgtgattgcgcctccgaaatttacccgctctacccctagtcttactcctaaatcctggatcgaggacaacgtgttccggacagacaacaatagcaacaccctgcttccactccaagtccggagctcattgcagctgcctgcttgggggagcgatagtcttcaggattcctggtgtaccgccgccgggacctctagaattgaccaggatcgttcccgcatgtacgactcccttaacatgcatagccttgagaattccctcattgacatcatgcgggcagagcatgatcctttaaagggtaggctgtcatacccccaccccggaaccgacaacttgctgatgctgaacggccgctctagcctctttcctattgatgacgggctccttgatgatgggcattcagatcaagttggggtccttaattcgcccacctgttattctgctcatcagaacggcgagaggattgagcgcttctctcgtaaagtatttgtgggtggactgcctccggacattgacgaggacgagatcactgcttccttcaggcggttcggaccactcgtagtagactggccccataaagctgagtctaagagttacttccccccaaaaggctacgcctttctgctgtttcaagaggaaagctcggtgcaggctcttattgatgcgtgtatcgaggaggacggcaagttatatctttgcgtatcaagccctaccatcaaagacaaaccagtccagatcagaccttggaacttgtccgactccgatttcgttatggacggctcccaaccgcttgatcctagaaagacaatatttgtgggcggcgttccccggcccctccgggcggtggagctggccatgatcatggatcgattgtacggcggcgtatgttacgccggcattgatacggaccctgaacttaagtaccccaagggagccggccgcgtggccttctctaaccaacaatcttacattgcagccataagcgctagatttgttcagctacaacatggggatatcgataagagagtcgaggtcaaaccttatgtcctcgacgaccaaatgtgcgacgaatgccagggggccagatgcggaggcaagtttgcacccttcttttgtgccaatgtgacctgtctacaatattactgcgagttttgctgggcaaacatccattcccgggccggcagagagtttcacaagccgcttgtcaaagaaggagcagaccggccaagacagatccatttcaggtggaattag

SEQ ID NO: 184601 - DNA, 2097 bp, synthetic construct
  misc_feature 1..2097: note = Description of Artificial Sequence: Synthetic coding sequence
  source 1..2097: mol_type = other DNA
atgcaggacgacctgctgatggacaagagcaagacccagccccagcctcagcaacagcagaggcaacagcaacagccccagccagaaagttcagtcagcgaggctccttctactccactctcttccgagactccaaaacctgaggaaaactcagccgtcccggccttaagcccagcagctgcccccccggcccccaatggccccgacaagatgcagatggagagccctctcttgcccggccttagctttcatcagccaccacaacagccacctcctccacaggaacccgcggcccccggtgcatccctaagtccaagcttcggcagcacatggtccaccggtactacgaacgccgtagaagactcattcttccagggaatcacacccgtcaacggcaccatgctgttccaaaactttcctcatcatgttaatcctgtgttcgggggcaccttttcgcctcagataggtttggcgcagacccagcatcaccaacagcccccacctccagctccagctcctcagcccgcccagccagcccaacctcctcaagctcaacctccgcagcagagacgttctccagcgtctccctcacaagccccttacgcacaacgttctgcagctgcagcatatggtcaccaacctattatgacatccaagccatcatcaagctctgccgtggctgcagccgctgctgctgccgccgcctctagcgccagcagtagttggaatacccaccagtccgtgaacgcagcttggagcgctcccagtaacccttggggggggctgcaagcaggccgcgatcctcggagagctgtaggtgttggagtaggggtgggtgtcggtgtaccttcacccctgaatccgatatctcctttgaagaaaccgtttagctccaacgtcatcgcaccgccaaagtttcctcgagccgcccccctcactagcaagtcatggatggaagataacgcatttagaaccgataacgggaataatctcctgccatttcaggaccgctcacgaccgtatgacaccttcaatctgcacagtttggagaatagcctcatggacatgattcggaccgaccacgagcccctgaaagggaagcactatcctccaagtggtccacctatgtcttttgctgacattatgtggaggaaccactttgccggccgaatgggcatcaattttcaccatccagggacagacaacatcatggccttgaataatgccttcctggatgactcgcacggagaccaggcactctccagcggcttatcctctccaaccaggtgtcagaacggtgaaagggtggagcgctatagtaggaaggtcttcgtgggcggcctgcctcccgacatagatgaagacgaaattaccgctagtttccgccggtttggcccactggtggtggactggccacacaaggccgaaagtaagtcatattttcctcctaagggctatgcattcctcttatttcaggaggaatcttccgtgcaagccctcatagacgcttgtctggaggaggatggcaagctttacctgtgcgttagttcacctacaatcaaggacaaacccgttcagataagaccatggaacttgagtgactctgacttcgtgatggatgggtcccagccactggatcctcgaaagactatttttgttgggggggtgccgcggcctctgagggccgtagaactcgctatgatcatggaccgcctgtacggtggcgtatgttacgcagggattgacaccgacccggaactcaaataccctaagggagctgggcgcgtcgctttttcaaaccagcagtcatacatcgctgcaattagtgctcgatttgtccagctgcagcacaacgatatagataagagagtggaggtcaaaccctatgtgctcgatgatcagatgtgcgatgaatgccagggcactcgctgtggagggaagttcgccccctttttttgcgccaacgtcacatgcttgcagtattattgtgagtattgttgggcgagtatccactcacgcgccggtagagagttccataaacccctcgtcaaagaaggaggggaccgacccaggcacgtgccctttcgctggagttag

SEQ ID NO: 184602 - DNA, 2055 bp, synthetic construct
  misc_feature 1..2055: note = Description of Artificial Sequence: Synthetic coding sequence
  source 1..2055: mol_type = other DNA
atgcaggacgacctgctgatggacaagagcaagacccagccccagcctcagcagcagcagcggcagcagcaacagcctcagcccgaatcctctgtctccgaggcgccctcaacaccgctatcttcagagacacccaagccggaagagaacagtgctgtgccagcgctgtcacctgcggcggcgcccccggcacctaacggacctgacaagatgcagatggaatcccccttgttgccaggcctgagcttccaccagccccctcagcagcctccacctcctcaggaacctgcagcccctggcgcatctctctcaccctcctttggcagtacgtggtctaccgggactacaaacgcggtggaagattccttctttcaggggattacacctgtaaacgggaccatgctctttcagaactttcctcaccacgtgaatcccgtttttggggggaccttctccccccagataggcctggctcagactcagcatcatcagcagccacctccacccgctcctgccccccagccggcacagcctgcccagccccctcaggcgcagcctccccagcagcgacggagccccgcctccccttcccaggccccttatgcccagagatccgccgccgctgcgtatggccaccagcccatcatgacgagtaagccgagctcaagctctgcagttgccgctgcggcggcagctgccgccgccagttctgcatcatcctcgtggaacactcaccagtccgttaacgctgcgtggtccgctccttcaaacccatggggaggtctgcaagccggaagggatccgagacgcgctgtcggcgtgggggtcggagtgggcgtgggcgtcccttcacccctgaatcccatttcccctctcaagaagccattctcttcaaatgtaatcgccccaccaaaatttccgcgggccgctccgcttacaagcaagagttggatggaggacaacgccttccggaccgacaatggcaacaatctcctgccctttcaggacaggtctcgaccatatgacaccttcaacctccacagtcttgagaattcgctgatggacatgatcagaaccgatcatgagccgcttaagggacgcatgggtataaacttccaccatcctgggaccgataacatcatggcactgaactccaggtccagcttatttccctttgaggatgccttcctcgatgacagccacggggatcaggcattgtcttcgggcctgagctctcccactcggtgccagaatggtgagcgggttgaacgctactctcgcaaagtgtttgttggggggctaccccccgacatcgatgaggacgaaatcactgcaagcttcagaaggttcggtcctctggtggtcgactggccccataaagcagagagcaagagttactttcctccaaaagggtatgctttcctcctgttccaagaggagagttctgttcaagctttgattgatgcatgtttggaggaggatggtaagctgtatctgtgcgtgtctagtccgacaattaaggacaaacccgtgcagataaggccctggaatctgtccgacagcgattttgtgatggatggctcacagcctctagatccaaggaaaactatcttcgttggcggcgtaccaagacctctcagggccgttgaacttgccatgatcatggacaggctgtacggtggcgtctgttacgccggcatcgacacagatcctgagcttaagtacccaaagggagccggacgggtggcattcagcaaccagcaatcatacatagcagctatctctgcccggttcgtgcagttacaacacaacgacatcgacaaacgcgtggaggttaaaccctatgtcctggatgaccaaatgtgtgatgaatgccagggcacccggtgtggtggcaagttcgcacccttcttctgtgcaaatgtgacctgtctgcagtactactgcgagtactgctgggcgtctattcattctcgggccggaagggagtttcacaagccacttgtgaaggagggcggcgatcggccacggcatgtgccatttcgctggtcctag

SEQ ID NO: 184603 - DNA, 2055 bp, synthetic construct
  misc_feature 1..2055: note = Description of Artificial Sequence: Synthetic coding sequence
  source 1..2055: mol_type = other DNA
atgcaggacgacctgctgatggacaagagcaagacccagccccagccccagcagcagcaacgccagcagcagcagccgcaaccagaatcaagcgtttccgaagcgccaagtacacccctgagcagcgagaccccgaagcccgaagagaactcagccgtgcccgctcttagtcctgccgcagccccccccgcccccaatgggcccgataagatgcagatggagtcaccactcttgcctggtctctcctttcatcagcctccccagcagccccctcccccccaggaaccagctgcacccggtgcctctctgtctccatcctttgggtctacatggtcgacggggacaactaatgccgtggaggattccttcttccagggaataacaccagttaacggcaccatgctgttccagaatttcccccatcatgttaaccctgtttttggcggcacctttagtccccagatcggcctggcccagactcaacatcaccagcagcctcccccccctgccccggccccacaacccgcccagcccgcccaacccccccaggcacagccaccccaacagagaagatctcccgccagtccatcacaggccccctacgcccagagatccgcagcagccgcttacggccaccagccgattatgactagtaagccaagttcaagcagtgctgtcgccgccgcggccgcagcggccgctgcatccagcgcgtcgagcagctggaacactcaccagagcgtcaacgccgcctggagtgcaccatcgaacccttggggcggcctgcaggcaggccgggatcccagacgcgcagtcggcgttggcgtaggtgtcggggtaggagtgccttcgcctctgaacccaataagtcctcttaagaaacctttctcatccaacgtcattgcgccacctaagttccccagggccgctccacttacatcgaaatcctggatggaggataatgcctttcgtaccgataatggtaacaacttgctgccattccaagacagaagcagaccgtacgacactttcaacctacacagtctcgaaaacagtctcatggacatgattcgcactgatcacgagcccctgaagggtcgaatggggatcaactttcaccacccggggacagacaacatcatggcattgaattccaggagctccctatttcctttcgaggacgcgttcctggacgacagtcacggcgatcaggccctgtctagtggattatcatcaccgacccggtgccagaatggcgagcgcgtggaaagatacagcagaaaagttttcgtgggaggcctgccccccgatatcgacgaggatgaaatcacagcatcctttagaaggtttgggccactggtggtcgattggcctcacaaagctgagtctaagagctactttccaccgaagggctacgctttcctcctgttccaggaagagtctagtgtgcaagccctgatcgacgcttgtctggaggaggacggtaagctttatttgtgcgtatccagtcccactattaaggacaagccagtccaaatccgtccctggaacttgagcgattcagatttcgtgatggatgggtcccaacccctcgaccctcgtaagaccatttttgttggtggagtgccacgtcccctgcgggctgtagagctggctatgatcatggacaggctatatggtggggtctgctacgcagggattgatacagacccggagttgaaataccctaagggcgccgggcgagtggctttctctaaccaacagagttacatagctgctatcagtgcgcgcttcgtccagctacaacataatgacatcgacaagcgggtagaggttaaaccgtatgttctcgatgatcagatgtgtgacgaatgccaaggtaccaggtgcggtggtaagttcgccccatttttttgcgccaatgtgacatgcttgcagtactactgtgagtattgctgggcctccatacatagtcgcgcaggccgcgagtttcataagccgctggtgaaagaaggaggcgatcgacccagacacgttccattccgctggtcctag

SEQ ID NO: 184604 - DNA, 2190 bp, synthetic construct
  misc_feature 1..2190: note = Description of Artificial Sequence: Synthetic coding sequence
  source 1..2190: mol_type = other DNA
atgggcgactacggcttcggcgtgctggtgcagagcaacaccggcaacaaaagtgctttccctgttcgttttcacccccacctacaaccaccacatcaccaccaaaacgcaacgccctctccagctgctttcatcaataataacaccgctgctaatggctcctctgccggctctgcttggctgttcccagctcctgccacgcataatatccaagatgaaatactggggtcagaaaaggcgaagtcccagcagcaggagcaacaggatcctctcgagaagcagcagctatctccttcccccggtcaggaagccggcatcctgcccgagactgaaaaggctaagtccgaggaaaaccagggagataactcctctgaaaacggcaacggaaaggagaaaataagaatcgagagccctgtgctgactgggtttgactaccaggaggccacaggtcttggcacttctactcagccactgacgagctccgcatcctccttgactggattcagcaattggtccgcagcgattgcacccagtagctccacaataattaatgaggacgccagttttttccatcagggcggagtgcccgcagcaagcgcgaacaatggggctctcctgtttcagaactttccacaccacgtcagtcctgggttcggaggatccttctcccctcaaattgggccgctgagccagcaccatccacaccatccgcacttccagcaccatcactcacagcatcagcagcaacggaggtcacctgcgtccccccatcctcccccattcacccatcgcaatgcagctttcaaccagctccctcatctggccaacaacctaaacaaacccccatccccatggtcatcatatcaatcaccatctcctacaccatcatcatcatggtccccagggggcggcgggtatggaggatggggggggtctcaaggccgtgaccatcgacgtggccttaacggtggaatcactcccctgaacagtattagccctctaaagaagaacttcgcctccaaccatattcagctgcagaagtacgccagacctagcagtgcatttgctccaaagtcatggatggaggattccctcaaccgggctgacaacatcttcccttttccggatcggccacgaaccttcgatatgcatagcctcgaatcatctttgattgacattatgcgagccgagaacgacactatcaaaggtcggctgaattatagctacccaggatcagattccagcctgctgattaatgcgcggacctatggaaggagacgcggccagtcgagcttgttccccatggaagatggttttcttgatgacggaagaggtgatcaacccctgcactcgggactcggctccccgcattgtttttcccatcagaacggcgaacgcgttgagcgctacagccggaaggtttttgtcgggggactcccacccgatatagatgaagatgagattacagcctcctttaggaggtttggtccacttatcgtcgactggccacataaggctgagagcaaatcctattttccacccaagggatacgccttcttgctgtttcaagacgagtcctccgtgcaggccctcatcgatgcatgcatcgaggaggatggcaagctgtatttgtgtgtgtcaagtccgaccattaaggacaagcctgttcagatacggccttggaacctctctgactccgattttgttatggacggctcccagcctctcgacccaagaaagacaatctttgtgggtggggtgccaagacccctgcgggcagtcgagctcgccatgattatggatcgcctgtacggcggcgtttgttatgcgggcatcgacaccgatccggagctgaaatatccaaagggtgccgggcgcgtcgcatttagtaatcaacagagctatatcgccgctatcagtgcccgcttcgtccagctgcaacacggcgaaatcgacaagcgggtcgaggtgaaaccttacgtacttgacgatcaactttgtgatgaatgtcagggggcaaggtgcgggggaaaatttgcgccctttttctgcgctaatgtaacctgtctgcagtactattgtgaatactgctgggcagcaattcacagcagggcgggcagagagtttcacaagccccttgtgaaggaaggcggagatcggcccagacacatctccttcaggtggaactag

SEQ ID NO: 184605 - DNA, 2139 bp, synthetic construct
  misc_feature 1..2139: note = Description of Artificial Sequence: Synthetic coding sequence
  source 1..2139: mol_type = other DNA
atgggcgactacggcttcggcgtgctggtgcagagcaacaccggcaataagtccgcttttcctgtgcgtttccatccacatctccaacccccacatcatcaccagaatgccaccccctccccagctgcatttatcaacaataatacggctgccaatggctcctccgccggcagtgcctggctctttcccgcgccggccacccataacatccaagacgaaatactgggctccgaaaaggccaagtctcaacaacaggagcagcaggatcccttggagaagcagcagctcagtccgtcacccggccaagaggccggaatactacccgaaacagagaaggccaaatctgaagaaaaccagggcgacaacagttctgagaacgggaatggaaaggagaagatccgcatcgagtctccagtgttgacgggcttcgattatcaggaagccacaggactcggaacctcaacgcaaccactgacctcgtccgccagctctctgacaggcttttcaaactggagcgccgccattgccccatcatctagcacgatcatcaacgaggatgcaagtttcttccatcagggaggcgtacctgccgcatctgccaacaatggggcattgctatttcagaactttccccatcacgtaagtcccggatttggggggtccttttcaccgcagattggacctttgtctcagcatcatccacaccacccccactttcagcaccaccatagtcaacaccaacagcaaagacgatcaccagcctcaccccacccaccaccattcacccacaggaacgctgccttcaatcagctcccccacctggcaaacaatctcaataaacctcccagcccctggagttcttaccagtccccctcacccacacccagcagctcttggtcccctggaggaggcgggtatggtggctggggtggctctcaaggcagagaccacagaaggggcctgaacggcgggataacaccgctaaactccatatccccacttaaaaagaatttcgcgagtaatcacattcagctccagaagtacgcccgtccaagttcagcattcgctccaaaatcttggatggaggactcactcaatcgggcggataacatcttcccctttcctgatcgcccccgcacctttgacatgcacagtttggagtcctctttgattgacattatgcgcgccgaaaacgatactatcaaagctcgaacctacggaagacgcagggggcaatcctcactttttccaatggaagacgggtttttagatgacgggcgaggagaccaaccactgcattccggattgggcagtccccattgtttctcacaccagaatggggagagagtagagcgctatagcaggaaggtgtttgtgggcggtctcccccccgatatcgacgaggacgagatcaccgccagctttaggagattcgggccgttgattgtggactggccccataaagcggagagcaagagttactttccccctaagggatacgcatttctccttttccaagacgagtcgtcagtgcaggcactcatcgatgcctgcatcgaggaggatggaaagctctacctgtgcgtgtcatctcccactatcaaggataagcccgtgcagattaggccttggaatctttccgacagcgacttcgttatggacgggtcacaaccattggaccccagaaagaccatctttgtggggggtgtgccgcggcccctgcgggccgttgagctggctatgatcatggaccgactgtacggaggcgtttgctacgcagggattgacaccgatccggagctcaagtacccaaaaggcgcagggcgcgtggccttttccaaccagcaaagctatatcgctgctatatctgctaggttcgtccagctgcagcacggggagattgataaaagggttgaggttaagccctacgttcttgacgatcaactgtgcgatgaatgccagggggctcggtgcggagggaaatttgcgccattcttctgcgcgaatgtgacatgcttacagtactattgcgaatactgctgggcggccattcattctagagcgggtagagagttccacaagccgctagttaaggagggaggcgaccgacctcgccacatttctttccgctggaactag

SEQ ID NO: 184606 - DNA, 2049 bp, synthetic construct
  misc_feature 1..2049: note = Description of Artificial Sequence: Synthetic coding sequence
  source 1..2049: mol_type = other DNA
atgagcacccccgccgtgccccaggacctgcagctgccccccagccagcgcgcacaaagcgctttcaaggaacagcggcggcagaagttgaaggagcatttactgcgacgaaagaccctgttcgcttataaacaggaaaatgagatgttgagctccagggaccagcgcgttgtcacctcagaggatcaagtgcaggaaggcaccaaagtgttgaaactcaagaccaagatggccgacaaggaaaatatgaagcgacctgcggagtccaaaaataatactgtggtgggcaagcactgtattcccctcaaacctagcaatgagcttacaaatagcaccgtagtgattgacacacataagccaaaggacagtaatcagacacctcacctgctcttgacagaggatgaccctcagagccagcatatgacattgagtcaagcgttccacctcaagaataattcaaagaagaagcaaatgactaccgagaaacagaaacaggatgccaatatgcccaagaagccagtgttaggttcttatcgagggcagatcgtacaatccaagataaactcctttagaaagccactgcaggttaaggatgagtctagtgccgctacaaagaagctcagtgccacaatccctaaagctacaaagccccagcctgtgaacacgagctcagtgacagttaaatccaaccgctcctccaacatgacagccacaacaaagtttgtttctaccaccagccagaacacacagttggtgcgcccacctatcaggagccatcatagtaacacaagagatacagtcaaacagggaatcagccgtacatcagccaatgtgacaatacgaaagggaccacatgagaaggagctgttacagagcaagactgcactgtcaagcgtgaagaccagcagctcccaaggtatcattcggaacaaaacgttgtctagaagcattgctagtgaagttattgcccgcccagcctcattgagcaatgacaagctgatggagaaatcggagcccgtggatcagaggaggcatactgcgggtaaagcgattgtggactctcggagcgctcagccaaaggaaacctccgaagaacgcaaggcaagactatcagaatggaaggccggaaagggcagggtactgaagcggccccctaactctgttgtgacccagcacgagccagccggacagaacgagaaacccgtcggcagtttctggacgaccatggccgaagaggacgaacaaagactatttacagagaaggtaaataatacattctccgaatgtctgaatcttatcaacgaaggctgtcctaaggaggacatcctcgttacactaaacgacctcatcaagaatattccagatgctaagaaattagtaaagtactggatctgtctggccctcatcgagccaattaccagtcctatagagaatatcattgcaatttacgagaaggcaattctggctggagcacagcctattgaagagatgaggcataccattgtggatatcttgacaatgaagtcacaggagaaggcaaacctgggagaaaacatggaaaaatcgtgtgcttctaaagaagaggtcaaggaggtatctatcgaagatactggagtagacgtggatcctgaaaaattggaaatggagtcaaaactgcatcgaaatttgctgtttcaggattgcgagaaggagcaggataacaagacaaaggaccctacacacgacgtgaaaactcctaacacagagacaaggacctcttgtcttattaagtacaacgtgtccaccaccccatatctgcaaagcgtgaagaagaaggtgcagttcgacgggacaaactccgccttcaaggagctgaagttcctgacccctgtccgccggtcccggcgactccaagagaaaacttcaaagctgccagatatgctgaaagaccactatccctgcgtgtcatccctagaacagctgacagagctggggagagaaacagatgcatttgtgtgccgaccaaacgccgccttgtgtcgagtgtattatgaggccgatacgacctag

SEQ ID NO: 184607 - DNA, 1485 bp, synthetic construct
  misc_feature 1..1485: note = Description of Artificial Sequence: Synthetic coding sequence
  source 1..1485: mol_type = other DNA
atgagcacccccgccgtgccccaggacctgcagctgccccccagccagcgcgctcagagcgccttcaaagagcagcggagacagaaactcaaggaacacctgctccggcgtaagactttgttcgcttacaagcaggagaacgagatgctgagttcccgcgaccagcgagtggtgacctctgaagatcaggtgcaggagggtaccaaggtcctcaagctgaagaccaagatggctgataaggaaaacatgaaacgtcctgccgaatctaaaaacaacacagtcgtcggcaagcactgcattccacttaaacccagtaacgagttgactaatagcaccgttgtcattgatacccataagccaaaagatagcaatcagacccctcatcttctgctgaccgaggatgatccacagtcgcagcatatgacactgtctcaggcatttcatctgaagaataacagcaagaagaaacagatgacgacagaaaagcagaagcaggatgccaacatgccaaagaagcctgtgctcggatcctatagaggacagattgttcagagtaaaattaatagtttcaggaagccactgcaggttaaagacgagagctctgctgccactaagaagctctccgctaccatccccaaggcaacaaagccccaaccagtgaatacatcaagcgttactgtgaaaagtaaccgctcctccaacatgaccgcaaccaccaaatttgtgagtacaacctctcagaatactcagctggttagacccccaatccgcagtcaccacagtaacactcgggacaccgtgaaacagggaatctcccgaactagtgcaaacgttacaatccgtaagggtccgcatgagaaagaacttcttcaatcaaaaacagccctgtctagtgtgaagacaagttcctcgcagggcattattcgcaacaagacccttagccgttcaatagcttctgaggtgatcgcacgtcctgcctccttatctaacgacaaactgatggagaagtccgaacctgtcgatcagcggcggcacactgcagggaaggctattgtcgactcccgcagtgctcaacctaaagagactagtgaagaacggaaagcacgcctgagcgaatggaaggccgggaaagggagggttctgaaacggcccccgaacagtgtcgtgacacagcacgaacctgctggccagaatgaaaagcccgtaggtagtttttggaccaccatggccgaggaggatgagcaaaggcttttcacagaaaaggtgaataacacattctccgaatgtctaaacttaataaacgagggctgtcctaaggaagacatcctcgttactttgaatgacctaattaaaaacatccccgatgcaaaaaaactagtgaagtactggatctgcctcgcactcatagagccaatcaccagccccattgagaatattattgctatctacgagaaggccatacttgcaggagcccaggttcggtag

SEQ ID NO: 184608 - DNA, 2052 bp, synthetic construct
  misc_feature 1..2052: note = Description of Artificial Sequence: Synthetic coding sequence
  source 1..2052: mol_type = other DNA
atgagcacccccgccgtgccccaggacctgcagctgccccccagccagcgagctcagtctgcattcaaagaacaacggcggcagaaacttaaggagcaccttctcaggcgcaaaactctcttcgcatataagcaagaaaacgaaatgctgtcatcttccagagaccagagggtggtgactagcgaggaccaagtgcaggagggaaccaaagtgctgaagttaaaaaccaaaatggccgataaagaaaacatgaaacgtccggctgagtcaaagaacaatacggttgtaggaaagcactgtattcctctcaagcccagtaacgaactgaccaatagtaccgtggtaattgacacccacaaaccgaaagactctaatcaaacaccgcatctgctgttaacagaggacgacccacagtcacaacacatgacactgtcccaggcatttcatctgaagaataacagcaaaaagaaacagatgactactgaaaaacagaagcaggacgccaacatgcctaaaaagccggtgcttggaagttaccgcgggcaaattgtccagtctaaaattaacagcttccggaaaccactgcaagtgaaggatgaatcttcagctgcaaccaaaaaactgtccgccacaattccaaaggccaccaagcctcagcctgtgaacacgtcctcagtcaccgtcaaatctaacagatccagcaatatgacagcaaccacaaagtttgtttcgactacctctcagaacacacagctcgtgcgtccaccaattcgatctcaccactcaaacactagggacactgtgaaacagggaatctcccgtacatccgcaaacgtcacaattagaaagggccctcacgaaaaggagctgctgcaaagcaaaactgccctgtctagcgtcaagaccagcagtagccaagggataataagaaataagacgctgtcgcggtctatagctagcgaagtgatcgctcggcctgccagcctgtcaaacgacaagttgatggagaaaagcgaacctgtggaccagcggcggcacactgcaggcaaggccatcgtcgactcaaggagcgcccagcccaaagagacatctgaggaaagaaaagcaagactctctgagtggaaagccggcaaaggaagagtgctcaagcgccccccgaattcggttgttactcaacatgaacctgctggtcagaatgagaagcccgtcgggtcattctggacgacaatggccgaagaagacgaacagagactgttcacggagaaggttaataatacctttagtgagtgcctgaacctcatcaacgaaggctgtcctaaagaagacatcctcgtgaccctgaatgatttgatcaaaaacataccagatgccaagaagcttgtgaagtattggatttgcctcgcccttatagaacctatcacaagtcctatcgagaacatcatcgccatatacgaaaaggccattttggccggcgctcagccaattgaggagatgagacatacaatcgtggatatcctgaccatgaaatcacaggaaaaagcaaacctcggagaaaacatggagaaatcgtgcgcttcaaaagaagaagtaaaagaagtctcgatcgaggacaccggcgtggacgtggacccggagaagctggaaatggagagtaagctgcatagaaacctgctatttcaagattgtgagaaggagcaggacaataaaactaaagacccaacacacgacgtgaagacacctaacactgaaaccaggactagttgcctaatcaagtacaacgtttccactaccccgtatctccagtctgtgaaaaagaaagtgcagttcgacgggacaaattcggctttcaaagaacttaaatttctgacaccagttcgcaggtcaaggcgccttcaggagaaaacttccaagctgccagacatgcttaaggatcactacccatgcgtcagctctcttgagcagctcactgagctgggccgtgaaaccgacgcttttgtctgcagacccaacgctgcgttatgtcgtgtgtattacgaggcagataccacttag

SEQ ID NO: 184609 - DNA, 1488 bp, synthetic construct
  misc_feature 1..1488: note = Description of Artificial Sequence: Synthetic coding sequence
  source 1..1488: mol_type = other DNA
atgagcacccccgccgtgccccaggacctgcagctgccccccagccagcgcgcccagagtgcattcaaagagcaaagaagacagaaattgaaggaacatctgctgaggaggaagacgctcttcgcctataaacaagagaatgagatgttgagcagctctcgggatcagagagttgttactagtgaggatcaggtgcaggaaggtacgaaggttttgaagttgaagactaagatggccgacaaggaaaatatgaaaaggccggcggagagcaaaaacaacacggttgtgggaaaacattgtatccctttaaagcctagtaatgaactcaccaatagcaccgtggtgattgacacccacaagccaaaagattccaatcaaacccctcatctgttactgactgaggacgaccctcagtctcagcacatgacactgagtcaggccttccatctgaagaataattcaaagaagaaacaaatgaccacagaaaagcaaaagcaggatgctaatatgccgaagaaacccgtgctgggctcctatcgcggtcaaatagtgcaatctaaaataaactcttttcggaagcccctccaagttaaggacgagtcatcagccgcaacaaagaaactttctgccacaatccctaaggcgactaaaccccagccagtgaacacatcctctgtgacagtgaaatcaaatcgatcttccaatatgactgctaccaccaaatttgttagcaccacttcgcaaaacacacagcttgttagacccccgattcgcagtcatcatagcaacactcgggatactgtcaagcagggcatcagccggacaagcgcaaatgttaccatccggaagggccctcacgagaaggaactccttcagtctaagacggccctgagctcggtgaagacatcatctagccagggtatcattcggaataaaactctctcaaggagtattgctagcgaggtaatagcccgccccgctagcctgtccaacgacaagcttatggaaaaaagcgaaccagtggaccaacgcaggcacacggcggggaaagctattgtcgattcacgcagtgcacagccaaaagagacctcagaagagcggaaggccagactctccgagtggaaggcaggtaagggccgagtcctaaagagaccaccaaacagtgttgtgactcagcacgaaccggccggacaaaatgagaagcccgtcggatccttttggaccaccatggctgaggaggacgagcagaggctgttcactgagaaggtgaacaacaccttctctgaatgtttaaatcttatcaatgagggctgtcctaaggaggatattttagtcaccctaaacgacctcattaaaaacatccctgacgccaaaaaactggtcaaatactggatctgcctcgcgctcatagaaccaatcacttccccaatcgagaacattatcgcaatttacgagaaggcaatactggctggggcccagcacatctag

SEQ ID NO: 184610 - DNA, 5919 bp, synthetic construct
  misc_feature 1..5919: note = Description of Artificial Sequence: Synthetic coding sequence
  source 1..5919: mol_type = other DNA
atgggcgacgacagcgagtggctgaagctgcccgtggaccagaagtgcgagcacaagctgtggaaagctcggttatccggctatgaagaggccctgaaaatctttcagaaaattaaagatgagaagagccctgagtggtctaaattcctggggttaatcaaaaagttcgtcaccgactcgaacgcagtggtccagctgaaaggcctggaagcggcactggtgtatgtggagaacgcccatgtggccggaaaaactacaggagaggtagtgtccggagttgtgagcaaggtcttcaaccaacctaaggccaaggcgaaagagctaggcattgaaatctgtctaatgtatatcgagatcgagaaaggcgaagctgtacaagaagagcttctgaagggcctcgacaacaaaaatcctaagatcatcgtggcctgtatcgagactttaaggaaagcgctctctgagttcgggagcaaaatcattctgctgaagccaataatcaaagtactgccaaagctgtttgaatcacgggagaaggcagttcgggatgaggccaagctgatagctgtagagatttaccgatggataagagacgccctgcgccctcccctacagaacattaactccgtccagttgaaagagcttgaggaagaatgggtcaaactacccacaagcgcacctagacccacgcgcttcctgcgctctcagcaggagctggaggcgaaacttgaacaacagcagtctgccggcggggacgccgaaggcgggggtgacgatggcgacgaagtgccacagatagatgcttacgagttgctggaagcagttgaaattctgtccaagctcccaaaagacttctacgataagattgaggccaagaaatggcaggaacggaaagaggctctggagtccgtagaggtgttaatcaaaaaccctaaattggaagcaggggattatgccgacctggtgaaggcattgaagaaggtcgttggaaaagacactaacgtgatgctggtggccttagccgcaaagtgcttgacgggcctcgcagtgggtttacggaagaagttcggacagtacgcgggccatgtggttcctaccattctcgaaaagttcaaggagaagaagccacaggttgtccaagctttacaggaggctattgatgccatctttctcacaaccaccctgcagaacatttcagaggatgttttggccgtaatggacaacaagaacccaacaattaagcagcaaacatcccttttcattgccaggagctttagacactgcaccgcaagcacactgcccaagtcactgctgaagcctttctgcgcagccttgctcaaacatattaacgatagcgcccccgaggttcgcgacgccgcctttgaggccctgggaacagccctgaaagtagttggcgagaaagctgtcaacccattccttgccgatgtcgataagctgaagttagacaagatcaaagaatgctccgagaaggttgagcttatccatggaaaaaaggccggactggccgctgacaagaaggaattcaagcctctgcccggaaggacagcagcatctggggctgctggcgataaggataccaaggatattagtgctccaaaacccggcccgcttaaaaaggcgcctgcagctaaggcgggagggcccccaaagaaaggcaaaccggccgcccctgggggcgcgggcaatacaggcaccaagaacaagaaaggtctggagacaaaggagatagtcgaacctgagctgagtatcgaggtctgcgaggaaaaggcctctgctgttctgccgcccacttgtatacagctgcttgactcaagcaattggaaagagcggctcgcttgcatggaggaattccagaaagcagtggaactgatggaccgaactgagatgccctgtcaagccctggtacgcatgctggcaaagaagcctggatggaaagagactaatttccaagtgatgcaaatgaagttgcatattgtggccctgattgcgcagaagggcaatttctccaaaacctccgcacaggtggtgttggacggcctggttgacaaaattggggacgtcaaatgcggtaacaacgctaaggaggccatgaccgccattgctgaagcatgcatgcttccatggaccgctgagcaggtcgtctccatggctttttcacagaaaaacccaaagaaccaatccgagaccctgaattggctgtcaaacgccattaaagaattcgggttttcaggactgaacgtgaaagctttcatttcaaacgtcaagaccgcactcgctgccaccaatcctgctgttcgcaccgcagctatcacccttctaggtgtgatgtatctgtacgtgggaccttccctaaggatgttttttgaggacgaaaagcccgccttgctgagccagatcgacgccgagtttgaaaagatgcagggccagtcaccccctgctcctacccgaggaatctcgaagcacagcacctcaggcactgacgagggcgaggatggggacgaacccgacgatggcagtaatgacgtcgtcgacctgctgccacggacggaaattagcgataaaataacttcagaactcgtgagcaagataggtgataaaaattggaagatccgaaaggaaggccttgatgaggtggccggaatcataaacgacgctaaatttattcagccaaatattggtgagttgcctactgctttgaagggtagactgaacgacagcaacaaaattctggtacagcagacgctaaatatcttgcagcagcttgctgtagctatggggccaaacatcaagcagcatgtgaagaaccttgggatcccaatcattacggttcttggggattccaagaataacgtgagggccgcggctctcgccacagtaaatgcgtgggcggagcagacggggatgaaagaatggcttgaaggagaggacctttctgaggaactcaagaaggagaaccccttccttaggcaggaattactcgggtggttagccgagaagttgcctactctccggtcaactcctacagacttaatcttgtgcgtgccacacttgtactcttgtctggaagataggaacggtgacgtccggaagaaggcccaggatgcgttgcccttctttatgatgcacctgggttatgagaagatggccaaagccactggcaagcttaaacctacgtccaaagatcaagtcctggcaatgttagaaaaggcaaaggtgaacatgccagcgaagcctgcaccgcctaccaaggccacctccaaacccatgggcgggtccgcacccgccaaatttcagccagccagcgcccctgcggaggattgcatatctagctctacagagccgaaacctgatccaaagaaggctaaagcccccggcttgagtagtaaggctaaatccgcccagggaaagaaaatgccttcaaagacctccctgaaagaggacgaagataagtcgggaccaatctttattgtcgttccaaacggtaaggagcagcggatgaaagatgagaaaggcctcaaagtgttgaagtggaatttcacaacccctagggacgagtacatcgaacagctgaagacacagatgagtagctgcgtggcaaagtggctgcaggacgagatgtttcatagcgacttccagcatcacaacaaggctctggcggttatggtggatcaccttgaatcagagaaggaaggcgtgattggctgcctggacctgattctcaagtggctgaccctgaggttctttgacacaaacacttctgttctgatgaaggccctggaatacctgaagttgttgttcaccctgctctccgaagaggaatatcacctgaccgaaaacgaggcgagttcctttattccctatctggtcgtcaaggtgggcgagcccaaggatgtcatccggaaggatgtgagagcaatcctgaataggatgtgtttggtttaccctgcctccaaaatgtttccatttattatggaaggaactaaatccaagaactccaaacagagagcagagtgcctcgaggaactgggctgcttggtggagtcatacgggatgaatgtgtgccagcccacacccggcaaggccctgaaagagattgctgtgcacatcggagatcgggacaacgccgtgcggaatgccgcactcaacacaatcgtaactgtgtacaatgttcatggtgaccaggtgtttaaacttatcgggaacctatcagaaaaagatatgagtatgctggaggaacgcatcaaaagatccgctaaaaggccctcagccgctcccataaaacaggttgaggagaagcctcagagggctcagaatattagttccaatgccaatatgttgcgcaaagggccggcagaggatatgtcatccaagctgaaccaagcgcggtctatgtcagggcaccctgaggcggcccaaatggtcaggagagagtttcaactggatttggatgagatcgagaacgataacggaacagtgcggtgcgagatgccggagctggtccaacacaagcttgacgacatcttcgagcctgtgctcatacctgaacccaagatccgcgccgtctcaccccacttcgatgatatgcatagtaacacggcctcgacgatcaacttcatcattagccaggtcgcctctggtgatataaacaccagcatccaggcccttactcagctctttcaaatagaaagcctggctcgggaggccagcaccggggtcttaaaagatttgatgcacggcctgatcaccctcatgctcgactctcgtattgaggatctagaggagggccagcaagttattaggagcgtgaatctcctggttgtaaaggtattggaaaaatcagatcagactaacatactcagcgccctcctggttctgcttcaagattctctgctggcgaccgcctccagcccaaaattcagtgaacttgtgatgaaatgcctatggcggatggtaagactgctgccggacactattaattccatcaatttggaccgtatcctacttgacatccatatctttatgaaggtgtttccaaaagaaaagctcaaacagtgcaagtcagaatttccaataaggaccctgaaaacactgctgcatacactatgtaaactaaaaggaccgaaaatactggaccacctgactatgatcgataacaagaacgaatctgaactagaggcccacctttgtagaatgatgaagcactctatggatcaaacgggatccaaatccgacaaagagaccgaaaaaggagccagccgcatcgacgaaaaaagttccaaagccaaagtcaacgattttctagccgagatctttaaaaaaataggaagcaaggagaatacaaaagaaggcttagccgagctgtacgagtacaagaaaaaatatagtgatgccgatatcgagcctttcttaaagaacagttcccaattcttccagagctacgtcgagagaggcctgcgggttattgagatggaaagggaaggaaagggacgaattagcacatccaccgggatttcccctcaaatggaggttacatgcgtgcctacgcccacatcgactgtgtcatcaatcggtaatacaaacggagaggaagtggggccctcggtgtatctggaacggctgaaaatcctgcgtcagagatgtggactagataacactaaacaggatgatcgccccccgttaacctccttgctcagcaagcctgccgtgcccacagtcgcaagctcgacagacatgctccactccaaactctcccagctgcgtgagagtagagaacaacatcagcattcagatctggactctaaccagacccattcaagcgggacagtgactagcagttcgtctactgctaatattgatgatctcaagaagcggctggaaaggatcaagtcaagtaggaaatag

SEQ ID NO: 184611 - DNA, 5919 bp, synthetic construct
  misc_feature 1..5919: note = Description of Artificial Sequence: Synthetic coding sequence
  source 1..5919: mol_type = other DNA
atgggcgacgacagcgagtggctgaagctgcccgtggaccagaagtgcgaacacaagttgtggaaggcccgcctgtccggatacgaagaagcactgaaaatctttcagaaaatcaaagacgagaaaagtccggagtggagtaagttcttggggctcataaagaagttcgtgactgattcaaatgcagtcgtgcaactgaagggactggaggccgccctcgtctacgtggaaaacgcccacgtcgcgggcaaaacaaccggggaagtcgtctccggtgtagtatcgaaggtgttcaaccagcctaaagccaaagccaaggagctgggtatagagatttgtctgatgtacattgagatcgaaaagggagaggctgtgcaggaggagctactgaagggattagacaataagaacccaaaaatcatagtggcttgcatcgagacgctcaggaaagccttgagtgagttcggttctaaaattatcctgctgaagccaatcattaaggttttgcccaaactatttgaatcccgcgagaaggccgtaagagatgaggctaagctgattgcagtcgagatctatagatggatccgcgacgcattgcggccaccactccaaaatattaattccgttcagctcaaggaactcgaggaagaatgggtaaagcttccgacatcagccccacggccgacacgcttcctgcgttcccagcaggagctggaagctaagctagagcaacagcagagcgccggcggggacgcagaagggggcggcgatgatggggacgaagtcccacagatcgatgcttacgagttattggaggccgtcgaaattctgtcaaagctgcccaaggacttttacgataaaattgaagcgaagaaatggcaggaaagaaaagaggccctggaaagcgtggaggtgctgatcaaaaatccaaaactggaagccggagactacgccgacctggtaaaagccctgaagaaggtggtgggcaaggacactaacgtgatgctggtggccctggccgctaagtgtcttactgggttggccgttgggctgagaaagaaatttggccaatacgcaggtcacgtggttcctacgatcttggaaaaatttaaggagaagaaacctcaggtggttcaggccctacaagaagccatcgatgctatattcctcaccactaccctgcagaatataagtgaggacgtcctcgccgtcatggataacaagaaccctactattaagcaacaaactagtctctttattgctaggagttttagacactgtactgctagtaccctgcccaaatctctccttaagcccttctgcgccgcgctgctcaagcatattaatgactctgcacctgaggtgagagatgcggcattcgaggcactaggcacagctctgaaggtggtgggcgagaaagccgtcaaccccttcttagccgatgtggataaactgaaactggataaaattaaggagtgctcagagaaggtagagctaatccatggcaagaaagcgggtctcgccgctgacaagaaggagttcaagcccctgccaggaagaacagccgcctcaggagcagccggcgataaagacaccaaggatatctctgcccccaaacctggcccattgaagaaggcccctgccgctaaagccggagggcccccaaaaaagggaaaacctgccgcacccggcggtgccgggaacactggcacaaaaaataagaaggggttggagacgaaggaaattgtggaacccgaactttctatcgaggtatgcgaagagaaagcctcagccgtactaccccctacctgcatacaacttttggatagctcaaattggaaagagcggctcgcctgtatggaggagttccagaaagcggttgagttgatggaccgcaccgagatgccatgccaggctctggtccgcatgctggccaaaaagcccgggtggaaagaaaccaatttccaggtaatgcaaatgaagctccatattgtggctctgatcgctcagaaaggtaatttctcaaaaacctcagcccaggttgtattggacgggctggtggataaaatcggcgatgtgaaatgtggcaataacgccaaggaggccatgacagcaatcgctgaggcatgcatgcttccttggaccgccgagcaggtggtgtcaatggctttctctcagaagaatcctaagaaccagagcgagacactcaactggctgtccaacgccattaaagaattcgggtttagtggactgaatgtaaaagcttttatttcgaacgtcaagactgccctggccgccaccaatccagccgttcgaacggccgctatcacacttctgggcgtcatgtatttatacgtcggcccctctctgcgcatgtttttcgaggatgagaagccagcccttctgtcccagatcgatgccgaatttgaaaagatgcagggccagagcccgccagctcccacaagggggattagtaagcactcgacgtccggcacggatgaaggcgaggatggcgatgaacccgacgatggcagtaacgacgtggtcgaccttctgccacggacagagatatccgacaagatcacgagcgagctcgtttccaaaattggtgacaagaattggaaaatcagaaaagagggcctggatgaggttgctgggatcataaatgatgctaaatttattcagcccaatatcggagagttaccaacagccctgaaaggacggcttaatgattccaacaaaatcctggtccaacagactctcaatattcttcagcagctggccgttgccatgggaccaaacatcaagcagcatgttaagaacctgggtatccctatcattactgtccttggggattccaagaataatgtccgagccgcagcgctggccacagtgaatgcctgggccgagcagactggaatgaaggagtggttggagggagaggacctgtctgaggagcttaaaaaggagaacccctttttaaggcaagaacttctcggctggctggccgagaagctccctactctcagaagcacgcccacagatctcattctctgcgttccccatctgtattcatgcctggaagatcggaatggagacgttcggaagaaggctcaggatgccctgcctttctttatgatgcatctagggtacgaaaagatggcaaaggccacaggaaagttgaaaccaacctcaaaggaccaggtcctggcaatgctggagaaagctaaggttaatatgccagctaagccggcgccccccacgaaggccacaagtaagcctatgggagggtcggcccccgcgaagtttcagccagcctcagcgccggccgaagactgtattagcagctccactgagccaaaacccgacccaaaaaaggctaaggcgccaggcctgtcttccaaggctaaaagtgcccagggtaaaaagatgcccagtaaaacctcactgaaggaagacgaggacaagtctgggcccattttcatcgtagtccctaacggcaaagaacagcgaatgaaagacgagaagggtctcaaagtgctgaagtggaacttcacaacccctcgcgatgaatacatcgaacagctcaaaactcagatgagttcctgcgtggccaaatggcttcaggatgagatgttccatagcgactttcagcatcacaacaaagccctggcggtgatggtggaccaccttgagagtgagaaggagggcgtcatcggttgcctggacctaattctgaagtggctgaccctacggttcttcgacaccaatacatccgtgcttatgaaggccttagagtaccttaaactcctcttcaccttgctaagcgaagaggaatatcacttgacagagaatgaggcctcaagctttatcccataccttgtggtgaaggtgggtgagccaaaggatgttatccgcaaggatgtgagagccattttaaatcgcatgtgcttggtatacccggcctctaaaatgtttccctttatcatggaggggactaagtctaaaaatagcaagcagcgtgctgaatgtctggaggagctcggatgtctggtggagtcttacggcatgaacgtatgccagcctaccccaggcaaagctttaaaagagatcgccgttcatatcggcgatcgcgacaatgccgtgcgcaacgccgctctcaatactattgtgactgtctataatgtccatggcgatcaggtgttcaaactgattggcaatctgtctgagaaagacatgtcaatgttggaagagaggatcaaaagaagcgccaaaagaccttccgctgcccccatcaaacaagttgaagagaaaccgcagcgtgcacaaaatattagctccaacgccaacatgctgcgaaagggtcccgcagaggatatgagctctaagctgaatcaagcacggtccatgagcggtcaccctgaagccgcccagatggtgcgacgagagtttcagctcgatctcgatgaaatcgaaaacgataatggaaccgtaaggtgtgaaatgcccgaactggttcagcacaaactggatgatatctttgagccggtgttgatccccgagccaaagatccgcgccgtcagtccacatttcgacgatatgcactctaacactgcgtctaccataaattttattatttcccaggtagccagtggggatattaatacctccattcaggcacttacgcagctattccagatagaatcactggcgcgagaggcttccaccggtgtgcttaaggacttgatgcacggtctgattactctgatgctcgacagcaggatcgaggatctggaagaaggacaacaagtgattagaagcgtcaacttgctcgtagtcaaagttctcgaaaagagcgaccagaccaatatcctgtcagcactgctggtgctgctgcaggacagtctcttagccacagccagttcgcctaaattcagcgagctggtcatgaagtgtctatggcggatggtgcggctcctgcctgatacgatcaattccatcaatttggacagaattcttctggacatacacatctttatgaaagtatttccaaaggaaaagttaaaacagtgtaaaagtgaattccccatccggaccctcaaaaccctcctgcataccctttgcaaacttaagggccccaagattctggatcacctgactatgatcgacaataagaatgaatcagagctggaagcacatctttgtcgcatgatgaagcactctatggaccagactggttcaaagagcgacaaggaaactgaaaagggagcaagtcgcattgacgagaaatcatcaaaggccaaggtgaacgatttcctcgcggagatctttaaaaagataggatccaaagagaatactaaggagggtctggcggaactctatgaatacaagaagaaatactccgacgctgacatagagccgttcctgaaaaatagttcccagtttttccagtcttacgtggagagaggcctgagggtgatagagatggaacgtgagggtaagggccgcatttctacctccaccggcatatcgccccagatggaggttacatgtgtacccacccccacttccacggtcagtagcattggaaacacaaacggagaggaggtcggacctagcgtgtatctcgaacggctgaagatattgaggcagaggtgcgggctggacaatacaaaacaggatgatcgcccaccattgacctcactgctgtccaaacctgcagtaccaacagtcgcatcctccacagatatgctgcacagtaagctgagtcagctccgggaaagtcgcgaacaacatcaacactccgatctggactccaaccagacccacagcagcggaacagtcacctctagctcaagtacggccaacattgatgacttgaaaaagaggttggagaggataaagtcttcccgaaaatag

SEQ ID NO: 184612 - DNA, 906 bp, synthetic construct
  misc_feature 1..906: note = Description of Artificial Sequence: Synthetic coding sequence
  source 1..906: mol_type = other DNA
atgggcgacgacagcgagtggctgaagctgcccgtggaccagaagtgcgaacataagttgtggaaagcaaggttatctgggtacgaagaggccttaaaaattttccaaaaaataaaggacgaaaagtctcccgagtggtccaagttcctcggcctgattaaaaagtttgtgaccgatagcaatgcagtcgttcagctgaaggggctggaggctgcgctggtgtatgtggagaatgcacacgtcgccggcaaaacaaccggcgaggtcgtctccggggtcgtgtccaaggtttttaaccaaccaaaggccaaagccaaagaactgggcattgaaatctgtttgatgtacatcgagattgagaaaggggaggctgtgcaagaggagctcctgaaaggccttgataataagaatccaaagatcatcgtcgcttgtatagagactctgcggaaagcactgtcggaattcggcagtaagattatccttctgaagcctatcatcaaggttctgcctaaactgtttgagtcaagagagaaggccgttcgcgatgaggctaaactgatcgcagtggagatttaccggtggatcagggatgccttaagacccccattacaaaatatcaattcagtgcagctgaaggagctcgaggaggagtgggtgaaacttcccactagtgcaccacgccctactcgctttctcagaagccagcaggagctggaagcaaaactagaacagcaacagtccgcgggcggagacgctgagggaggcggcgacgatggggatgaggttcctcagatagacgcttacgagctcctggaggctgtggaaatcttgtctaagcctaaaacctttatgactaagcttcgacagaaaaacggcaaacgggagaaaaggccctggtcactatag

SEQ ID NO: 184613 - DNA, 6120 bp, synthetic construct
  misc_feature 1..6120: note = Description of Artificial Sequence: Synthetic coding sequence
  source 1..6120: mol_type = other DNA
atgggcgacgacagcgagtggctgaagctgcccgtggaccagaagtgtgagcacaaactgtggaaggctcgattatcaggctacgaggaagcactcaagatcttccaaaagatcaaagatgagaaaagccccgaatggtccaaatttctaggtcttatcaaaaagttcgttacggactctaacgctgtggtccagctaaaaggcctggaggccgctcttgtttatgtcgaaaacgcacatgttgcgggaaagacaaccggcgaagtcgtgtccggcgtcgtgagcaaggtattcaaccagcctaaggccaaagccaaagagctagggatcgaaatttgcctcatgtacatcgaaatagagaagggggaggccgtgcaggaagaattgctgaagggcctggacaacaagaatccgaagatcattgttgcatgtatcgaaacactgcgcaaagcgctgagtgaatttggaagtaagattatcctactgaaacccattatcaaagttctgcctaagctctttgagtcccgtgagaaggcagttagagatgaggccaagctcatagccgtggagatatatcgatggatcagggacgctctgcgccccccattgcagaatatcaactctgtccagctgaaggagttggaggaggagtgggtgaaacttcccacaagcgcgccacggcccacacggtttctgagatcgcagcaagagctcgaggctaagttggaacagcagcagagcgcaggaggcgatgcagaggggggaggtgatgatggcgacgaagtgccgcagatcgacgcctacgaactgctggaagctgtagagattctgagcaagctgcccaaggacttctatgataaaattgaggccaagaaatggcaggagcggaaagaagccttagagtctgtggaagtgctgataaagaaccccaagcttgaagccggcgattatgctgatctggttaaggccttgaaaaaggttgtgggtaaagacaccaatgtgatgctggtggcattggctgctaagtgcctgacagggcttgcagtgggactacggaagaagttcgggcaatacgccgggcacgttgtccccactatcctggagaagttcaaagaaaaaaagccccaggttgtacaggccctccaagaggcgattgacgcaatcttcctgaccacaacattgcagaacattagcgaggatgtcctggccgtgatggataacaagaatcctaccatcaagcagcagacctcactgttcatcgctcgcagcttccggcactgcactgcttccaccctgcctaagtctcttctgaaacctttttgcgctgctcttctgaaacatattaatgactcagcccctgaagttcgggacgcagcctttgaggctttaggcaccgcgctgaaagtggtaggtgagaaggcagtgaatccttttctagcagacgtggataaactgaagcttgataaaattaaagagtgctcggaaaaagtggagttaatccacggaaaaaaggctggtctcgcggcagataagaaggaatttaaaccactccctggaaggactgccgcaagcggtgccgccggcgacaaggacaccaaagacatatcagccccaaagccaggccccctgaagaaagcgcccgcagccaaagccggtggtcctcctaaaaagggaaaaccagcagctcctggaggtgccgggaatactggcaccaaaaacaagaaagggttggagacaaaggagattgtagaacccgaattgagcatagaagtctgcgaagagaaagcttccgccgtactgcctccaacatgcatccagctactggattcgagcaactggaaagagcgtctcgcatgtatggaggaattccagaaagctgtagagctgatggatagaaccgagatgccctgtcaggccctggtcagaatgttggcgaaaaagcctgggtggaaggagactaactttcaggtgatgcagatgaagctgcacattgtggctttaattgctcagaaaggaaacttcagtaagacatcggctcaggtcgtgctggatggactggtagataaaattggagatgtgaaatgcggaaataacgccaaggaggcaatgaccgccattgccgaggcctgcatgctgccatggactgccgagcaggtagtctcgatggcattttctcaaaaaaatcctaagaatcagtcggagacgctcaattggctgagcaatgcaatcaaggagtttggcttcagcggactgaacgtgaaagcctttatctccaatgttaagaccgccttggcagccaccaaccccgccgtacggaccgctgccattaccctgttgggagtaatgtatctatacgtagggccgtctctgcggatgtttttcgaggatgagaagccagcacttttgagccagattgatgctgagttcgaaaagatgcagggccagagccctccagcacccacgagggggatttcaaagcattctacatcagggacagacgagggggaggatggcgacgagcccgacgacggctccaacgatgtggtggacctcctgccacggaccgagatcagcgacaaaataacaagtgaattggtgtctaaaatcggcgacaagaattggaaaatcaggaaggagggactggacgaggtggctgggatcataaacgatgccaaatttattcagccaaacattggagaacttcctactgcacttaagggtagattaaatgattcaaacaaaatcctcgtgcagcaaacccttaatatcttacagcagttagcagttgctatgggccccaacatcaaacagcacgtcaagaatctcggaatcccgatcatcacggtgctgggggattctaagaataatgtgcgtgccgcggcactggccaccgtcaacgcttgggctgagcaaactggtatgaaagagtggttagagggcgaagatctgtccgaagagcttaaaaaggagaatcctttcctcagacaggaattacttggatggctggccgaaaaactgcctacgttacgatccacccccacggatctgatcctctgtgtgccacatctctactcctgcctcgaggatcgcaacggagacgtgagaaagaaggcccaggatgcactacctttctttatgatgcatctggggtacgaaaagatggcgaaagctactggcaaactcaagccgacctccaaagaccaggttttggctatgttggagaaagccaaagtaaatatgccagccaaaccagcccctcctacaaaggctaccagcaagcctatgggcggcagtgcgcctgccaagttccagccagcatcggccccggctgaagactgtatatccagctccacagaaccaaagcccgatccgaaaaaagccaaggcacctggattatctagcaaggccaaatctgcccagggcaaaaaaatgccttcaaagacttcccttaaggaggatgaagataaaagtgggcctatctttatcgtggtgcccaacgggaaggaacaaagaatgaaagatgaaaaaggtctcaaagtgttgaaatggaacttcacaaccccacgcgacgagtacatagaacagctgaagacccagatgtcttcctgcgttgctaagtggctccaggacgagatgttccactcagattttcagcatcacaataaagcactcgccgtcatggtagaccatctggaatcagagaaggagggcgtaatcggatgtttagatctgattctcaaatggcttaccttgaggttttttgacacaaatacctctgtgctgatgaaggcgctcgaatacctgaagctgctgttcaccctgctgagcgaggaagaatatcacttaactgaaaacgaagccagttccttcatcccctacctcgtggtgaaggtcggtgaacccaaggatgtcatcaggaaagacgttcgcgccattctaaatcgcatgtgtcttgtgtatcccgcgtccaagatgtttccatttataatggaggggaccaagtcgaagaactctaagcagagagctgaatgtctcgaggagttgggctgtttagtggaaagttacggaatgaacgtctgccagcccacaccgggcaaggccttaaaagaaatagccgttcacattggagatagagataacgctgtacgcaacgcagccctcaataccatcgtaacggtgtacaacgtgcatggtgatcaggtgtttaagttgataggcaacctgagcgagaaagatatgagtatgctcgaggaacggatcaaacgcagtgccaagcgcccttcagcagctcctattaagcaagttgaagaaaagccccagcgcgcccagaatatttctagtaacgccaatatgctgcgcaagggtcctgcagaagacatgagctccaagctcaaccaggctcgcagcatgagcgggcatccggaggcagcacagatggtgaggcgggagttccaactcgacctggacgagatcgagaacgataatggtaccgtgcgctgcgagatgcctgagctcgtgcaacacaagttggacgacatcttcgaacccgtgctcatccccgagccaaaaataagggcagtgtctccgcactttgatgacatgcattctaacaccgcgagcacgatcaacttcataatcagtcaggtggcctccggcgacatcaacacttccatacaggctctaacgcagattgacgaggtactgaggcaagaggataaggcagaagccatgtccgggcacatcgatcaatttttaattgccactttcatgcagctgagactgatttacaatacgcatatggctgatgagaaactcgaaaaagacgagattatcaaattatatagttgtattatcggtaacatgatttctctgtttcaaatcgaatcacttgcaagggaggcttccaccggagttttgaaggacctgatgcatggcctcataacactcatgttagactccaggatcgaggacttagaagagggacaacaggtgattcgctctgtgaacctcttggtagtgaaggtcttagaaaagtccgaccaaactaatatcttaagtgccctcctggtgctgttacaagactctctcctcgccactgcatctagccccaagttctccgagctggtgatgaaatgcctgtggcgtatggtcagactgctccctgacacaattaatagcatcaacctggatagaatcttgctggacattcacatcttcatgaaagtcttccctaaagagaaattgaaacagtgcaagtcagagttccctatcaggacactgaagaccctattacacaccctgtgcaagctgaaaggtccaaaatcctgtatgtgcttgccccagatattagaccaccttactatgatcgataataaaaatgaatctgagctagaggcacacctgtgtagaatgatgaagcatagcatggaccagactggaagcaagtctgacaaagaaacagaaaagggagccagcaggattgatgagaagagttctaaagccaaggttaatgacttccttgctgagattttcaaaaaaatcggctcgaaagaaaacaccaaagaagggctggcagagttgtatgagtacaaaaaaaagtacagcgatgccgatattgagccattcttgaagaatagttcccagttctttcagtcctatgtcgaacgtggattgagggtaattgaaatggagcgagagggcaagggtcgaatctctacatcaacaggcatctccccccagatggaggtcacttgcgtgccaacgccaacaagcactgtttccagtattgggaatacgaacggcgaggaagtggggccgagcgtctatctggagcggttgaaaattctgaggcagcgctgtggactggacaacacaaaacaggatgaccggccacctttaacgtctttgttatctaagccggccgttcctacagtagcaagctctacagatatgctgcattccaaactgtcccaactgagagagagccgcgaacagcatcaacacagtgacctggacagcaaccaaacgcatagtagcggaacagttacttcctccagctcgaccgctaacattgacgacctcaaaaagaggctggaacgcatcaagtcttctcgcaagtag

SEQ ID NO: 184614 - DNA, 456 bp, synthetic construct
  misc_feature 1..456: note = Description of Artificial Sequence: Synthetic coding sequence
  source 1..456: mol_type = other DNA
atgggcgacgacagcgagtggctgaagctgcccgtggaccagaagtgtgagcataagctatggaaggcacgactttccgggtacgaagaagctcttaaaatctttcagaagatcaaggacgagaaatcccccgagtggagcaagttcttgggactcatcaaaaaattcgttaccgattcaaatgccgtggtgcaattgaagggcctagaagccgccctcgtatatgtggagaatgctcacgtcgcaggtaagacaaccggcgaggtcgtatccggcgtggtgagcaaggtgttcaatcaacctaaagccaaggctaaggaattagggatcgagatctgtctgatgtacattgagatcgagaagggagaggctgtccaagaagagctgctcaagggactggacaacaagaaccccaaaattattgttgcttgcatagaaactctgcgcaaggcatag

SEQ ID NO: 184615 - DNA, 6099 bp, synthetic construct
  misc_feature 1..6099: note = Description of Artificial Sequence: Synthetic coding sequence
  source 1..6099: mol_type = other DNA
atgggcgacgacagcgagtggctgaagctgcccgtggaccagaagtgcgagcataaactgtggaaggctcgtcttagtggctacgaggaggcgctgaagatcttccagaaaatcaaagacgagaagtctcctgaatggtccaaattcttgggtctgattaagaagttcgtcaccgattccaacgcagtggtgcagttgaaaggcttggaggctgccttagtgtatgtcgagaacgctcatgttgccggaaagacaacaggcgaagtagtgtctggggtcgtgagcaaagtgtttaaccaaccaaaggccaaagcgaaggaactgggcatagagatctgcttgatgtacatcgagattgagaagggtgaagctgtgcaggaagagcttctcaaaggattggataataaaaaccctaaaattattgtcgcttgtattgaaacactgcgaaaagctctgtctgaattcggcagtaaaatcatcttattaaagcccatcatcaaagtgctgcctaagttatttgagtctagggaaaaggccgtcagagacgaagctaagctgatcgctgtggagatttaccggtggattcgggatgccctccgcccccccctgcagaacatcaattcagtgcagctgaaagagctcgaggaggagtgggtgaagctaccaacttcagcacctcgaccaacgcgctttctccggtcccagcaggagctggaggctaagctggagcagcaacagtcagcggggggggacgccgaaggcggaggtgatgatggggatgaggtcccgcagatcgacgcatatgagcttttagaagcagttgaaatcctctccaaacttccaaaggacttctacgataaaattgaggcaaaaaagtggcaggaacgtaaagaagccctggaatccgtggaggtgctcattaaaaatcctaagctggaggccggggattatgctgacctcgtaaaggccctgaaaaaggtagtgggtaaggatacaaatgtgatgctggttgccctcgccgctaagtgccttactggactggcagttgggctacggaaaaaatttggacaatacgccggccatgtagttcccactattttggagaagtttaaggaaaagaaaccccaggtggttcaggccctccaggaggccattgacgctatttttctcaccactacacttcaaaatatatccgaagatgtcctggcagtcatggacaacaaaaatccaaccatcaagcagcagaccagtttgtttattgctcggagttttcgccattgcactgcaagtaccctgccaaagagtctcctgaagccattctgcgcagccttactcaagcatataaacgactcagccccggaggtcagagacgctgcctttgaggctttgggcacagcgctgaaagtcgtcggcgagaaggctgttaaccccttcctggctgatgtggataagctgaaacttgacaagattaaagagtgctccgagaaggtggaattaattcatggtaagaaggctggtctagcggcggataagaaggagttcaagcccctgccaggccggactgccgcaagcggtgcagcaggagataaagacacgaaggacatttccgcccctaagcctggtccgctgaaaaaagcacccgctgccaaggcaggggggcctcctaaaaaaggaaaaccagccgccccggggggggctggcaataccggcacaaaaaacaagaagggcctcgagaccaaggagatcgtggagcccgaattgagcatcgaagtctgcgaggagaaagcttccgcagtcttgccaccaacttgtatccagttattagatagttcaaattggaaggagagacttgcgtgtatggaggaattccagaaggccgttgaactgatggatagaacagagatgccatgccaggcacttgtgcggatgctggccaaaaagcccggctggaaggagacgaattttcaggtgatgcaaatgaaattgcacatcgtcgcccttatcgcacagaagggaaacttttcaaaaactagcgcccaggtcgttttggacggtctggtcgataagataggagacgtgaagtgcggcaataacgctaaagaggcgatgactgctattgctgaggcttgtatgttgccgtggacagcagagcaggtggtctcaatggccttttcacagaaaaacccgaagaaccagagtgaaaccctgaactggctgtctaacgccatcaaagagttcggcttttctggcctgaatgtcaaagcatttataagcaacgtgaaaacagcacttgctgccacgaaccccgctgtccggacagccgcgatcactctcctgggtgtcatgtacctctatgtgggacccagcctccgcatgtttttcgaagacgagaaaccagcacttctatctcagatagatgcagaattcgaaaaaatgcagggacagtcccccccagcaccaacccgtggcatctctaagcattctacctccggcacagacgaaggggaagacggggacgagccagacgatggtagcaatgatgtggttgacctgctccctaggaccgagatctcagataaaattaccagtgaactcgtatcaaaaattggagataaaaactggaagattcggaaggagggattagacgaggtagcgggaattataaacgacgccaagttcatacagcccaacattggcgaactgcccacagccctgaagggccgcctcaacgatagcaataagattcttgtgcagcaaacattgaatatcctccaacagctggcagtggctatgggtcctaatatcaaacagcatgtgaaaaatctcggtatcccaatcatcactgtgctgggtgattcgaagaacaatgtccgagccgctgccctggccaccgtcaacgcctgggctgagcagaccggtatgaaggaatggctcgagggggaggatcttagcgaggagcttaaaaaggagaatcctttcctgaggcaggagctcttaggctggctggccgaaaaattacccacgctgcgcagcacccccactgacctcattctgtgtgttccgcacctttactcctgtttagaggatcggaatggagacgtccgtaagaaagcccaggatgccttgcccttcttcatgatgcaccttggttacgagaagatggctaaggcaacagggaagttaaaaccgacttcaaaagaccaggtgttggctatgttggaaaaagcaaaggtaaacatgccggccaaaccagccccgcctacgaaagctacgagcaagcctatgggaggaagcgcacctgcaaaattccaacctgcatctgccccggctgaggactgtatctctagttccacagagccaaaaccagaccctaagaaagccaaagcaccgggactctccagtaaagcaaaaagtgctcaggggaagaaaatgccaagcaaaacctcattgaaagaagatgaggacaagtccgggccaatctttattgttgtcccaaatggcaaagagcagcgtatgaaggatgagaagggtttgaaagttttaaagtggaacttcacaactccccgggatgagtacattgagcagctgaagacccagatgagctcctgcgtggccaagtggctgcaggacgagatgtttcactctgacttccagcaccataataaggccttggctgttatggtggatcatctggagagcgagaaagaaggagtgataggctgcctcgacctaatcctgaagtggcttaccttacgcttctttgacacaaacaccagcgttctgatgaaggcattggagtatctcaaactcctgttcaccttgttgagcgaagaagaatatcacctgactgaaaatgaagcgtcctcttttataccttatctggtcgtcaaggtaggggagcctaaagatgtcattaggaaggatgttagagccatcctaaatcgtatgtgcctggtatacccagcttccaagatgtttccattcatcatggagggaaccaagagcaaaaatagtaagcagcgggccgaatgtttagaggaattggggtgccttgtggaaagctacggtatgaacgtgtgtcagccaactcccgggaaggctttgaaagaaatcgctgttcacattggtgatcgcgacaacgccgtgcgtaatgccgccctgaacaccattgtgaccgtgtacaatgtccacggtgaccaggtgttcaagcttatagggaatctgagtgaaaaagatatgtccatgctagaggaaaggattaagcggagcgctaagcggcccagcgcagcccccatcaaacaagtggaagaaaagccccaaagggcgcagaatatttcttcgaatgcaaacatgctgcgcaaaggaccagcagaagatatgtctagcaaacttaaccaggctcgttcgatgagcggacaccccgaggctgcacagatggtgagaagggaattccagttagatctcgacgaaatcgagaacgacaacgggaccgtgaggtgtgaaatgcctgagctcgtgcagcataagttggatgacatcttcgaaccagtgctaatacccgagccgaagattcgcgctgtctctccgcatttcgatgacatgcatagcaacaccgcaagcaccattaatttcataatttcacaggttgcctctggagacatcaatacatccatacaagctcttactcaaattgatgaggtcctccgtcaggaggataaggcagaagccatgagcggccacatcgatcagttccttatagcaacatttatgcaattgcggctcatctataatactcatatggcagacgaaaaactggaaaaggatgagatcatcaagctgtacagctgcataatcggcaatatgataagcctattccaaatcgagagcttagcgagggaggcatcaaccggtgttctaaaggacctcatgcatggtctgattactttgatgctggatagcaggattgaggacctggaagaagggcaacaggtgatccgtagcgttaacttgctagtcgtgaaggttctggagaaaagcgatcagacgaacattctatcagctttgttggtactactgcaggattctctgttggcgactgccagtagccctaagttttcagaactggtaatgaagtgcctatggagaatggtccgcctgctcccagacaccattaattcaataaacttggatcgaatcttgcttgatatccatatctttatgaaggtttttccaaaggagaagctcaagcaatgtaaatccgaatttcctattcggacactgaaaactcttctgcataccctctgcaaattgaagggtccaaaaatactggaccacttaacaatgatcgataacaagaacgaaagtgaactggaagcacacctctgtagaatgatgaaacactcaatggatcagaccggttctaagtcagacaaagagactgaaaaaggtgcatctaggatcgatgaaaagagctctaaggctaaagtgaatgacttcctggccgagattttcaaaaaaatcggatctaaggaaaacactaaagaaggattggcagagttgtacgaatacaagaaaaaatactctgacgcggacattgaaccctttctcaagaattcctcacagtttttccaatcctacgtggaaagaggcttgcgtgttatcgaaatggaacgggaaggaaaaggccgaatctcaacaagtacaggcattagcccacagatggaggtgacttgcgttccaacaccgacgtcaaccgtttcttcgatcggaaatacaaatggagaggaagtgggtcctagtgtgtacttggaacggttaaaaatcctgagacaaagatgcgggcttgacaacaccaaacaggacgatcgcccacccctcacgtccctgctctcgaaacccgctgtgccaactgtcgcctctagtaccgacatgctgcacagtaagctgagtcagctccgggaaagcagggagcagcaccagcactctgacttggattctaaccagacgcactcctctgggacagtgacatccagcagttcaacggctaacattgacgacctcaagaaacgcctggaacggattaagtctagccgcaagtag

SEQ ID NO: 184616 - DNA, 1020 bp, synthetic construct
  misc_feature 1..1020: note = Description of Artificial Sequence: Synthetic coding sequence
  source 1..1020: mol_type = other DNA
atgaaggacagcctggtgctgctgggccgggtgcccgcccaccccgatagcaggtgttggtttttagcatggaaccctgctgggacccttctggcatcctgcggcggtgatcgccgcattaggatttggggcaccgagggtgacagttggatctgtaagagtgttctctccgaagggcatcagaggactgtgcgcaaagtggcctggtccccttgtggtaattacctggcgagtgccagcttcgacgctaccacttgtatttggaaaaagaatcaggacgacttcgagtgtgtaactacattggaagggcatgaaaatgaagtcaagtccgtcgcctgggctccttcaggcaatctcctagcaacgtgttcacgcgataagagcgtttgggtgtgggaagtggacgaagaagacgagtatgaatgcgtctccgttctcaactcacacacacaagacgtgaagcacgtcgtctggcatcccagccaagagctgcttgcatcggcctcgtatgatgataccgtaaaactgtaccgcgaagaggaggatgattgggtctgttgtgctacactcgagggtcacgaatcaacagtatggagtttagcttttgaccctagtggccagcggttagcaagttgtagcgatgatagaaccgttagaatctggcgacagtacctgccggggaacgagcagggagttgcttgctcaggatctgatccctcctggaagtgcatttgtacactgtcgggattccattcccgcacaatctatgatatcgcctggtgccagctgacgggagctcttgccacagcatgtggagacgacgctattcgtgtgttccaagaagatcccaattctgacccgcagcagcctaccttttcattaactgcacatctgcatcaggcccattcacaggacgttaattgcgttgcgtggaatcctaaggagccaggtctgttggcatcatgctctgacgacggcgaggtcgccttttggaagtaccagcggcctgaggggctgtag

SEQ ID NO: 184617 - DNA, 1380 bp, synthetic construct
  misc_feature 1..1380: note = Description of Artificial Sequence: Synthetic coding sequence
  source 1..1380: mol_type = other DNA
atggccgccagcggcgccgtggagcccggcccccccggcgccgccgtcgcaccctctccagctcccgccccacccccagcgccagaccacctcttccggccgatcagcgccgaggatgaggaacagcagccaacagagattgagtccctgtgcatgaactgctattgcaatgggatgacacgcctcctcctcaccaagataccattcttccgcgagatcattgtgtcatccttttcctgcgagcattgtggatggaacaacacagagatacagtccgccggccggatccaggatcaaggcgtgagatatacacttagtgtccgagctctcgaggatatgaatcgtgaagtggtgaagaccgactccgcagccaccaggatcccagagcttgactttgagatccctgccttttcccagaagggtgccctgacaacagtggagggtctcattacccgcgccattagcggcttagagcaagatcaacccgcgagaagggctaacaaggacgccacagcggagagaatcgatgagttcattgtgaagcttaaagagctgaaacaagtagccagcccattcacactcatcatagacgatccatcaggtaacagctttgttgagaacccgcacgctccccagaaggatgatgcactggtgattacacattacaatcgtacgagacaacaggaggagatgttaggactccaggaggaggctcctgccgaaaaaccagaggaagaggatcttcggaacgaagtccttcagttttccactaattgcccagagtgcaacgctcccgcccagaccaacatgaaattggtgcagataccacattttaaagaggtgatcataatggccaccaactgcgagaactgtgggcacaggaccaacgaggtgaaaagcgggggtgctgtggagcctctcggcacacgaattacactgcatattacggacgcctcagacatgacccgcgacctactcaagtctgaaacctgttccgtggagatccctgagctggagttcgagctaggaatggctgtgcttggaggcaagtttacgacccttgagggcctgctgaaggacatccgcgaactagttaccaagaatccttttaccctgggggatagttcaaatcccggccagactgaaaggctgcaagagttcagccaaaagatggatcagataatagagggcaacatgaaggcacattttattatggacgatcctgccgggaattcctacctgcagaatgtgtacgcacctgaagacgaccccgaaatgaaggttgaacgttataagcgcacatttgatcaaaacgaagaactgggcctgaatgatatgaaaacggagggctacgaggccggcttagcgccccagcggtag

SEQ ID NO: 184618 - DNA, 585 bp, synthetic construct
  misc_feature 1..585: note = Description of Artificial Sequence: Synthetic coding sequence
  source 1..585: mol_type = other DNA
atgtgggtgaagctgctgagcatcgtggccgagttctgcttcagccctttcctggtcacggacgaggaaacagctagcgacgctcttgagcggaattctctttcttcacaggatccgcagcagcccacatcaactgtgtccgtgaccgaggatagctccacctccgagatcgacaaagaggagaaagagcagaccacccaggatccagacctcaccacagaggccaacccccagtatcttggactcgctagaaaaaagtcaggtatcctgttgttaactttagttagttttctaattttcatcctttttatcatcgttcagctgtttatcatgaagctcagaaaagcccatgtgatctggaaaaaagaaaatgaggtctcagagcacaccttggaaagttaccgatctcggagcaataatgaagaaacctctagcgaagagaagaacggtcaatccagtcatcctatgaggtgcatgaactatatcaccaagctgtattcggaggctaagacaaagcggaaagagaacgtgcaacacagtaagctggaggagaaacatatccaggttcctgaatctatcgtctag

SEQ ID NO: 184619 - DNA, 525 bp, synthetic construct
  misc_feature 1..525: note = Description of Artificial Sequence: Synthetic coding sequence
  source 1..525: mol_type = other DNA
atggcctgcctgggcttccagcggcacaaggcccagctgaacctggccactagaacttggccttgcacgctgctgttcttccttctgtttatacccgtattttgcaaagccatgcacgtggcccagccagctgtggttctcgcgtcttcaagaggcattgcctcattcgtgtgtgaatacgcctccccgggcaaggccacagaggtcagagtgactgtgctgcggcaggcagatagtcaagtcaccgaggtgtgcgccgctacatatatgatgggaaacgaattgacgttcctggatgatagcatttgcacagggacatcttctgggaatcaggtcaatctcacaatccaagggttgagggcaatggataccggactgtatatctgtaaggttgagcttatgtacccacctccgtattatttaggtatcgggaatgggacgcaaatatacgtgatagcgaaggagaagaaaccctcatacaatcgaggactctgcgaaaacgcaccaaatcgggctaggatgtag

SEQ ID NO: 184620 - DNA, 672 bp, synthetic construct
  misc_feature 1..672: note = Description of Artificial Sequence: Synthetic coding sequence
  source 1..672: mol_type = other DNA
atggcctgcctgggcttccagcggcacaaggcccagctgaacctggcgacacgaacctggccgtgcaccttgctgtttttccttctgttcattccagtcttctgtaaagccatgcatgtagctcagccagctgtggttttggccagcagcagagggatcgcatcattcgtgtgtgagtacgcctcacccggtaaggccactgaagtgcgagttaccgtacttaggcaggcggatagccaggttactgaggtgtgcgccgccacgtatatgatgggcaacgagctaacatttctggatgactctatttgcacaggaacctctagtggcaaccaggtgaatctaacaattcaggggctgagggctatggatactggcctgtacatctgcaaagtcgagcttatgtacccacccccttattatctcgggatcggaaatggaacgcagatttacgtgattgatccagagccatgccctgactctgacttcctgctgtggatccttgctgcagtttcctcaggattgttcttttattcattcctactgactgcggtctccctctccaagatgctgaagaaacgctcgcctctaacaaccggggtgtacgtgaaaatgccccccacagagccagagtgcgagaagcaatttcagccctactttatcccgatcaactag

SEQ ID NO: 184621 - DNA, 414 bp, synthetic construct
  misc_feature 1..414: note = Description of Artificial Sequence: Synthetic coding sequence
  source 1..414: mol_type = other DNA
atgcacgtggcccagcccgccgtggtgctggccagcagccggggcatcgccagcttcgtttgcgaatacgcttctcccgggaaggctacagaggtgagggtaaccgttctgcgccaggccgattctcaggttaccgaagtgtgcgctgctacgtacatgatgggaaatgaactaacctttctcgacgactcgatttgtactggcacaagcagtggcaatcaggttaatctaaccatccagggcttgcgcgccatggatactgggctatacatatgcaaagtggaattgatgtaccctcccccttactacctaggtatcggcaatggtacacaaatctatgtcatcgcaaaggagaagaagccttcatacaaccgaggactgtgcgaaaacgcaccaaatagagctagaatgtag

SEQ ID NO: 184622 - DNA, 171 bp, synthetic construct
  misc_feature 1..171: note = Description of Artificial Sequence: Synthetic coding sequence
  source 1..171: mol_type = other DNA
atggcctgcctgggcttccagcggcacaaggcccagctgaacctggctactcggacatggccctgcacattgctcttcttcctgctatttattcctgttttctgtaaggtgccccccaccgagcccgagtgcgaaaaacagtttcagccctacttcattccaattaactag

SEQ ID NO: 184623 - DNA, 660 bp, synthetic construct
  misc_feature 1..660: note = Description of Artificial Sequence: Synthetic coding sequence
  source 1..660: mol_type = other DNA
atggccagcgccggcgacacccaggccggcccccgggacgccgccgaccagaactttgactatatgttcaagctgttgctcataggaaatagtagcgtgggcaagaccagctttctgtttaggtacgctgatgattctttcacacctgcattcgtcagcaccgtcggtattgactttaaggtgaagacagtctatcgtcacgacaaacggattaagctgcagatatgggacaccgccggtcaggaacgatacaggactattactaccgcctactataggggagcgatgggttttctgctcatgtacgacattgcaaaccaggagtcctttgcagccgtgcaggactgggctactcagataaagacctattcctgggataacgcccaggttatacttgtggggaataagtgtgatttagaagacgagcgcgttgtgccagccgaagacggtcgccggttggcagatgatctcgggttcgagttcttcgaagcatcagccaaggaaaacataaatgtgaagcaagtgtttgagagattagtggacgtgatctgtgagaagatgaatgagtcgctcgaaccctcaagtagctccgggagcaacggcaaaggacccgcggttggcgatgcgcccgccccacagcccagctcttgtagttgctag

SEQ ID NO: 184624 - DNA, 1566 bp, synthetic construct
  misc_feature 1..1566: note = Description of Artificial Sequence: Synthetic coding sequence
  source 1..1566: mol_type = other DNA
atgctgccccggcggcccctggcctggcccgcctggctgctgcggggagcacctggggccgctgggagttggggccggccagtcgggccacttgctcgacgtgggtgctgttctgcacctgggaccccagaggtgccgctcacaagagaaaggtacccggttagaagattgccatttagtacagtcagtaaacaggacctggccgcgtttgaacgaatcgtccctggaggcgtagttactgaccctgaagcactgcaggcccctaatgttgactggcttcgtaccctacggggttgctccaaagttctattgcggccccgcacgtctgaagaggtgtcacacatcctgcgccactgccacgagagaaacttagcagttaatccccagggcgggaacaccgggatggttgggggatcagtgcctgtgtttgacgagatcatactttcaaccgcccggatgaatagagtcctgtcgtttcacagcgtgagtgggatcctagtgtgccaggctggctgtgttctcgaagagctgtcaagatatgtcgaggaacgggacttcatcatgccattagacctgggggcaaagggatcatgccacattggtgggaacgtcgctaccaacgctggaggattaaggttccttagatacgggagtttgcacggtaccgtgctaggactcgaagtcgtccttgctgacgggaccgtccttgattgcttaaccagcctcaggaaagacaacaccgggtacgacctgaaacagctctttatcggtagtgaaggcacgctgggcatcatcaccacggtgtctattttatgtcctcctaaaccgcgggccgtgaacgttgcctttctaggatgtcctggcttcgccgaggtgctgcaaactttctctacatgtaaaggaatgctcggggagatcttatccgcattcgagtttatggacgctgtgtgcatgcaattggtcggtcggcatctccatctggcctcaccagtgcaagagagccctttctacgtcttgatcgagacctctggctctaacgccggccatgacgccgaaaagctgggccactttctggaacacgcactaggcagtggtctcgtgacagacggaaccatggccacagatcaacgaaaagttaaaatgctatgggctctgcgcgagcgcattacggaagctttaagcagggacgggtatgtgtacaaatatgatctatcgctgccggtggagcgcctgtacgacatcgtcaccgatctccgagctcggctgggccctcatgccaagcacgtggtcggatacggccaccttggggatggcaatctccacctgaatgtgactgcagaggccttcagccccagccttctcgccgccctggagccccacgtgtatgaatggacagctggtcagcagggttcggtttctgctgagcatggagttggctttcgcaaacgggatgttcttggctacagcaaaccgcccggggctcttcagctgatgcagcagctcaaggcactcctcgatcctaaagggattctaaacccctacaagaccctgccatctcaagcctag

SEQ ID NO: 184625 - DNA, 960 bp, synthetic construct
  misc_feature 1..960: note = Description of Artificial Sequence: Synthetic coding sequence
  source 1..960: mol_type = other DNA
atgctgccccggcggcccctggcctggcccgcctggctgctgcggggagctcccggcgctgccggatcttggggccgccctgtcggaccgctcgcccggcgaggctgttgctccgcgccaggcacacccgaagttccactgactagagagagatatcccgtacggaggttacccttcagcactgtatccaaacaggacctagccgccttcgaacgaattgtgccaggcggtgtggtgaccgacccagaggccttgcaggctcccaatgttgactggctgagaactctgcgcggttgcagcaaggtgctgctgcggccacgtacctccgaagaggtgtcccacatcctgaggcactgccacgagagaaatctggccgttaacccgcaaggggggaacaccggaatggtgggcggcagcgttccagtgttcgacgagataatcctctcaactgcacgtatgaaccgagtcctgagtttccattccgtctctggtattctcgtgtgccaggcggggtgcgtactcgaggagctctcccgatacgtggaagagcgtgatttcataatgccccttgacctgggcgctaaaggatcctgtcatattggcggaaatgtggccactaatgccggagggctaaggtttttgcgttacgggtccctacatggcaccgtcctcgggctggaggtcgtgcttgcagacggaaccgtactcgattgtcttacgagcctgagaaaagataatactgggtacgacttaaagcaactattcattggttctgagggaaccttaggtatcataactacagtgagtattctctgtccgccaaaaccacgggcagtcaatgtcgcctttctcgtgacctgcgtcccccccgcctgcgggccaggatcccctagaccagcacgtctgccgcaccctgcattgcggacaccaggcgtgtgcccgcagcctctcaggctttag

SEQ ID NO: 184626 - DNA, 1164 bp, synthetic construct
  misc_feature 1..1164: note = Description of Artificial Sequence: Synthetic coding sequence
  source 1..1164: mol_type = other DNA
atggtgggcggcagcgtgcccgtgttcgacgagatcatcctgagcaccgcacgcatgaatcgtgtgcttagtttccacagcgtaagtggcatcctcgtgtgtcaagctggatgtgtcttggaagaactgtcccggtatgttgaggaacgggattttatcatgccactcgacctcggggccaagggaagctgccatatcgggggcaacgtggctactaatgccggtggcctgcgattcctgagatacgggagcctccatggcacggtgctggggctcgaagtggtgttagccgacggaactgtgcttgattgcctgacatcactgcgcaaggataacaccggttatgacttaaagcagcttttcatcggaagcgaggggacgctgggcattatcacaaccgtctccatcctttgcccacctaaaccacgcgccgtgaacgtggccttcctcggatgcccaggctttgcagaggtcctccaaactttcagcacctgcaaaggaatgctcggcgagattctgtctgcctttgagttcatggatgcagtttgtatgcagttggttggccggcacttgcacctggcctcgccagtgcaggagtcgccgttttatgtgctgatcgaaacctctggatccaatgccggtcatgatgctgagaagctgggacattttctggagcatgcccttggaagtggtttggtcaccgacggcaccatggccacagaccagcgaaaggtaaaaatgctgtgggcgcttcgggaacgcatcacagaggccctgtccagagacgggtacgtgtacaagtatgatttgtctttgcccgtggaaaggctttatgacatcgtgactgacctgcgggccagactgggcccccacgccaaacatgtcgtgggctatggacatttgggggacgggaacctacatctgaatgttaccgctgaggcattcagtccgagcctgctagcagctctggaaccacacgtctatgaatggaccgccggacaacaggggagtgtgtctgccgaacatggggtgggcttccggaaacgcgatgttttgggatatagcaaaccacccggcgccttgcaacttatgcagcagctcaaggctctgctggatccaaaaggaatcttaaacccttacaaaaccttaccatcccaagcatag

SEQ ID NO: 184627 - DNA, 978 bp, synthetic construct
  misc_feature 1..978: note = Description of Artificial Sequence: Synthetic coding sequence
  source 1..978: mol_type = other DNA
atgctgccccggcggcccctggcctggcccgcctggctgctgcggggtgctcctggcgctgcggggtcctggggccggccagtgggcccccttgcccgtcggggttgttgtagtgcacctggtacgcctgaggtaccgttgacccgagaaagataccctgtccgccgcctgcctttttccacagtgtccaagcaagacctggccgcattcgagcggatcgtccccggcggagtggtcactgaccctgaggctctacaggcgccaaatgtagattggttaaggaccctgcggggatgctccaaagtgttactgcggccccgaaccagtgaagaagtttcacacatactccgacactgccatgaaagaaatctagctgtgaaccctcaggggggtaatactggaatggtgggcggctcagttcctgtgttcgacgaaatcatactttccactgccagaatgaaccgtgtattgagcttccactcagtctccggcattttagtgtgccaagcaggctgtgtccttgaggaattgtcgcgatacgttgaagagcgggatttcattatgccccttgatttgggcgctaaaggatcttgccatataggcggtaacgtcgccaccaatgctggcgggttacggttcctcaggtatggttccctgcacggcactgtgcttggtctggaagtcgtactggcagacggcaccgtcctcgattgtctgacctctcttcgaaaagacaatacgggctatgacctgaagcagttgtttatcgggtccgagggcaccctgggaataattacgaccgtgtctatcctgtgtcctcccaagcccagggcagtcaacgtcgccttcctggttacctgcgtgcctcctgcttgcggtcccggaagcccgcgacctgccagactgccacaccctgcgctcagaacacctggcctccgccaagagtctctcgcatcgagctgtcatgcacacgtttag

SEQ ID NO: 184628 - DNA, 426 bp, synthetic construct
  misc_feature 1..426: note = Description of Artificial Sequence: Synthetic coding sequence
  source 1..426: mol_type = other DNA
atgctgtgggccctgcgggagcggatcaccgaggccctgagccgggacggatatgtatataagtacgacctctccctgccagtggagaggctgtacgatatagtaacagacctgcgtgcaaggctcggcccacacgccaaacacgttgtgggctacgggcacctaggggacggaaatctccacctgaacgttactgcggaggcattttctccatccctcctggctgcattggagccacacgtttacgaatggaccgctggacagcaggggagcgtcagcgccgaacatggagtggggttccggaagagggatgtactgggctactctaagccacctggagctctgcagcttatgcagcagctgaaggcactgcttgacccgaaagggatccttaacccttacaagaccctcccatctcaggcttag

SEQ ID NO: 184629 - DNA, 609 bp, synthetic construct
  misc_feature 1..609: note = Description of Artificial Sequence: Synthetic coding sequence
  source 1..609: mol_type = other DNA
atgagcttcccccccctgtggcccacccggcacgtgcccgccagccaccccacgtgcccacttctgcctggcccttgctgctgccctcactgcctgtgcgacagtgctccgccctcactgccttgcccaacactggttcaaggcgcatccagacccatcctcattctacgggccttccctggaccgtgtcactctgtgccgtgtcacgatctcaaactgcaggttggcgcctccccattccgtcatggttgccccccctccgtccggtgccctagccgcttaatcgctggcgttcccgggtgtagtgtgctgtcctggtctctggggcactctctatcaggcattgactcgagagtgggcgccacgccaggtctgggccatagcttgtcatgggttagagcaccacctggtctgggtcatagtttgtccggcgttggggctaccccgggtcttgggcacctactttccggagtcggcgcttctccaggtgaagacactgagcacgctgctgccctgaccccatgcggcgtgcctcctgtgcccggatgccgctcacactctcagccactgtcacatctcgtgtcttcctctcggtgctgcggcccctag

SEQ ID NO: 184630 - DNA, 849 bp, synthetic construct
  misc_feature 1..849: note = Description of Artificial Sequence: Synthetic coding sequence
  source 1..849: mol_type = other DNA
atggccctgagctgcagcagctggtgccggagcccccagtggaagtttgaggcctccaagagccacgctaaccatcggcccatttgcctgtcacctcgcatatggcccgggagtgcctccgccacatcgacggtgtgctcgagttcagaatctttcttgccaaggggaccgccagccgtcagtcttctcctgcacggaccgccaacagtgagcttcccccctccctggccaacgcaccacgtactcccctcaccagttgctcacccgccctgtccttgtctgcctcccgacatgcctcttgaattaccgggcccatgctgttgcccacattgtttgtgtgattccgcgcctccaagtctaccttgtccaacattggtgcagggagcgtcccgcccaattctcatcctcagggctttcccgggcccatgccatagtgtgccctgtcacgatctcaagcttcaagttggggcttcccctttcagacacggctgccccccatctgtacggtgtcccagcagattgatcgctggggtgccgggatgtagcgtactgtcatggagcttgggccacagcctgagtggtatcgacagcagggtaggcgccacaccagggctaggacattcactctcctgggttagggctcccccgggactaggccatagtctgtcgggggttggggccacacccggtttgggccacctgctgtccggtgtgggggccagccctggtgaggatacagagcatgctgcagctcttacgccgtgtggggtccccccggtgcctggatgccgttcacattcgcagcccctgagccacctggtctcaagctcaaggtgctgcgggccctag

SEQ ID NO: 184631 - DNA, 1245 bp, synthetic construct
  misc_feature 1..1245: note = Description of Artificial Sequence: Synthetic coding sequence
  source 1..1245: mol_type = other DNA
atgggcggcctgagcgcccggcccaccgccggccggaccgaccccgccggcacttgctggggccaggatcccgggagcaagatggccaccgttattcccggtcccctgtcattgggagaggacttctaccgggaagccatcgaacattgccgttcgtacaacgcccgcctgtgcgctgagcgatccctgcggctgccttttctcgactcacagaccggggttgctcagaataactgctatatctggatggagaaaacccatagaggccccggactggccccaggacagatttacacctacccagccaggtgttggagaaagaagcggcgccttaacatcctggaagaccctcggctgcgaccctgcgagtataaaattgactgcgaggccccactgaagaaggagggcggcctacccgagggcccggtgctggaggctttgctatgcgcggagaccggggaaaaaaagatagagctgaaggaggaggaaaccatcatggattgtcaaaagcaacagctgttggagttcccacatgaccttgaggtcgaggaccttgaagatgatatcccaagacgaaagaatcgagccaaggggaaagcatatgggataggggggctgaggaagagacaggacaccgcaagtctggaagacagggataagccctacgtgtgtgatatctgcgggaaaaggtataagaaccgacccggcttaagctaccactatacccacacccacctggctgaggaagagggggaggaaaacgctgaacggcacgctctgccattccaccggaaaaacaatcacaagcagttttataaggaactggcttgggtgcccgaagcccaacgcaagcatacagcaaaaaaagctcctgatgggaccgtcattcctaatgggtattgcgacttttgcttgggcggctctaagaaaacaggatgtcctgaagacttgatatcttgtgccgactgtggccggtcagggcaccctagctgcctccaatttaccgtcaatatgactgctgccgtgaggacttatcggtggcaatgcatcgagtgtaagtcttgctccctgtgcggcacgtcagaaaatgacgaccagttgctcttctgcgatgattgtgaccgaggatatcatatgtattgcctgagtccgccaatggccgagcctcctgaagggagttggtcgtgccacttgtgtttaagacatctcaaggagaaggctagcgcgtatattaccttgacttag

SEQ ID NO: 184632 - DNA, 1074 bp, synthetic construct
  misc_feature 1..1074: note = Description of Artificial Sequence: Synthetic coding sequence
  source 1..1074: mol_type = other DNA
atggccaccgtgatccacaaccccctgaaggccctgggcgaccagttttacaaagaggctatagagcactgtcgatcttacaattcacgtctctgtgccgaaaggagcgtcagattgcccttcctggattctcagaccggggtagctcaaaataattgttatatatggatggagaagagacatcgcggtcccgggttggcacccggtcagctgtacacttaccccgctcgatgctggcgcaagaagagacgcctccacccacctgaagatcctaagctccggcttctggagattaaaccagaggttgaactgcctctgaagaaagacgggtttaccagcgaaagcacaacactcgaagcactgcttaggggcgaaggcgtagagaaaaaggtggacgcaagagaggaagaaagcatacaggagatccagagagtgctagagaacgatgagaatgtcgaggaaggcaacgaggaggaggatttagaggaggatattccaaaacgtaaaaatcgtacacgcgggcgggcacgtgggtctgcgggcggccgtagaagacatgatgccgctagccaagaagaccacgataagccatatgtgtgcgatatctgcggaaaaagatataagaaccgtcccggactaagctaccactacgcacacacgcacctggcttccgaggagggcgatgaagctcaagaccaggagactcgctccccaccaaatcacagaaatgagaaccaccgcccgcagaagggaccagatggtactgtgatccctaacaactattgcgatttttgcctgggtggctctaatatgaacaaaaaaagcgggcggcccgaagagctcgtgagctgcgctgattgcggcaggtccgcccacttaggaggcgagggacggaaggaaaaggaagctgcggctgccgcccgcacaacagaggatctgtttggtagcacttcggagagtgacacatcaacgttccatgggttcgacgaagatgacctggaagagccacggtcgtgccgtggcagacgatctggtaggggtagcccaacggcggacaaaaaggggtcttgttag

SEQ ID NO: 184633 - DNA, 999 bp, synthetic construct
  misc_feature 1..999: note = Description of Artificial Sequence: Synthetic coding sequence
  source 1..999: mol_type = other DNA
atggagaagacccaccggggccccggcctggcccccggccagatctatacttaccctgctagatgctggcggaaaaaaagacgactcaatatcctcgaggacccgaggctgcgtccctgcgaatataagatcgactgtgaagcacctctcaaaaaggagggcggtctacctgaagggcctgtcctagaggccctgttgtgcgctgagaccggtgagaagaagatcgagctcaaagaagaagagaccatcatggactgtcagaaacaacaactcctagagttcccacatgacctggaggtggaagacctggaagatgatattccaaggcgcaagaatcgtgcaaaaggcaaggcgtatggtataggcggtttgagaaagaggcaggacaccgcttcattagaagatcgagacaagccatacgtgtgcgacatatgcgggaagcgatacaaaaacaggcccgggctgtcatatcattatactcacactcatcttgctgaagaagaaggcgaagagaacgccgagagacatgctttacccttccaccggaaaaacaatcacaaacagttctacaaagagttggcctgggtgccagaggcccaacgaaaacatactgccaagaaagccccggatggaacggttatacccaatggttactgtgatttttgcttaggggggagcaagaaaaccggatgtcccgaagatcttatctcctgtgcagattgcggcaggagcggccatcctagttgcctccaatttaccgtcaacatgaccgccgctgtccgaacgtaccggtggcaatgcatcgagtgcaagtcctgtagcctgtgtggcacctctgaaaatgatgatcaacttttgttttgcgacgattgcgaccgaggctaccacatgtactgcctgagtccccccatggctgagccgcctgaggggagctggtcatgccacctctgccttcggcatttaaaggaaaaggcctctgcatacatcacgcttacctag

SEQ ID NO: 184634 - DNA, 1143 bp, synthetic construct
  misc_feature 1..1143: note = Description of Artificial Sequence: Synthetic coding sequence
  source 1..1143: mol_type = other DNA
atgggcggcctgagcgcccggcccaccgccggccggaccgaccccgccggaacatgttggggacaggatccaggtagcaagatggccaccgtaatccctggaccgctttctttgggggaggacttctaccgagaagcaattgagcactgtcgaagttataacgcacgactctgtgcagaacgctcactcaggctgccattcctggacagccaaactggagtggcccagaataattgctacatctggatggaaaaaactcatcgcggcccagggcttgcccccgggcagatttacacatacccagcaaggtgctggaggaaaaaaaggcgcctgaatattttggaggacccgcgattgaggccttgcgagtacaagatagattgcgaggcacctctgaagaaagaggggggactaccagaaggccccgtcctggaagctctattatgcgctgaaacaggggagaagaaaattgagctcaaagaggaagagaccattatggattgccagaaacaacaattgcttgaattcccccatgacttagaggtagaggacttagaagacgatatcccaagacggaagaaccgcgcaaagggtaaagcatatggaataggcgggctgcgcaaaaggcaggataccgcttccctggaggaccgagataagccctatgtttgcgataaattctataaggagcttgcttgggtaccagaggcccagaggaagcataccgcaaagaaggctcccgacggtaccgtaatccctaatggctattgcgacttctgcctgggaggaagtaagaaaactggttgtcccgaagatttaatttcttgcgctgattgcggaagatcagggcacccctcttgccttcagtttaccgtgaacatgactgctgccgttcggacctacaggtggcagtgcattgaatgcaagagctgcagcctttgtggcaccagcgagaacgatggcgcctcctgggccggcctgaccccccaagaccagctgcttttctgtgacgactgtgaccgcggttatcatatgtactgcctctctcctccgatggcagagccccctgagggatcttggtcatgccacttatgtttgcgacatcttaaggagaaggcctccgcttacattaccctaacttag

SEQ ID NO: 184635 - DNA, 612 bp, synthetic construct
  misc_feature 1..612: note = Description of Artificial Sequence: Synthetic coding sequence
  source 1..612: mol_type = other DNA
atggccaccgccatccagaaccccctgaagagcctgggcgaggacttctacagggaggctattgagcactgtcgcagttacaacgcacggctttgcgcggagcggagcttgcgcctcccgtttttagattcccagaccggagtcgcccagaacaactgctatatctggatggagaagacgcatagggggcccggactcgctcccggtcagatctacacttacccagctagatgttggcggaagaaaagacggctgaatattcttgaagaccccagacttcgcccatgtgagtataagatcgactgcgaagctcccctgaaaaaggaaggtggactgccggaaggtccggtccttgaggctctgctgtgcgctgaaacgggggaaaagaagattgagctcaaggaggaggaaaccatcatggactgtcaaaagcagcagttgctggagtttcctcacgaccttgaagtggaagacctggaggatgatattcctagaagaaagaaccgcgcgaagggaaaagcctacggaatcggaggactgcgtaagcgccaggataccgcctcgctggaagaccgtgataaaccctacgtgtgcgattctgagtctttttag

SEQ ID NO: 184636 - DNA, 1245 bp, synthetic construct
  misc_feature 1..1245: note = Description of Artificial Sequence: Synthetic coding sequence
  source 1..1245: mol_type = other DNA
atgggcggcctgagcgcccggcccaccgccggccggaccgaccccgcaggaacttgctggggacaggacccaggctccaagatggccaccgtaattcccggaccactgtccctgggcgaagacttttaccgggaagctatcgagcattgtcgctcatacaacgctcggctgtgcgcagaaaggtctctgcggctgcccttcctggactcccagacaggggtggcccagaataattgttacatttggatggagaaaacccaccgtggacccggcttggccccgggccagatctatacttaccccgcacgttgttggaggaaaaaacggcgtctcaatatactggaggacccacgactccgaccgtgtgagtataagattgactgcgaggccccgttgaagaaagagggcggactcccagaaggaccagtccttgaagcgctgttgtgcgcagagacaggcgaaaagaagatcgaactcaaggaagaggaaacaatcatggattgccaaaagcagcagctcttggagtttccccatgacctagaggtcgaagaccttgaggatgatatcccgcgccgaaagaatcgggccaaaggaaaagcctacggaattggtggactgagaaaacgacaggacaccgcatctctggaagaccgcgacaaaccatatgtttgcgacatctgcggaaaaagatataaaaatcggcctggcctttcctaccactacacccacacacatttggctgaggaagagggagaggaaaacgcggagaggcacgcactgccgtttcatcggaaaaacaatcacaagcaattctataaagagctggcctgggtgccagaggcgcagcggaagcatacagccaagaaggcccctgacggtacggtcatccctaatggctactgcgacttctgtcttggaggctcaaaaaagactggctgccctgaggacctgatatcttgcgctgactgcggccgatccggacacccatcatgccttcagtttaccgtgaatatgacagccgctgtccgcacttaccggtggcagtgtatcgagtgtaaaagttgctcattgtgtgggaccagcgaaaacgatgatcagctcttgttttgcgatgattgcgatcgcggttaccatatgtactgtttatccccccccatggcagagcctcctgagggatcctggagctgtcatctgtgtctccggcatctgaaggaaaaagcgtccgcatacattactctcacgtag

SEQ ID NO: 184637 - DNA, 1167 bp, synthetic construct
  misc_feature 1..1167: note = Description of Artificial Sequence: Synthetic coding sequence
  source 1..1167: mol_type = other DNA
atggccaccgccatccagaaccccctgaagagcctgggcgaggacttttaccgggaggcgattgaacactgtaggtcttacaacgcccgactatgcgccgaacgctccttgagattgccgttcttggattcacagaccggcgtggcacagaataactgttatatttggatggagaagacacatcgaggcccgggcctggccccaggccagatctacacttaccccgcaagatgctggcgtaagaaaaggcggttgaacattctagaggatccccgactccggccctgtgagtacaaaatagattgcgaagctccgcttaagaaagagggaggcctcccagagggaccggtcctggaggctctcctctgtgctgagaccggcgaaaaaaagatagagctgaaggaggaggagacaattatggactgtcagaagcaacagctgttagagttcccacacgatctggaggtggaggacctcgaagatgacatccctagaagaaagaaccgggccaagggcaaggcctatggcattgggggcctgcgtaagcgtcaggacacggcttccctcgaggatcgagataagccttacgtttgtgacatttgcggcaagcgatataaaaaccggcccgggctgtcctatcattacacacacacacacctggcagaagaggagggggaggaaaatgcggaaagacacgctctgcctttccatcggaagaataatcacaagcagttctacaaggagttggcgtgggtacccgaggctcagcggaagcatactgccaaaaaggcacctgatggtactgttattcccaatggctactgtgacttttgcctgggaggtagcaagaagaccgggtgtcctgaggacttgatcagttgcgccgactgtgggaggtcgggccacccctcttgcctgcagttcaccgtcaacatgaccgcggcagtgagaacatatcgctggcagtgtatcgaatgcaaaagttgtagcttatgcggcacctcggagaatgatgatcaactcctgttttgtgatgattgtgatcgcggctatcacatgtactgcctttctccaccaatggcagagcctcccgaggggtcatggagctgtcatctctgtctgcgccacctcaaggagaaggcgagtgcttatatcaccctcacttag

SEQ ID NO: 184638 - DNA, 1176 bp, synthetic construct
  misc_feature 1..1176: note = Description of Artificial Sequence: Synthetic coding sequence
  source 1..1176: mol_type = other DNA
atggccgccgtggtggagaacgtggtgaagctgctgggcgagcagtattacaaggatgctatggaacaatgccacaactacaacgcccgcctgtgcgccgaacggagtgttcgccttccatttctggacagccagactggtgtggcgcagtccaactgttacatttggatggagaaacggcatcggggacctggcctggcgagtggacagctttattcttaccctgcaaggcgctggcggaagaagcgccgagcccacccaccagaggacccgcgactgagtttcccatccataaagcccgacaccgaccaaaccttaaaaaaagaagggctcatcagccaggacggatcttcccttgaggcccttctgcgcacagatcccctggagaagaggggcgcaccggatccgcgcgtggacgatgattctttgggagaattccctgtgacaaactcgcgtgcgaggaaaagaattctcgaaccagatgattttctggacgaccttgatgatgaggattacgaggaagacaccccgaagcggagaggcaaggggaagagcaagggaaaaggtgtcggctcagcacgcaaaaaattggacgcgagcatcctagaagaccgggataaaccttacgcttgcgacatttgtgggaagcgatataagaataggcccggtctcagttaccactatgctcactctcatcttgctgaagaagagggtgaagataaggaagactctcaacccccaactcccgtttcccaacgaagcgaggaacagaaaagcaagaagggccctgatggtctcgccctccctaataattactgcgacttctgcctcggcgatagcaaaatcaacaaaaaaacgggtcagcctgaggagctggtttcttgttcagattgtggccggtccgggcaccctagttgtctccagtttaccccggtgatgatggcagccgtgaagacataccgttggcagtgcatcgaatgcaagtgttgcaatatttgcggcacaagcgaaaatgatgatcagctgttgttttgtgatgactgcgataggggctatcacatgtactgcttaacccccagtatgtctgagccccctgaaggttcttggtcctgtcacctgtgcttggatctgctgaaagagaaggcaagcatttaccagaaccagaattccagctag

SEQ ID NO: 184639 - DNA, 1134 bp, synthetic construct
  misc_feature 1..1134: note = Description of Artificial Sequence: Synthetic coding sequence
  source 1..1134: mol_type = other DNA
agcagcatcatccagaaccggctgaagaagctgggcgaccagttctacaaggaagcaatcgagcactgcagaagctataactcgcgcctgtgtgcggagcgctccgttcggttaccgtttctggactcccagaccggtgttgcccagaataactgttatatctggatggagaaaaggcaccgggggcccggcttagcccctggtcagctctacacgtatcctgcgcgctgctggcgcaagaagagacgtctgcaccctcccgaagatcccaagctgcgcctgttagagataaagcccgaggtcgaactgccactgaagaaagatggcttcacatcagagagcaccactcttgaagctttgcttagaggagagggggtggagaaaaaggtcgacgcccgggaggaagaatccatccaagagattcagagagtcctcgagaatgacgaaaacgtggaggaaggcaatgaggaggaggacctggaagaagacattcccaagaggaaaaaccggacgagaggacgggctcgcggaagcgccggtggccgcaggcgccacgacgcggcctctcaggaagatcatgacaagccatacgtgtgcgacatttgtggtaagaggtacaaaaacaggccgggactgtcttatcactacgcccacacgcacctcgcctcagaagagggtgatgaggcccaagatcaagaaaccagatccccaccgaatcaccgcaatgagaaccacaggccgcaaaaaggaccggacgggacagttatacccaataactactgcgatttctgcctgggtggctccaatatgaataaaaaatcaggaaggcccgaagagctggtgagctgtgctgattgcgggaggagcggacaccctacatgtctgcaatttaccctgaacatgactgaggccgtcaagacatacaaatggcagtgcattgaatgcaaatcctgtatcctctgcggaaccagtgagaatgatgatcaactgttgttttgcgatgattgcgatcggggttaccacatgtattgtcttaacccgccagtcgctgaacctccggaggggtcctggtcgtgtcacctttgttgggaactgctgaaagagaaagcttcggcatttggatgtcaagcttag

SEQ ID NO: 184640 - DNA, 1074 bp, synthetic construct
  misc_feature 1..1074: note = Description of Artificial Sequence: Synthetic coding sequence
  source 1..1074: mol_type = other DNA
atggccaccgtgatccacaaccccctgaaggccctgggcgaccagttctacaaagaagctatagaacattgccgcagttacaatagtcgtctctgtgccgagcgcagtgtccgcttgccttttctggacagccagaccggggtggctcagaacaattgctacatctggatggaaaagagacatagagggccaggactagctcccggccagctgtatacataccccgcacggtgctggcgtaagaagcgaaggctccatccccccgaggatcccaaactgaggttgctcgagatcaaacccgaggtggaattacctcttaaaaaggacggttttacgagtgaatccactaccttggaagcattgctacgcggagaaggcgtcgaaaagaaggtcgacgcacgcgaggaagaatccatccaggaaatccaaagagtactggagaacgatgagaatgtggaggaaggtaacgaagaggaggacttagaagaggacattcctaagcgtaaaaatcggacccgcggccgagctcggggaagtgccggggggcgccgccgtcatgatgctgcctcacaggaggatcatgacaagccctacgtgtgtgatatttgcggcaagcggtataaaaacaggccgggactctcctatcattacgcccatacacacctagcatcagaggagggagacgaggcacaggaccaggagacacgatctccacctaaccatcgcaatgagaatcaccgaccccagaaagggccagatggcacagtgatccctaataactattgcgatttttgtctcgggggcagcaacatgaacaagaaaagcggccgccccgaagaactagtctcatgcgccgattgcggaagatctgctcatctgggaggcgagggtcgtaaggaaaaggaggccgctgcagcagcccgcaccactgaagatctctttgggtcaacgagtgagtccgacacttccacctttcacgggttcgacgaggacgatttggaagaaccccggtcctgtcgcgggagacggtcaggtagaggttcgccaaccgccgacaaaaaaggcagttgttag

SEQ ID NO: 184641 - DNA, 1137 bp, synthetic construct
  misc_feature 1..1137: note = Description of Artificial Sequence: Synthetic coding sequence
  source 1..1137: mol_type = other DNA
atggccaccgtgatccacaaccccctgaaggccctgggcgaccagttctacaaagaggctattgagcactgtcgctcttataatagccgtctttgcgctgagcgaagcgtgagactgcctttccttgattcgcagacgggcgtggcacaaaataattgttatatctggatggaaaaaaggcaccgaggccctggactggcccccgggcagctgtatacgtaccctgcacgctgttggcgtaaaaagcgccggctgcaccctcccgaggacccgaagttaagacttctggaaattaaacccgaagtagaactccccctaaaaaaggacgggttcacaagcgaaagtaccactctagaagcccttctgcgaggagagggagtggaaaagaaggtagatgcacgagaggaggaaagtatccaagagatccaacgggtactcgaaaacgacgagaatgtcgaggagggtaatgaggaggaagacctggaagaggacatacctaagcgcaaaaacaggaccagaggccgggcacgggggtccgccggaggtcgccggcgccacgatgctgcctctcaggaagaccatgataagccatatgtgtgtgatatctgcggtaagcggtataagaatcgacctggtctgtcataccactacgctcacactcacctggcctctgaggaaggtgacgaagcccaggatcaagagacacggagtcctccaaatcaccgtaacgagaaccacagaccccaaaagggccccgatggaacagtgatcccaaacaactattgtgacttttgcctgggcggttccaatatgaacaagaagtcagggcggccagaagaacttgtgagctgcgctgactgcggacgcagtggccatcccacctgtctgcagtttaccttgaacatgaccgaggcagttaaaacttataaatggcagtgcattgaatgcaagtcatgtattttgtgtggtacatcggagaacgacgatcagctactgttttgtgacgattgcgatagagggtaccacatgtattgtctgaacccgcctgttgccgaaccgccagagggctcttggagctgtcacctgtgctgggaacttctgaaggaaaaagcctccgcattcgggtgccaggcgtag

SEQ ID NO: 184642 - DNA, 4110 bp, synthetic construct
  misc_feature 1..4110: note = Description of Artificial Sequence: Synthetic coding sequence
  source 1..4110: mol_type = other DNA
atgagcccctgcggccggaagatgggcgagggccggcagcagcggcgcgctccggtggggaaactcctgctgctcccaggccggcgcgacacaccccacggaaggagcggatcatcaggagcacgaacccagaggagtctcctctggctgctggtgcacgtttggttatgggcagctagcgggagtagcgcgcagctttttaacctcacattgtctgtagacgagggtctaccacccgataccctggtaggcgacatcagggccgggctgcccgcagctcagcagcaagaaggcagtgggttctttttatcagaggactccgacgactcccccctgctggatgatttccacgttcaccctgacacaggcatcatccgaaccgcacggcggttggacagggagcgacgtgaccactatagcttcgtggcagccacgcttttgggcgctgtggtgcaggtggaaatccgcgtgaatgacgtaaatgatcacagtccacgtttcccattggattctttacagctggatgtaagtgagcttagccctcctggaacagcgtttcgcctgccagtcgctcatgatccagatgcggggctcttcagtacgcaagggtatactctggttcagccaagtgacctgccaaaggaccccgcaggtccgttctttcagctgcgttacagaacccctggacctctgccttcccctttactacctggctcatcctcacctctggaaccactcgacctcgtactcctgcgcaggcttgacagagaggaggcagccgcccatcgcctgcagattgaggcgtgggatggggggcgccccaggagaaccgggctgctgagcgtggagctgcgggtcctggacgagaacgacaacccaccagtgttcgagcaggacgagtatcgggcggctgtgagagaggacgctcaacccggagccgaggtgtgccgcgttagggccacagaccgcgacctcgggcccaatggattcgttcggtactccgttagggctaggcaagtgcccggagcgggctccggcgggggcgccctgggtgatgccgcatattttgcagtcgaggaactgtcaggcgtggtcagagtctggcgtcctctggaccgtgaggcccaggcatggcatcagctcgttgttgaggcacgggacggtggcgcggaaccagaagtagcaacagtaagagtaagtattgctgtactggatgttaacgacaaccgcccggcaattcacgtcctgttcttaacagagggaggggtggccagggtatccgaaggcgctagaccaggcgactacgtggccagggtcagtgtgtcagatgcagacggcgactgggagaaggaggatgaggcaactggagagctaggggtgggcctgggggacggatctatcagcctgtcgcttgaaggtggagagggagatttcgccctcctacctggggggcccccgggcgtgttctttttgtgtgtcgaggggccattggatagagagtcacgtgacctctacgagctccttctagtggcaactgatgcaggttccccacccttgtctacagaggagacactgttgctccgcgtcgctgacctcaatgatcagcctcctcttttctcacagcaacattataaagcctccgtgtccgaggccgccgcaccgggtacggtggttatgtgggtctccgccagtgacgccgacgaggcgggttctgatcatgcatggctcagatatactgtcgtccagctaagtgcaccctgcaacctgggttccttgcaaagcaagatggttcacacagctgaatgtgggccttcttttgccattgattccgagagtggggccattagcacaattcgaacactggatagggaagtgcaagaggctgttgagttaaaagtggtggcgcaggacctgggtgaacctcctttaagcgctacgtgcctggtctctattactgtcgacgacgtgaatgataacgaaccaattttctggaggcaggtctataatgcaactattgccgagcatgctccagtgggtcactgtttcttgcaggtaactgcctcagacgctgactccggactctacggtttcatcgaatattcactgtacgacggtttcttgagctacgaggctcctcaggcttttaggatcgacccccatgacggtcaaatttgtgtgagccaggacatcgatcgcgagcgggacccagctacttacgacttgctggtggaagccaaagatggaggcggactgtctgcgcaggcctttgttcgagtggacttggaagacgtgaacgataaccatcctgtgtttaacccgtcaacgtacgtaactagcattagtgatgagacacaaccgggcaccgaaattatcaatgtgctagctacagatcaagattcgggtatttacggaacagtcgcctatgagctgatccccggaaacgtctccagcctgttcacaattgactctactacgggaattatttatctgacactccccctgagccacttggaatccacaacactctcactcatggtttctgctcaggatggaggaggcctaactgctgtcattaacgccgacgtgaccattcacatcttccagactaccctagcaccagctgaattcgagcgtccaaaatataccttcctggtgtacgaggacgtgccggaagactccccgattggcacagttaaggcgagagaacccctcaattcctccgaacccatcttttatagaattagtagcggcgacctcggcggaaaattctctatccatcctcgcctcggcaccattagaacaaggaagcctcttgatcacgagacgcaacctgtggtagtgctgactgtgcaggctcaactcgggtcagcccctgcttgcagcagtactgaagtgaacatcaccgttatggacgtgaacgataaccatccggccttcttgaggacatcagatgaaattcggatctctcagactacccccccgggtacagccctttacctagcccgggctgaggatcgggatagcggccgaaatggtctcatacgatattccattgcatccccccaaccaggagtctttgccattgaccgcgctctcggtgtgctcttcctgaatggaagtctgggggcgggcgaacagcgggaattgacccttactctccgggccgaagaccagggagtgcacccccaggcggctttgctggtgttgacggtggtgatcgaaaaacgggagcattctcccagttggacttttgagcacctcgtgtaccaggtagaggtcagcgaatctctgagccctatgactcagatgctccagactcaggcccacccgctgggcccacagagggccgcatccccccttagatattcgctggagccatctgtggatagtgctatgtttggcattaggccatataccggatggatttaccttaggagacagttcgactatgagagtacacagacttacaacttcagggtgttcgcttggatccctgaggatggttttctccaaaatgtgagcacaaccgtgattgttcgcgtttgggacgaaaacgacaacagcccgacgtttctgcacgacgtgcttttcctgaaagtggaggaaagtccggtgccccagggcgtcattggaaagatcaccgctattgatatggactccgggaagaatggccagctcctgtatttcctgttgtccgatgggaaattctttaagatgaaccccaacaccggggaactgattaactgggtagcacttgatcgtgaacatcggggacaccacgagatgacggttctcgtgaccgacaggggatccccaccaagaaatgccaccatggccgtgtacgtcagcgttaccgacatcaacgacaacaggcctttcttcccacagtgcctgcctggcaaggagcttcatgtgaaggttctcgaaggccagccagttaacatgcttgtcactaccgtctttgccaaggatcctgacgaaggaaacaatgcggaggttacctacagtgtctcttctgctcgaccaatgcccctgaagggcaagacagccttcggtaagcaaagctgcaagaagcagaccaataagcagaccaataaaatactgacttag

SEQ ID NO: 184643 - DNA, 8751 bp, synthetic construct
  misc_feature 1..8751: note = Description of Artificial Sequence: Synthetic coding sequence
  source 1..8751: mol_type = other DNA
atgcggctggacgagatcaccaagagcgagaacgaggacggcgagaagaagatgtttactcaacaatttgagagtactgacgcctgcgtgtatgaggtctatgtgaaaattaattccattgtgaagtcacagtctcagtgtggactgaagcgcgggagcccggagactgagctgtggggggccatagtctttcgaagtcaggaagaaaacgcgaagccagtgaaagagaccgaagttaccgccagcgacgccgactcagggttgtacggcttcatcgaatattcactctatgacggctttttaagttatgaggctcctcaggccttccgcattgaccctcacgacggacagatctgtgtgtctcaggacatcgatcgagaacgcgaccccgcaacgtacgacttgctggtggaggcaaaagacggagatgagcaaaggatgacccacctcgccctagtcaaggggggcctgtcagctcaagcattcgttagagtggatcttgaggacgtcaacgacaatcacccagtgttcaacccatctacatatgtgacaagtatttccgacgaaacccagcctggcacagaaataataaatgtgctggccacggaccaggacagcgggatctacggaacagtcgcctatgagctcattcccggaaatgtgagctccctttttaccattgactccaccactgggttatacagcccagaggtggaaattctttctgcagtcaacttctcagcagacaaagaggtgatgaactctttagaaatgttcctgcctctgctcaggcacttcaaaaaagtggaaagggacgaagaggcggccgagaaaaaatttgaggcgtcacgtgggtggtttatgagattcaaagggcggcgtcacctgcactatctgaaagtccaggacgaagcggctagcgccgacggcgaggctgcagcccgatatgttgcgaatctggcaaaaatcctgggcgaaggaatcatctatctgactctcccgctgtctcatctcgagagcaccactttatctctgatggtcagtgcacaggacggagggggtttgacagccgtcattaatgcagacgttacaattcatatcttccagactacccttgcccctgcagagttcgagagacctaaatacacctttcttgtgtacgaagacgtgccagaggactcaccaatcggcactgtcaaagcccgggagccactcaacagctcagaaccaattttttaccgcatctcaagcggggatcttggtgggaagttttctatacatcctaggctcggcaccattcggacacggaagccacttgaccatgagacacagcccgtggtcgtcctaactgtacaagcccagctcgggtccgccccagcctgttccagtacagaggtcaatataacagttatggatgtcaatgacaatcacccagcgttcctgcgcacatccgacgagatccgaatcagccaaactactccaccgggaacagcgctttatctggccagagccgaggatcgcgattcaggtaggaacggcctcattcgctatagtattgcttcaccccaacctggagtctttgccatagatcgcgctctgggtgtgctgtttctgaacgggtcactgggggccggggagcagagagaactgacactgacactgcgtgccgaggatcagggggttcacccccaggcagcattgctcgtgttgacagtcgtgatcgaaaagagagagcattcaccgagctggacattcgagcatctggtttatcaagttgaggtgtccgagtccctgtcaccaatgacccagatgctccagacacaggcccacccattgggacctcagagggcggcctctcccctgagatactcactagagccttcagtcgattctgcaatgtttggcatccgaccctataccggttggatttacctgcgtagacagttcgactacgagtccacccagacttacaactttcgcgtgtttgcttggatcccagaggacggtttcctgcagaatgtttcgacaacagtaattgtgcgggtctgggacgaaaatgacaactcccctacatttttgcatgacgttctcttcttgaaggtcgaagaaagccccgtgccacagggcgttattggcaaaatcactgcaattgatatggatagcgggaaaaatggtcagttgctttatttcctgttgagcgacggcaagttctttaaaatgaaccccaacaccggaccagcggggactatctacgttatcacttgggctgatggagccgcggcattctctggaaccgacttcgcgttttcctccgatgaactccaggcttttgtgctcaagtcactcttctgtgagctcggggagggagagctgatcaattgggtagcactcgacagggagcacaggggccaccatgagatgacggtactagtgacagataggggaagtcctccacgaaacgctacaatggccgtttatgtttcggtgacggatatcaacgacaacagaccattttttccccaatgcctcccagggaaggagctgcatgtcaaggtcctagaggggcagccggtaaacatgctggtcaccacagtgttcgctaaagatccagacgagggtaataatgcggaagtcacatattcggtgtcatctgaggacagcagtgatcacttcaagatcgacgcaaataacggagagatccggactaccaccatcctttcatacgattataggccatcctaccggatgtcggtcatagcgacagatcagggcgtcccaccgctgcaggggcaagctgtggtcaacatccaggttatccccctgtccaagggccgcgccatcatgagccaaaacatcagacatctgataatccccgagaacctgaagcctacgaagattatgtcactgatcaaatcatcagaccacctccagcagcattacaatggcaagcttcacttctctatcgttgctgacgacaaggacggacacttcgaaattgacagctcaactggcgatctgttcttgagtaaagagctggactacgagaccacctcacattatctattccgtgttatcacaacggatcatagcaagaacctcagtctgagtagcacagtctttctgtctattgacgtggaagatcagaacgatcacagcccctcttttcaggacgaactgattgtgatctccgtcgaagagaacgtgcccatcggtaccctcgtgtacgtctttaatgcgaaggacgatgacggttcttttctgaattctaggatccagtactacatcgaaagtcacaacccaggcaccaaccctttcctgatccacccctcctttggcacattagtcaccgtcagtcgcttggaccgtgaatcaatccccaccgtcatcctgacagtaacggcctcagaccaggctgtaaacgtaactgataggcggttgagatctctgaccgcacagatcgtgatactcgacgtgaacgaccacaatccaacgtttatctccttcccaaatgcccacgtcaaggaagacgtgaccgtaggctcactggtgcatcatattaccgcacatgaccctgatgaggggcggaatggcaaggtgacgtactcaatcctgagcgggaacgagaacatgacattcatgctggacgagtcaagcggcctactgaccactacttgtcctttggattatgagatgaagacacagcatatactgaccgtgctcgccctagatgacggtacacctgcactgagcagctcccagacattgaccgttaccgtgctggatgtgaacgacgaagcaccagtttttaagcagcacttatatgaggcgtcagtaaaggagaatcaaaaccccggggaatttgtgacccgtgtcgaggctctggacagggactctggagtaaactccaaactccaattcgagatcatgccgggcgccagtttcgagctgtttgagatcaactcagatactggcgaagtggttacaactacaatccttgacagagaaatccaggaagtattcacgctgcgggttctcgtcagggacggagggtttccatcactaagctctactaccactatactttgcactgtcgaagatgagaacgaccatgctcccgaatttatagtttcctcctacgacattgaagtgttggagaaccaggaacctgaagtggtgtacacagtgcttgcatctgatatggatgctgggaataatagagctgtggagtaccacatcatagacgggaacactgacgagtgctttacgataaacgaaatgtccggggagctgtccaccacgcgcgctctggacagagagcagatttccaacttcaccctcgtgattctatgcagtgatttgggggaccccccgagatcctccgtgatacaccttcaagtgagagtgttggatgcaaacgaccactctccaagttttcccaccctgtactatcaatctagcgtcagggaagatgcggaagttggcactgtggtcctggtcctgtccgccgtggacaaagacgaggggctcaatggacagacagagtactttctcacagacgaagcgagcggggccttcactatcgatcccatgagcggcaccctgaagacctcgaacaccctggatagggaggctagatctcagcacacattttccgcagtcgcgcgcgactgtagcattcaaggatccagaagcaccacggtaatcattaaagtgtatgttacagatgtcaatgataatgatcccgttctggaacagaacccatttgatgttttcctgtctccggaatcccccacaaaccagacaaccgtcattgtccgggcggacgacctggacctcggacccaatggcacagtagtgttcagtttcgcggagactcagtccatgttctccatagataagtacactggagaaattcaattccagcagaaccccagttcagagtacttccccatctggttgcagctgaaagtgacagatcagggcattcctgcacgaaccaccacgggtctcctggtgatccatatggaaggcgaggacgtcaagatcagtttctcccaccacttatacaaaggtctggtcaccgaaaattgtgaggccggaacatcaatagttactgttaaggctttcgcccccgacagtatacaggactccatgaagtactccatcttctctggcaatgaagatggcgttctctcactctgcagcaaatccgggcaactgaccgtcaaggagcccaagttcctggattttgaggtccggaacgaggtgcagcttatcgtgcttgcagagagctccggtcaccgggcctattgcaaggtggccgtcctgatccaggatgaaaatgataacagcccatgcttcgaacagtccatatatcaggcctccgtttctgagtctcagctatataacgcccacgtgattcaggtgtttgcaaccgatcttgactccggcctgaacgggctcatagagtacagcatcctgagtggcaatcaagaagaagcgtttcaaatcgacgctctgagtggagtcatcaccacaaaagcaattctcgattatgagctgacctcctcttactcactcatagtccaagctactgataagggaatgccacgtctgtctaacactaccgtaattaaagtgcaggtgaccgacatcaatgataacgctccagcattcctcccatccgaggccgttgagatcaccgaagattccttacctggcgtcatagtgacccacgtgtctgtgcatgacgtggatctgaacagcgccttcatcttttctttcgctaaggagtcaaaccccggtacgaagtttgctatcgaccagaataccggagtcgtcgtccttgtgaagaccctggatttcgaggagatgacagagtatgagttgctgatccaaatttctgactccgtccattacaccgaaggggcgctagtcgtccgcgtgttagacgtgaatgacaatccgcccgtgttcagtcaagatttctaccaggtaacagtgccagagtccatccccgttgggtacagcgtgctgacgctctccgctactgacctggaaagtaatgagaacatcagctaccgcatcctgtcatcttcaaaggagttttccattgacccaaagaacgggacgatctttactatatctccagtattactcctcgacacgatcagcaccactcagttcttagtggaagctagcgatggcggcaaccccgacctcagggcattaactttagttgagattggcattgaagatatgaacaactacgccccggagttcacagtaaagtcctacaatctgtccctgtccgaggacgcccttgtgggctcaaccctcgtgactttttccaatatcgaccacgactggacacgcgagaacacctacgtcgagtactccatcataagcggcaactcccagaacaacttccacgttgaaactaagttcttccacagtgaatacccgtataagcaagtaggctatctcgtacttctgcattctttggatcgagaggccagcgcatcccatgagcttgtgatattagctagtgactcgggatgtccaccattgagttccactgccgtaattagtatccaagtgctggatgtcaacgataacccacccaacttcagttcactaagctaccatacacatgtgaaggaatctacacccctcgggtcccacatcacagttgtgtcagcaaacgaccgggacaccggcagccatgcagaaatcatttataacatcatttcaggcaacgaaaaaggtcatttctatctcgaggagaatacaggagtgctgtacctcatcaagcccctggattacgagaagatgactaaatttacgctgactgtgcaggcaagtgacgctgaaaaaaaacactttagtttcgccgtggtgttcgtgtccgtcctggacgataatgatcatgccccccagttcatgtttagttcctttagttgtattgtccccgaaaatttgcctatcagtagcaccatctgttctatcaatgcgttggacttcgacgctggaccatacggggaactgacatactcgattgttagcccatgcttcttgacccacggcatgagctacgatcacgacctgttcctgatcgatcccctgactggggacatccatgcaaaacaaatattggactacgaaaatggaaataaatattgcctgaccgtccaggctaaagacaaaggggacgccacagcgtcgttggttgtctgggttgatattgagggcatagacgagtttgagcctattttcacacaggaccagtacttttttactctgccagagaagaacaaagacaggcagctgatcggtcgagtggaggccagcgatgccgatgctggcatcgatggcgtgatactgtacagtctcggcacgtcttcccccttcttcagcgtgaataaaacaaacgggaacatctaccttatccgggctctccccctaatcaaaagccaactcaacaaggaggacacgctagagatgaagattatcgctcatagcccaaaaagcgatagtaaattcgcttcttgtactgtatttgttaacgtgagttttagttctgaagggactcctctggccgtgttcgctagctcgttttcaatcagcctggttgtgtcttttttagttttcctgatcctgatctgtatactaattgtaatgatcctccggcataaacagaaagacactattaataactacgaagaaaagaagacctcttctcttgacgctgacctgcgcgtgactagggatgcctcagtcctcaaagcttttcagaagacagacgattgttccaacgaggtggttcccgtggatgcaacacctgagtggctctctttgatcagcataatggagaaggatatcgtgaacctgtatcggcatagcaacagcagcggacactgttccgtcgaaggcgagacggcggaggacaaagagatccagaggatcaacgagcacccgtacagaaaatgcagcgactccgcactctcagaccacgaatctcgagtcccagattctggtataccacgagactcagaccaactgagctgcctatccggggagacggatgtcatggtgactgcggagacagctgaagcgagccagacatttggagagggagatcagggagaggggtgtagtactacttgcgcacagaacaatgtactgccacaaactgtgcagaagagggaggccaaggaaagtattctggccgacgtgcggaaagagagcgtctttatctctggtgatcaggaggtgagatgcgctgcgttgagcacccagacaacttcagaccacgacggaaaggataactaccactggaattacctactgagctgggagccgaagttccagcctctggcctctgtcttcaatgatattgccaaactcaaggacgaacacctccatatgcctggtatccctaaagaaaagaagagctttgtgtttccacccccattgattaccgcagttgcccaacccggaatcaaggccgtaccacctaggatgccggcggtgaatctggggcaggttccacctaagcaccccagatctcccataccatatcatctagggtcgctgcccgaaggtatgacaccaaatttctccccctctctgtccctgttaacaatgcaaccgccggccctgagtccactgctccgcgaaggagagctgctgggtacccatatcagcgggacctgccatgaacttaaagcagaggacgaggtgcaaatatag

SEQ ID NO: 184644 - DNA, 2130 bp, synthetic construct
  misc_feature 1..2130: note = Description of Artificial Sequence: Synthetic coding sequence
  source 1..2130: mol_type = other DNA
atgagcccctgcggccggaagatgggcgagggccggcagcagcggagggcaccagtggggaagctgttgctgcttcccggacgtagagacacgcctcacgggaggtccggtagcagcggcgcaaggacgcaacgttcccttctctggctgctggtacacgtttggctgtgggcagcttccggctccagcgcccagcttttcaaccttaccctgagtgtggacgaaggactgcccccagacacacttgtgggggacataagggcaggattgcccgcagcccagcagcaggaaggctccggcttcttcttgtccgaggatagcgatgattcccctctactggatgacttccacgtacacccagacacaggaatcattagaacggcccggagactcgaccgcgagcggagggaccattactcctttgtggctgcgaccttgctcggcgccgtggtgcaagtggaaatacgggtgaacgatgtcaatgaccattcaccccgcttccctcttgattcgctccagctggatgtctccgaacttagccccccaggaacagcatttcgcttgccagttgcgcacgacccggatgcgggcttgttctcgacccaggggtacacattggtgcagcccagtgatctgcccaaggatcctgccgggccattttttcagcttcgctaccgtaccccgggcccccttccttctccgctgctgcccgggtcgtcatcccctctggagcctctggatctagtcctgctgaggcgcctggatcgggaggaggcagctgcccaccgactgcaaatcgaggcttgggatggaggccggcctaggcggacaggtcttctgagtgttgaactccgtgtcctggatgagaacgacaatcctcctgtgtttgaacaggacgaataccgcgctgctgtgcgggaggatgctcagcccggtgcggaggtgtgtagggtgagggcaacagatagagacctgggccccaatggtttcgttcggtactctgtacgagcccgacaggtgcccggagccgggagtgggggcggggcactgggagacgcagcgtatttcgccgttgaggaactgagcggtgtggtccgagtttggaggcctctggaccgcgaggctcaggcatggcaccagttggtagtagaagcgcgggacggcggcgccgagccagaagtggctactgtgagggtgtcgattgccgtcttagacgtgaatgacaaccgacctgctattcatgtgctgtttctcacagagggaggggtggcccgggtctcagagggtgcccgcccaggggattacgtggctagggtctcagtttcagatgcagatggcgactgggaaaaagaggatgaggccacgggggaactcggagtgggcttgggcgacggatccattagtctcagtctcgagggaggggagggggactttgctctcctccccgggggcccccctggggtgttcttcctttgtgtcgaggggcccctggatagggaatcacgggatctgtacgagttattgttggttgccactgatgctggaagtccaccactgagtacagaggagactctgctgctacgagtggccgacctgaatgatcagccacctctgttcagtcagcagcactacaaagcaagcgtgtccgaagctgccgccccagggaccgttgtgatgtgggtcagtgcgtccgacgctgacgaagccggaagtgaccatgcctggctgcgttacaccgtcgtgcagctgtctgctccgtgtaatctcggtagcctccagagcaagatggtgcacaccgcagagtgcggacccagcttcgctattgacagtgaatcaggagcgatttctaccattcggacgctggacagggaggtccaggaagcggtggaattaaaggtggtggctcaggacctgggagaacctcccttgagtgctacttgcctcgtcagcatcactgtagacgatgtcaatgataatgaacccatcttttggaggcaggtgtataatgccaccattgctgaacacgcacccgtcggccattgtttcttgcagctgatttccgcccaggtagcatttgtgaagattaagcagaagcagaaggaaattcaggagaagcaaaatctggcatag

SEQ ID NO: 184645 - DNA, 2109 bp, synthetic construct
  misc_feature 1..2109: note = Description of Artificial Sequence: Synthetic coding sequence
  source 1..2109: mol_type = other DNA
atgggcgagggccggcagcagcggcgggcccccgtgggcaagctgcttctgctccccggcaggcgcgataccccacacggacggtctgggagcagcggggcccggacccagaggtcactcctgtggctcctcgtgcatgtgtggctttgggccgcctctgggtccagtgctcagctctttaacctcacattaagtgtggatgagggacttcctcccgacacattggtgggcgacatcagggcaggacttcctgcagctcaacagcaggaggggagtggattctttctttctgaggactcagacgatagcccgttactggatgattttcacgtgcatccagacacaggaatcattagaaccgccagaaggctggaccgtgagcgcagagatcattattcatttgtagcggccaccctcctgggagccgtggtacaagtggagatcagagttaacgacgtcaatgaccactcacctcgctttcccctggacagcctgcagctcgacgttagcgagctgtcccccccaggcaccgctttcagacttcccgtagctcacgatccggatgccggcctgttcagcacccaaggttacactttggttcagcctagtgatctgccaaaagaccccgccgggcctttttttcagttgcgctataggactcccggccccctgccgagtcctctgctccctggctccagcagtcccctggagcccctcgacctcgtgttgttgcgtcgactcgatcgggaggaagctgccgcacacaggctccagatcgaagcctgggatggcgggagacccagacggacgggtcttctgagtgtggagctgcgagtgcttgacgaaaacgataacccacctgtatttgaacaggatgaatacagagcggccgtccgtgaggatgctcaacctggcgcggaggtctgccgcgtccgggccactgatcgggatctcggcccaaatgggtttgtgagatattcagtcagggcccggcaagtcccgggagccgggtcgggaggtggtgccctgggagatgccgcgtacttcgccgtcgaggagctgtcaggggtagtgcgcgtgtggagaccactggaccgagaggcccaggcctggcaccagctcgtcgtcgaggccagagacggcggagctgagcctgaagttgcaaccgttagggtctcaattgcagtccttgatgtgaacgataacagaccggccatacatgtactgttccttaccgagggtggcgtggccagagtaagtgaaggcgcccgccctggagactatgtggccagagtgtcagtgagcgacgctgacggcgattgggagaaagaggatgaagctactggcgagctgggcgtcggactaggcgatggcagtatttctctgtccctggagggcggcgagggggactttgccctcctgcctgggggccctcccggagtgtttttcctctgcgtcgagggccctttggatcgtgaatccagggacttatatgaattgttgttggtcgccacagatgcaggatcaccccccctaagcaccgaggaaacgctgctgttacgtgtcgccgatttaaatgatcaacctcctctgtttagccagcaacattacaaagcctccgtttcagaagcagccgcaccggggaccgtggttatgtgggtcagtgcctcagacgccgatgaagcagggtctgatcatgcctggctgcgctataccgttgtgcagctgagtgccccctgtaacctcggatccttgcagtctaaaatggtgcacactgcagagtgtggcccttcctttgccatcgacagtgagagtggagccataagtaccattaggaccctggaccgagaggtgcaggaagcagtcgaattgaaagttgtcgcccaggacctgggtgagccaccactctcggccacctgcctcgtgtcaatcacagtggacgatgtcaatgacaacgagccgatcttctggcgccaagtctataacgcaaccattgctgagcacgctcctgttggccactgcttcctgcagctgattagtgcccaggtggcgtttgttaaaattaaacagaaacagaaggagatccaggaaaaacagaacttggcatag

SEQ ID NO: 184646 - DNA, 4101 bp, synthetic construct
  misc_feature 1..4101: note = Description of Artificial Sequence: Synthetic coding sequence
  source 1..4101: mol_type = other DNA
atgagcccctgcggccggaagatgggcgagggccggcagcagcggcgggccccagtaggaaagctcttgctcctacctggccgaagagatacacctcacggacgatccggaagctcaggcgccagaacccagaggagtctgctgtggttattagtccacgtgtggctatgggccgcttcaggatccagcgctcaactcttcaatctcaccctctccgtggatgagggactgccaccagacacattagttggagacatccgagcaggacttcctgcggcccaacaacaggagggatctgggttcttccttagcgaagactcggacgatagtccgctgttggatgatttccacgtgcacccggacaccggcatcatcaggactgcacgaaggttagatagggagaggcgggaccattacagcttcgtggccgcaactttactgggtgcagtggtgcaagttgagattcgggtaaatgacgtgaacgaccacagccccagatttcctctcgactcactgcaactggacgtgagcgagctgtccccccctggtactgcctttcgactaccagtggcccacgatccagacgcagggctcttcagcactcagggctacacactggtgcaacctagcgatcttcctaaagaccccgctgggccattttttcagctacggtatagaaccccaggtccactgccctctcccttgctccccgggagcagtagtcccctcgaacccctggacttagtgcttttgcgcagactcgacagagaagaggcggccgctcaccggttacagattgaggcgtgggatggcgggagaccaagaagaacaggcttactgagtgtcgaactgcgagtgttggacgagaacgataacccccccgtgtttgaacaggacgagtatcgagctgctgttagagaagacgcacagcctggcgcggaggtctgtagggtcagagccactgaccgggatctcggaccaaatgggttcgtccgctattccgtgagagccagacaagtgcccggcgcaggcagcgggggtggcgcgcttggcgacgcagcatactttgccgtagaggagctgtccggagtggtcagagtgtggagaccgctggatagggaagcccaggcgtggcatcaactggtcgtagaggcaagggacgggggtgctgagcccgaagtggcaacagtgagagtgtcaattgctgtactggatgtgaatgataatagaccggcgattcatgtgttattcctgaccgaaggcggtgtggctagggtctcagaaggggccaggccaggcgactacgtggcacgggtgtctgtatccgatgccgacggtgattgggagaaggaggatgaagctacgggagagctaggcgtagggctgggcgacggcagcatttcactaagccttgaaggcggagagggcgactttgccctcctccctggaggcccgcctggagtctttttcttgtgcgtggaaggcccccttgacagggagtcccgcgatctctacgagctactcctcgtcgccacagacgcaggatctccaccactcagcactgaagaaactctgctgctgcgggtagctgacctgaacgaccagccccctctgtttagccagcagcattacaaggcctctgtgtccgaagccgcagcccctggcacagtcgtcatgtgggtgtccgcctccgatgctgacgaggctggcagtgatcatgcctggctccggtatacagtggtgcagctctcagccccttgcaacctcggatcccttcagagcaaaatggttcataccgccgaatgcggccccagctttgccatcgatagcgaaagcggggcgatcagcacgattcgaactctggatagagaggtgcaagaggcagttgaactgaaggtcgtggcccaggacctgggtgaacctccactgtccgctacctgtctggtctccatcactgtggatgacgtcaacgataatgagccgattttttggcgacaagtgtacaacgcgaccatcgctgagcacgcccccgtgggccattgtttcttgcaggtcaccgcctcggacgccgacagcggtctatacggattcatcgagtactccttatacgacggatttcttagctacgaggctccacaagctttccgcatagacccacacgatggccagatttgcgtatcccaggatatagatcgcgagcgcgaccctgcaacttacgatctcttagtggaagctaaagacggcggaggacttagtgcacaggcattcgtcagggtggaccttgaggacgtcaatgacaatcaccccgtgttcaatccatccacctacgtgacttccattagcgacgaaacacaaccaggcacagagatcatcaacgtcttggctacggaccaagattcgggaatctacggtaccgtggcctacgaacttatcccaggaaacgtatctagtctgttcactattgattctacaactggcatcatctatctgacccttccattgagccatttggagagcaccactctttccttaatggtcagtgctcaggatggcggaggtctgacagccgtcatcaacgccgacgtcaccattcatatcttccaaacaaccctggcccccgccgagttcgagagaccgaagtatacattcctggtgtacgaggatgtccctgaagactctccaatcggcacagttaaagcgagagagcccctcaatagttctgaaccgatcttctaccggatcagctctggggacctgggggggaagttcagtatccacccccggttggggacaatcagaacaaggaagcccctggatcacgagactcagccagtggtcgtgcttacagtgcaggcccaactagggagcgccccggcatgctcctccacagaagtgaatattaccgtcatggatgttaacgacaatcaccctgcattccttagaacgtctgacgaaatccggatatcccaaactactccaccaggtacggccttatacttggcaagggcagaggatagggactccggtaggaatggactaatcagatacagtatagcatccccccagccaggggtgtttgcgatagaccgggccttgggggtcctgttcttgaacgggagcttaggggcaggagagcaacgggagctgactttgacactgcgcgctgaagatcagggtgtccacccacaagccgctctactagtgcttaccgtggttatcgaaaagagagagcacagcccttcatggacattcgagcacttggtgtaccaggtggaggtatccgaatccctgtcccctatgactcagatgctgcaaacgcaggctcacccactggggcctcagcgtgcagcctctcctctgagatatagcctggaaccaagcgttgacagcgccatgtttgggattaggccatatacaggctggatttacctgagacgacagttcgattatgagtcgacccaaacctacaacttccgcgtgtttgcttggatccccgaggacggttttctgcagaacgttagcacaacagtgatcgtaagggtgtgggatgagaatgataattctcccacctttctgcacgacgtattgttcttgaaggtggaagaatccccggtgccccagggcgtgattggcaaaatcaccgccattgatatggattccggcaagaacggacagctgctctatttcctcctgtcagatgggaagttttttaagatgaaccctaatactggcgaactcattaactgggtcgcactggatcgggaacatagagggcaccatgagatgacggtgctggtcactgatcggggatccccacctagaaacgcgactatggccgtgtatgtgagcgtcacggatattaacgacaataggccattcttcccccagtgcctaccaggaaaggagctccatgtgaaggttcttgagggccagcccgtgaacatgctggtgacaaccgtgttcgctaaggaccccgacgaaggtaacaatgccgaggtcacctattccgtgagctccgctaggccaatgcccctgaagggtaaaaccgcatttgggaaacagagctgtaaaaaacaaaccaataagcagactaagtcatag

SEQ ID NO: 184647 - DNA, 462 bp, synthetic construct
  misc_feature 1..462: note = Description of Artificial Sequence: Synthetic coding sequence
  source 1..462: mol_type = other DNA
atgctggagaagctgatgggcgccgacagcctgcagctgttccggtcgagatacaccctgggtaagatctattttatcggctttcaacgcagtattctcttaagtaaatccgaaaacagcctcaattctattgcaaaagaaacagaggagggccgggagaccgtgacacggaaagaaggatggaagaggcggcacgaggacggatacctcgaaatggcccagcgacatctgcaacgctccctgtgcccttgggtttcctatctccctcagccttacgccgaactggaagaggtctccagtcatgtcggaaaggtgttcatggccaggaactacgagttcctggcatacgaggctagcaaagatagaagacagcctctagaaagaatgtggacctgtaattacaaccagcagaaagatcagagttgcaaccacaaagagatcacatcaaccaaggccgaatag

SEQ ID NO: 184648 - DNA, 249 bp, synthetic construct
  misc_feature 1..249: note = Description of Artificial Sequence: Synthetic coding sequence
  source 1..249: mol_type = other DNA
atggcccagcggcacctgcagcggagcctgtgcccctgggtgagctacctgccacagccctacgccgagctggaagaggtctcctcacacgttggcaaggtgtttatggcacggaactacgaattcctggcctacgaagcgagcaaagaccggcgccaacctctcgaaagaatgtggacttgtaattataatcagcaaaaggaccagagttgcaatcataaggaaattacatccacaaaggcggaatag

SEQ ID NO: 184649 - DNA, 378 bp, synthetic construct
  misc_feature 1..378: note = Description of Artificial Sequence: Synthetic coding sequence
  source 1..378: mol_type = other DNA
atgcggaccgccatctggaagtggcaccggggcatctaccgggaccactacgtgttggggtccctgaccttcctctcccccatgcagcgtgcaggtactagcaatcagtggaacatgggcaaagttatgactctggattctggggacgaagtaacatttcataagacctggcccaccgagactggtagtccatatcggttggaagaggtctccagccacgtaggtaaagtgttcatggctcggaactacgagtttctggcatacgaggccagtaaagaccggcggcagcccctggagaggatgtggacctgtaactacaaccagcagaaagaccagtcctgtaaccataaagagattacttcaactaaggccgagtag

SEQ ID NO: 184650 - DNA, 1725 bp, synthetic construct
  misc_feature 1..1725: note = Description of Artificial Sequence: Synthetic coding sequence
  source 1..1725: mol_type = other DNA
atggagctgaaggccgaggaggaggaggtgggcggcgtgcagcccgtaagcatccaggccttcgcctcctcatccacactccacgggctggcccacatcttcagctacgagaggcttagtctgaagcgagcattatgggcgctctgtttcctggggtcacttgcagtcttattgtgcgtttgtacagaacgggtacaatactatttccactaccaccacgttactaagctggatgaagtggccgcaagtcagctgacctttcccgcagtaaccctctgtaatcttaatgaattcagattcagtcaggtttccaagaacgatttataccacgccggggagttgttggcgctgctgaataacaggtatgagatcccagatacccaaatggccgatgaaaagcagctggagatcctgcaggacaaagccaacttccgctcattcaagccgaaaccgttcaatatgagggaattctatgacagggccggccacgatatacgtgacatgctcttatcatgccatttcaggggcgaagtctgtagtgccgaggactttaaagtagtattcaccagatatggcaagtgttacacattcaattccggcagagatgggcggcccaggctcaagaccatgaaggggggaacaggtaacgggctggagatcatgctggacatccaacaagatgaatacctgcctgtgtggggcgaaaccgatgagacatcttttgaggccgggatcaaggtgcagattcacagtcaggatgagccaccgttcatagaccagctcggtttcggagtggcacctgggttccagaccttcgtggcatgccaggagcaacgtctgatatatttacctcctccatggggcacttgcaaagccgtcactatggattctgacctcgacttttttgattcatattcaattacggcttgtaggattgactgtgagacaaggtacctggtggagaattgtaactgtcgtatggttcacatgcccggagatgcaccatactgtacgcccgagcagtacaaagaatgtgcggatcccgctctcgacttccttgtcgagaaggaccaggaatactgtgtttgcgagatgccctgcaatttaacacgatacggcaaagagctatctatggtaaagataccctccaaggcttccgctaagtaccttgctaaaaaattcaacaagtccgagcagtatataggagagaacatactggtgctcgacatttttttcgaggttctgaattatgagaccattgaacaaaagaaagcatatgaaattgccggccttttaggcgaactgctgatgactcctgtgcctttttcctgccatggacatggggtcgcaccttatcaccctaaggccgggtgttcactgctgtcccatgagggccctcccccccaaagacccttccctaagccctgctgcctgggcgatattggtggccaaatgggcctgttcataggcgcatcaattctgacagttctcgaacttttcgattatgcttacgaggtgatcaaacacaaactctgccggcggggtaagtgccagaaagaagcgaagcgcagctctgccgataaaggtgtggcgctgagtctagacgacgtgaaacgccacaacccctgtgagtctcttcggggtcatcccgctggcatgacctatgctgctaatatcttaccccaccaccctgcacggggcaccttcgaggactttacttgctag

SEQ ID NO: 184651 - DNA, 594 bp, synthetic construct
  misc_feature 1..594: note = Description of Artificial Sequence: Synthetic coding sequence
  source 1..594: mol_type = other DNA
atgcgggtggtggtgatcggcgccggcgtgatcggcctgagcaccgcactgtgcatccacgaacggtatcactctgtcttgcagcctctggatatcaaagtttatgcggaccgttttacgccccttaccaccaccgatgtggccgccggcctttggcagccctatctctcagaccccaacaatccacaagaggcagattggtctcagcagacatttgactatcttctcagccatgtccattctcctaacgcagaaaaccttgggctgttcctgatctctggttacaacctgttccatgaagccatccccgaccctagttggaaggatacagtgctgggcttcagaaagctcaccccccgggaacttgatatgtttcccgactacggctacggctggtttcacaccagtctcattttggaaggcaaaaactatctgcagtggctaacagagcgcttaacagaaagaggagtgaagttttttcagcgcaaagtagaaagcttcgaggaggtggcaagagaaggggccgatgtcattgtgaattgcaccggcgtctgggccggcgccttacaaagggacccattgctgcagccatag

SEQ ID NO: 184652 - DNA, 2400 bp, synthetic construct
  misc_feature 1..2400: note = Description of Artificial Sequence: Synthetic coding sequence
  source 1..2400: mol_type = other DNA
atgaagcccagccccgccggcaccgccaaggagctggagccccccgctcccgcccgcggagagcaacgaacagccgagcccgaagggcggtggcgagaaaagggggaggccgatacagaacgacagcgcacccgcgagagacaggaggcaaccctcgcaggtctggctgaactggaatatctacggcagaggcaggagctgctggtaaggggggccctgaggggggccggcggagcgggtgccgccgcgccccgagccggggagctccttggcgaggctgctcagcgctccagactcgaagagaaatttctggaagagaacatactgctcctccgcaaacaattaaattgcctgaggcgcagggacgccggtctgcttaatcagctgcaggaactcgataagcagatctcagacctgaggctggacgtcgagaaaacgagcgaggaacacctggaaactgattccaggccaagttctggcttctatgaactctccgatggcgcctcaggatccctgagtaacagttccaatagcgtgttttccgaatgcctgtcgtcctgtcacagcagcacgtgtttctgtagcccgttagaggccacgttatctctctctgatggctgtcccaagtccgctgatgttaatccgaaataccagtgcgatctcgtctcgaaaaacggaaatgacgtctacagatatccgtcacctctacatgcggtcgccgtccaatcaccgatgttccttctatgcctcaccggcaatcccctgcgtgaagaagaccggctgggaaatcacgcatcggatatttgcggtggaagcgagttggacgccgtcaagacagattcctctctcccttccccttctagtttatggtcagcgtcgcatccctcctcttccaaaaagatggacggatatattctgtctcttgtgcaaaaaaagacccacccggtacgaactaacaagccaagaacctctgtcaacgcagacccaacgaagggtctattgcgaaacgggtccgtgtgtgtgcgcgcccctgggggtgtttcccaggggaacagtgtaaacctgaaaaacagtaagcaggcctgtctccctagtggtggcatcccttcgcttaataatggcacattctcacccccaaagcagtggtctaaggaaagtaaagccgagcaggccgagtcaaagcgggtgcccttgccagaggggtgtcctagtggcgccgcgagtgatctgcagagcaaacatctgcccaaaactgcgaaaccagcaagtcaggaacacgcgagatgctcggcaattggcacaggtgagtccccaaaagaatcagcacagctgagcggcgccagcccaaaggagtctcctagcagagggccggcacctcctcaggaaaacaaggtggtccagccactgaaaaagatgtcacagaagaactctcttcagggtgtaccacctgctactcctcctttactgtctaccgcttttcctgtggaagagagaccagccctggacttcaagagcgaggggagcagccagagcttggaagaggcccatctcgtcaaggcacaatttatcccaggccagcaacctagtgtccggctccacagagggcatcgaaatatgggggtcgtaaaaaacagctccctgaagcatcgtggcccagcattacagggcctagagaacggcctcccaactgttcgggaaaagactcgggcaggttcaaagaaatgtaggttccccgatgacctcgacactaacaaaaagctcaagaaggcctcctccaagggaaggaaatccggaggcggtcccgaggcgggcgtccctggccggcccgccggcggcggacaccgggcgggctctagagcccacgggcatggtcgggaggctgtggtggccaagcccaaacacaagcgaactgattaccgtcggtggaagtctagcgcagagatcagctacgaggaggctctgcggagagcaaggcgagggaggcgtgaaaacgtggggctttaccctgcacctgtgccgctgccgtatgcctcaccttatgcatacgtggctagtgactctgagtactctgccgaatgcgagagcctattccattccaccgttgtggacacttctgaggacgaacagtccaattacactaccaattgctttggcgattcagagtctagcgtgagcgagggcgagtttgttggcgaatccaccaccacctccgactccgaagagagtggtggcctgatttggtcacagttcgttcagacgctaccgattcagacggttacggcacccgacttacataatcacccggccaagacatttgtgaagataaaggcatcgcacaacctaaagaagaaaatcctgaggtttcggagcggcagcctgaagctgatgaccactgtgtag

SEQ ID NO: 184653 - DNA, 2511 bp, synthetic construct
  misc_feature 1..2511: note = Description of Artificial Sequence: Synthetic coding sequence
  source 1..2511: mol_type = other DNA
atgaagcccagccccgccggcaccgccaaggagctggagccccccgccccggctaggggagaacagaggacagctgagcctgagggccgctggcgagagaagggcgaagcggacaccgaacgtcaacgcactcgcgaaaggcaggaggccacccttgctggactggccgagctggaatatctccgacagcgacaagagctgcttgtccggggggccctgcgcggagccgggggagcaggggctgccgcgccaagagctggggaacttctcggagaggccgcccagagaagcagacttgaagagaaatttctcgaagagaatatactcctgttgaggaagcagctgaattgtctgcgcaggcgggacgccgggctgctcaaccagcttcaggagttggataagcaaatatccgacctccggcttgacgttgagaagacaagcgaggaacacttggagaccgattcccgacctagctcaggcttttacgagctcagtgatggcgcctctggtagcctgtctaatagttcgaattcagtgttcagtgagtgtttgagttcttgtcacagttctacctgcttctgtagcccactggaggcaactctgagcttgtcagacggatgccctaagtcggccgatctaattgggctgctggagtataaagaagggcactgcgaggaccaggcatcgggcgcggtatgccggtccctgagcaccccgcagttcaacagcctggatgtgatcgccgatgttaacccgaagtaccaatgcgaccttgtctccaaaaacggcaatgacgtatatcgatatcccagcccactgcacgctgtagccgttcagtccccaatgtttttgctatgtctcactggaaaccctctgagagaagaagaccgtctaggcaatcacgcctcggatatctgcggaggaagtgagttagacgcagtcaaaaccgactccagccttccctcaccatcttccctttggtctgcgagccatccctcttccagcaagaaaatggatgggtacattctgtctttggtgcagaagaaaacccatcctgtccgtactaacaaacccaggacatcagtgaacgccgacccgactaagggcctcctcagaaatggctctgtatgtgtccgggcacctggtggagtctcacagggcaatagcgtcaatcttaagaatagtaaacaggcctgcctccccagtggggggatcccgtccttgaataacggaacttttagccctcccaaacagtggagtaaggagtcgaaggccgagcaggctgaatccaaacgcgtgcccctacctgaagggtgtccatcgggagcagcaagtgatctgcagagcaagcatctgccaaaaaccgccaaaccagcatcacaggaacatgcacggtgctccgcaattggtaccggcgagagtccgaaagagtccgctcaactatccggagcctcgcccaaggagtcccctagccgagggcccgccccccctcaggagaacaaggtagttcagccgttgaaaaaaatgtctcagaaaaattcactgcagggggtccccccagccacacctcccctgctcagtacagcatttcctgtagaagagcggcctgcccttgattttaagagcgaagggtcgtcacagtcccttgaagaagcacatctggtgaaggcccagtttatacctgggcagcagccctcagtgaggttgcatcgtggacaccgcaacatgggtgtggtgaaaaacagttctctaaagcacagggggccagctctccagggcttggaaaatggactgcccacggtacgggagaaaacacgggctgggtccaagaagtgccggtttccagacgatttagacacgaataaaaaactcaagaaggcatcatctaagggtagaaagtcaggcggcggaccggaggccggcgtgcccggccgccctgccgggggcgggcaccgtgcaggcagtcgggcccatggccatggacgggaggcagtggtagcgaagcccaagcataagagaacagactatcgccgctggaaatcttcagccgagatatcttacgaggaggccttgagaagagctagacggggaaggcgcgagaatgtaggcctgtatcccgcccctgttccgctaccgtacgcttccccatatgcctatgtggctagcgatagcgagtattcggccgagtgcgagtccctgttccactccaccgtggtcgatacgagtgaagatgagcagagcaactacaccacaaactgctttggggattccgaatccagtgtgtcagaaggagagttcgtgggcgaatcgactaccacatccgattcagaggaaagtggcggactgatctggtcccagttcgttcagaccctgcccatccagaccgtgaccgccccggacttgcacaatcacccagccaagacattcgtgaagatcaaggcctcccacaaccttaaaaaaaaaatcctgcgcttcaggtcaggatcactgaagctcatgactacagtttag

SEQ ID NO: 184654 - DNA, 2325 bp, synthetic construct
  misc_feature 1..2325: note = Description of Artificial Sequence: Synthetic coding sequence
  source 1..2325: mol_type = other DNA
atgtggacccccggcggcccccccggcagcgccggctgggaccggcgccgtctgggcgcgcggctaagggcagcctttgcagggcttcaagagttgcaggggctccgggctacgcagcaggaacgggtcaggggcgctcttgcactccagcccccccctgcacccgcagcgccctgcgggccccacggtctgcacgggcctgagcagcagctcgaggcggctctagccgcactgcaggaacagctaagccgcctgcgccaacaggatattgggttaaagactcaccttgaccagcttgatctccaaatctctaagctgcagctggatgtggggaccgcatctggcgaggccctggacagcgattccaggcctagcagcggtttttacgagatgtctgacggaggctcctgcagcctgtccaccagctgtgctagcgtttgcagcgatcatatttccccttccctggggtctcttctccccgtcgcacaggcccacaaagcaagaccttccatgggagactggcgtccacggagtgtggatgaaaccacagtgcccgcatggaggcctcaggctacagaagagggtgctagaccccctggatccgtagaagatgctggccagccctggggcactttttggcctcgccctgtgagtacaggcgacctggatagggcactgccagccgataccggcttgcagaaggcctccgctgacgcggaactgttgggactactgtgccaaggagtcgacattccattgcatgtcccagatccaaaatatcgacaggatctggtaagccagggtgggcgtgaggtgtacccgtaccctagccccttgcacgctgttgccctccaatccccacttttcgtcctgacaaaggagaccccccagaggggtgggcctagctttccacgagaaagccccagggggcccgccggcttaaacaccattcagacaggccccgtgctggaagcagggcccgcacgggcacgcgcttacattgacaggctgctgcacctgtggggccgagagacacccgccaagggatctgaaggcgagcagggacctctccggcacgcagcctcacctagcccacagcgccaaggcgggtggtctactgatggcggtggtcggctgctggtcttcgccccggggagagaagacgagggaggaccggcacagtcgagaggcgctggccgggggggcccccaacaacagggatacatgccgctggagggcccccagcaatctggcagtcttcctgaggagggtagcaagccctccaactcgtgtgtgctaagggagaccatggtgcaagcaagcccttcctcaaaggcccagcagaccccctctgcacaggactatgggcgcggtaacataattagtccttctaggatgctcgataagtccccatccccagcctcggggcattttgcccacccctccttcgctgcatcactcaagatgggcccacctaagagtaaagcagaaaagatcaaacgtagtcccatggacaaggtcctaaggttcgcccgccagccactgctgcttctggatagacccgagggcgctcatgctgccccacagccctcattagagtgggaccccgcccactggccaaccgggcggggtggactgcagcgcagaccagctctggcctgggaggcacccgggaggagctgctcagagtccaccctctatccaatgcctgtgctagtacccttggccgtcgccccccaggaaagccaccgaacttcagcccaggcccttttcccatttgaagcctcactgctgacctcggtggcaagaaggaagcaccgacggtggcagagtacggttgagattagcgctcgggctaggcttgcaagttgccctgagtctaacctgggtccaccgcgcccagtcgctcgcagggcgggcgggcccttagctagaggtcgcccttcacttgtccgccaagacgcctacacccggtcggatagtgagcccagcaaacattctgcagaatgtgaccccaggtttccatctgtgatcccggagacttccgagggggagtctagcgaccacaccaccaacagatttggagacagagagtcctcgtccagtgatgaggagggtggtgctcagagcagggactgtgatttggctctgggctacgtggcagcggggcacgctgaactggcttggactcaggaggcgcctgttagcagcggtcctctcctctcccccgtgccaaagctgtgccggattaaagcatccaaggcactgaaaaaaaagatccggcggttccaacccaccgcattaaaggtcatgaccatggtctag

SEQ ID NO: 184655 - DNA, 843 bp, synthetic construct
  misc_feature 1..843: note = Description of Artificial Sequence: Synthetic coding sequence
  source 1..843: mol_type = other DNA
atgtggacccccggcggcccccccggcagcgccggctgggaccggcgtagactcggcgcgcggcttcgcgccgccttcgctgggctccaggagcttcaaggcttacgggccacacagcaggaaagagtaaggggggctttggccctgcagccacccccggcacccgctgccccatgtggcccccacggcctgcacggccccgagcagcagctggaagccgctctggccgcactgcaggagcaactatcccgactcagacaacaagacataggcctaaaaacccatctagatcagctcgatcttcagatcagcaagctgcaactggacgtagggaccgccagcggagaggccctagattctgactctcggccatcatccggtttctatgagatgtctgacggcggtagctgtagtctctccaccagctgcgcatctgtgtgttccgaccatatctcaccctccttgggctcgttacttcccgtcgctcaggcgcataaagcaaggccaagtatgggtgactggaggccacgctccgtggacgagaccacagtgcccgcctggcggccacaggcaacagaagaaggggcgcgacccccaggctctgtagaggatgcgggccagccatgggggactttttggccccgccccgttagcacggaattgtgcaatgcccccggcgaattagacatgcacgcgccacctgccggctgcacgtcatcatccttgactggagtgggaagtgggctgcggggtaaatgcggactgtgtggctgccagctgcccttctgcagtgtcaatacatcctccaaaaccaaaagtagtggaatttcaagacagcagtag

SEQ ID NO: 184656 - DNA, 1890 bp, synthetic construct
  misc_feature 1..1890: note = Description of Artificial Sequence: Synthetic coding sequence
  source 1..1890: mol_type = other DNA
atgatccgggccttcagcttccccgtgagccccgagcggggccggttgagaggttggcttgaaggctccctggctggcctttgtgagctgcactggcttagggagaggcaagaatacagggtgcagcaggcgctcaggctggctcaaccaggtatggggggtgctgaagcggaggacgaggaggacgctgatgaggatgaagatgctgcagctgctcgacgggctgctgcagctttggaagaacagctcgaggcgcttcctggacttgtgtgggatctgggtcagcaactaggcgatctgtctcttgaatctggagggcttgagcaggagtctggccgatcctctgggttctacgaggaccccagctcgactggcggacctgacagcccacctagtaccttctgtggcgactcaggtttcagcgggtcctcctcctatggtcgtctaggaccctcagagccccgaggtatctacgccagtgagcgccctaagtccctgggcgatgcctccccgtccgccccggaggtcgtgggcgcccgcgctgcagtgcctaggtccttcagcgcaccgtatccgacagctggaggcagtgccggaccagaggcctgctcctctgccgaacgacgagcacgggccggccctttccttacgcccagtcctctgcatgcggtagccatgcgttcgccacgcccctgtggtcggccccctaccgacagccccgacgccggaggagccgggagacccctggacgggtacatctctgccctactgcggcgacgccgccgaagaggggccggccagccccgcacatctccaggtggcgcagacgggggcccccggaggcaaaatagcgtgagacaacgccccccggacgcatccccaagtcccggtagtgcccgcccggcccgggaaccaagcctcgaacgagttggtggacatcctactagtccagcagcactaagccgggcctgggccagcagttgggaatcagaagccgcaccagagccagcagctccaccagcagccccgagtccccccgacagccccgccgagggtcggctcgttaaagcacaatacatccccggcgcccaggcagctactcggggactcccaggcagggctgcccgtcgcaaaccccccccacttacccgtggacggtccgtcgagcaatcccctccacgggagaggccgagagccgccggccggcgtgggagaatggcagaagcttccgggaggagaggttcacccagggccaggaaagcgtcgaggtcacagtccgaaacctcccttctgggccgagcttcagccgttcccagcggccctcctaagtatccaacagccgagcgtgaagagccccgtcctccacgtcctcgcaggggccctgctcctacattagcggcccaagccgctgggagttgccgccggtggcggtccacggctgaaattgatgctgccgatgggcgcagagtgagaccaagggccccagcagcccgggtgcccggtcccggcccctccccctctgcccctcagcgccgcctgctctacggttgtgctggttcagattccgaatgttcagcagggaggctcggccccctggggaggagaggtccggccgggggcgtcggggggggctacggagaatcagaatcttctgccagcgagggtgaatctcctgctttcagtagcgctagtagcgactcagatgggtctgggggcctggtgtggcctcagcaactagtcgcagccactgctgcatccggcggaggcgccggtgccggcgcgcccgccgggcccgcgaaagtgttcgtaaagatcaaagcgtcccatgcacttaaaaagaaaatccttcgctttcgcagtgggagcttaaaggtgatgacaactgtctag

SEQ ID NO: 184657 - DNA, 2025 bp, synthetic construct
  misc_feature 1..2025: note = Description of Artificial Sequence: Synthetic coding sequence
  source 1..2025: mol_type = other DNA
atgaacagcggcgccatgcggatccacagcaagggccacttccagggaggaatccaagttaaaaacgagaaaaataggccctcactgaagagcctgaagaccgataaccgtccagagaaaagcaaatgtaagcctctgtggggcaaagtattctacctggacctgccctctgtcacgatctctgaaaagttacagaaagatatcaaggacttgggcgggcgcgtggaagaattcctgagcaaagatataagctacctaatctctaataagaaggaagccaaatttgcccaaaccttgggtcggattagtcctgtgccttccccagagagtgcctatacagccgagaccaccagccctcacccgtcacatgacggatcttcctttaaatcccctgacactgtgtgtctcagtagaggcaaactgctagtggagaaggctattaaagaccatgactttatcccgagtaactcgattctgtcgaatgccctgagctggggagtcaaaatcctgcacattgatgatatccggtactatattgaacagaaaaagaaggaactttaccttctgaagaagtcctctacttccgtacgagacggaggcaagcgtgtgggctcaggagcccagaagacacggaccggcagattgaaaaaaccttttgtcaaagtagaggatatgtcgcagttgtaccgccccttttatctacaattaactaacatgccctttatcaattacagcatccagaagccatgcagccccttcgacgtcgacaagccaagtagtatgcaaaagcagacccaggtcaagctgcgtatccagacagacggcgacaaatacgggggcacatctatccagctccaacttaaagagaagaagaagaaggggtactgcgaatgctgcctgcagaaatatgaggacttagagacccatctcctctctgagcagcatagaaacttcgcccaatctaaccagtatcaggtagttgacgatattgtgtctaagctggtcttcgactttgtcgagtacgaaaaggacacaccaaaaaaaaaaaggattaagtatagtgttggtagcctatccccggtgtctgcttctgtgctgaaaaaaactgaacagaaggagaaggtagagctccaacacatctcccaaaaggattgtcaggaggacgatacaactgtaaaagagcagaactttttatacaaggaaacacaagagaccgaaaagaaactgctttttatttcagagccgattccgcatccctctaatgagctaagaggcctgaacgaaaaaatgtctaataagtgttccatgctgagcaccgcggaggatgacatccggcagaattttacgcagttgccgcttcacaaaaataaacaagagtgcatactggatataagtgaacacactctctctgaaaatgatttggaggagctgagagtggaccactataaatgcaacatccaggcctccgtccacgtcagtgatttttccactgacaatagcggctcccagccgaaacagaagagtgataccgttttgtttcctgcgaaagatctcaaggagaaggacttacattccattttcacacatgattctggtctaattactatcaactcaagtcaagagcacctcacagttcaggccaaggcccctttccacactccaccagaggagcctaacgaatgcgactttaagaatatggattcactgccctccgggaagattcataggaaagtcaagattatcctgggccgcaatagaaaagagaatttggagcccaatgcagaattcgataagagaacagaattcatcacacaagaggagaataggatctgctccagtcccgtgcagtctcttctggacctttttcaaacttctgaggaaaagtcagaattcctcggtttcacctcctacactgagaaatcgggaatctgtaacgttctggatatctgggaagaggagaacagtgacaacctgttgacagccttcttctcaagtccaagcacgtctacgttcactggcttttag

SEQ ID NO: 184658 - DNA, 654 bp, synthetic construct
  misc_feature 1..654: note = Description of Artificial Sequence: Synthetic coding sequence
  source 1..654: mol_type = other DNA
atgaacagcggcgccatgcggatccacagcaagggccacttccagggaggcatccaggtcaaaaacgagaagaatcgcccatcgttgaagtccctgaagacggacaatcgccctgaaaaatccaagtgcaaaccactttggggtaaggtcttctacctcgacctgccttctgtgacaatctctgagaagttacagaaggacatcaaagatctgggcgggcgggttgaggagttcctgtctaaggatattagttatctgatttcaaacaagaaagaagccaagttcgctcagactctaggcagaatatcaccggtgccttctcctgaatctgcgtatactgcagaaacaacgagcccgcatcccagccatgatggttccagtttcaagagcccagataccgtgtgtctctcccgcgggaagctgctggtcgagaaggcaatcaaggaccatgacttcattcccagcaattctattctgtcgaacgcactcagctggggagtcaagattcttcatatcgatgatatcagatattatatcgagcagaaaaagaaggaattatatctgctgaaaaaatcctccacaagcgtgcgagacggcgggaagcgcgtagggtccggcgcacaaaagacacgaaaagcgcttcagtctatttag

SEQ ID NO: 184659 - DNA, 1848 bp, synthetic construct
  misc_feature 1..1848: note = Description of Artificial Sequence: Synthetic coding sequence
  source 1..1848: mol_type = other DNA
atgagcgagcccggcaagggcgacgactgcctggagctggagagcagcatggccgagagcagactgagggctcccgatctcggtgtctccaggtgtctgggaaagtgtcagaaaaatagtcccggtgcccgaaaacatccctttagcggtaaatccttttatttggacctgcccgccgggaagaacctacagttcttgacgggcgccatccaacagcttggcggggtgattgagggcttcttaagcaaggaggtatcatatattgtgagctcaaggagggaggtcaaggcagaatcttctggaaagagtcacagaggatgtccatcccccagccctagtgaagtacgagtggagacaagcgcaatggtcgacccaaaaggtagtcacccacggccatcacgtaagcctgtcgattctgttcccctgtctcggggcaaagagcttttacaaaaagccatcaggaaccagggctccataagtggcggaggctcagggggaagttcatcattgctcaccaatgctcgatcatggggtgtgcggatcctccacgtagacgaaatgatgatgcatgtgcaacaactgtccttagccagcttgtgcgtgaagaaacagcagcctaaaaagcctgaagggacctgccccgccgccgagagcaggactagaaaagttgcccgcttaaaggcgccttttctgaagatcgaagacgaatcaagaaaatttcgccctttccaccatcagttcaagagcttccccgaaatttccttcctgggtccgaaggatgcctctccattcgaagccccaaccacactggggtccatgcaccacactcgggaatcgaaagacggcgagcccagcccgcgctctgccgcccatacaatgccacgacggaagaaaggatactgcgaatgctgccaggaagcttttgaagaactgcacgtccatctccaaagcgcccagcaccgttcatttgcactggaggctcatttatacgccgaagtggacagaattatcgcccaattgagccactcgttcgccgacatccctttccaggctgggctgccgaggtggagcggatccccggcttctgactgtgaccctctgtgtcctgagacgctgcaccctcaccagcctagtcatccaagagctgccagcccgagaataaggaaagaggatagctgtcaagcctccgtgactcaggggcgtgctgcaggacagcaaagatggaccgaatcgctagacggggtgatgggtccgccggcatctcatacctgcgtgtcagctactacattgttgcccgcgctgccgaaaggttctagggagcagggctgtctctgcccatgcccagctagcttcacccagtcccatctggtcacttccctggccttacttcccggcgagtggagccctgctgaagacatgcccttgcatccaagtcaggagaactcctttgctccggccgacatccccgttaagggacctttacttttcccagaagccaggccgtggttaatgtctgcccgatgttgggtcagaccctttccgtttgtaacgtgggggtgcctgatccctcacgatacaacaccacttcatgaagaggtcagtccatgcccctgcctgcgactaggatatttatacctgctgctgacccagtcgctgtggtgtagggtgagggtgccttcattaagcacagccgggccaatcccaagaacctcccatccctgtaccctcgccttcccaagctacctcaacgatcacgacctcggccacttgtgccaggccaagccacagggatggaatacccctcaaccattcctccactgcggctttctggcggtcgatagcgggtag

SEQ ID NO: 184660 - DNA, 1296 bp, synthetic construct
  misc_feature 1..1296: note = Description of Artificial Sequence: Synthetic coding sequence
  source 1..1296: mol_type = other DNA
atgagcgagcccggcaagggcgacgactgcctggagctggagagcagcatggccgagtccaggctaagggctccagacctcggcgtcagtaggtgtctcggcaagtgccaaaagaattctccgggcgcgcggaaacacccattctccggaaagtcattttacttagatctccctgcaggcaagaatctccaattcctgaccggagctattcagcaacttggcggagttatcgagggctttctttcgaaagaggtgagctacattgtcagctctcgaagagaggtgaaagctgaatcttccggcaagtcacatcgcggatgcccttcgccctccccaagtgaggtgcgagttgagacctcagcaatggtggaccctaaaggctcacatccacggccttccaggaagccggtggacagtgttcctctgtccagggggaaagagctgctgcagaaggcgattcggaaccaaggatcgatctccggcggcggtagcggcgggtcctcctctctcctcaccaatgctagaagctggggcgtgcgcatattacatgtcgacgaaatgatgatgcacgtgcaacagctatctctcgcctccctttgcgtcaaaaagcagcagccaaagaagccagaggggacatgcccagctgccgaatctaggacacgtaaggtggcccggctgaaagctccttttctgaaaatagaggacgaaagtagaaagtttaggccatttcaccaccagtttaagagttttccggagatctcatttctggggccaaaggacgcttccccgttcgaagcacccaccacactgggctcaatgcaccacactcgggagagcaaggacggggagccttcacctagaagcgcagcacacacaatgcccagaagaaagaaaggctattgcgagtgttgccaagaggcctttgaagaattgcatgtacacctccagtcggcccaacacaggagtttcgcgctagaagctcatctctatgccgaagtagacagaatcattgctcagctgagccactcattcgcggatatccccttccaggcaggccttcctaggtggagcggcagtccagcaagcgactgcgatcccctttgtccggagaccttacatccccaccaaccatcccaccccagggccgcttccccccgaattcggaaggaggactcttgccaggcctctgtgacccaaggacgcgcagccgggcagcaacgatggacggaatccctcgatggcgtcatggggccaccagcctcacacacatgccacaggccatgcagactgccatag

SEQ ID NO: 184661 - DNA, 474 bp, synthetic construct
  misc_feature 1..474: note = Description of Artificial Sequence: Synthetic coding sequence
  source 1..474: mol_type = other DNA
atgagcgagcccggcaagggcgacgactgcctggagctggagagctccatggctgaatcaaggttgagggcccctgatttgggagtcagcagatgcctcggaaagtgccagaaaaacagtcccggcgcccggaaacatcccttctcagggaaatcattctatttagacctgccagcgggtaagaatttacaatttctgaccggcgcaattcaacagctgggtggagtgatagaagggtttctcagcaaggaagtgtcctatatcgttagttcccgcagggaagtaaaggcagaaagttcaggcaaatctcacaggggctgtccatctcccagtccctccgaagtgcgcgtggagacctctgcaatggtggacccaaaagggagtcaccctcgaccgagtagaaagccagtggactccgtccctctgtccagaggaaaggagctactgcaaaaggcaattcggaatcaaaagtag

SEQ ID NO: 184662 - DNA, 570 bp, synthetic construct
  misc_feature 1..570: note = Description of Artificial Sequence: Synthetic coding sequence
  source 1..570: mol_type = other DNA
atggtgggcggcggccagccctgcggccccaacatgagcgaggtgagctgtaaaaaacgcgacgattatttagaatggcctgaatactttatggccgtcgctttcctgtccgcgcaacggagtaaagaccccaactcccaagttggagcatgtatagtcaactcagagaacaagatcgtgggcataggctacaatgggatgccaaacggctgcagcgacgatgtgctaccctggagacgcaccgcggaaaacaagctcgataccaagtatccatatgtctgtcatgctgagctgaatgcgattatgaataaaaacagcacagatgtcaagggatgctcgatgtacgtggccctcttcccatgcaacgagtgcgcaaaactgattatccaagccggcattaaggaggtgatcttcatgagcgataagtatcatgatagtgatgaggccacagctgctaggctcctcttcaacatggccggcgtcacatttcggaagttcatcccgaagtgcagtaaaatagttatagattttgacagcattaatagccgcccctcccagaagctgcagtag

SEQ ID NO: 184663 - DNA, 537 bp, synthetic construct
  misc_feature 1..537: note = Description of Artificial Sequence: Synthetic coding sequence
  source 1..537: mol_type = other DNA
atgagcgaggtgagctgcaagaagcgggacgactacctggagtggcccgagtacttcatggccgtggccttcctcagtgcccagaggagtaaggacccaaatagccaggtaggtgcttgcatcgtaaacagcgaaaataagatagtcggcattgggtacaacggcatgcccaacgggtgttccgacgacgtgttaccatggcgtcgcacagccgaaaacaagctggatacaaagtacccttatgtgtgtcatgctgaactgaacgctattatgaataaaaacagtactgacgtgaaagggtgttctatgtatgttgcactatttccttgtaacgaatgcgctaagctgatcattcaagccggtatcaaggaggtcatattcatgagtgataagtatcatgattcagatgaagcaaccgctgcacgactgctgtttaatatggccggggtgacatttaggaagtttattccaaaatgctcgaagattgttatagacttcgatagtatcaactctaggccttcccaaaagctccaatag

SEQ ID NO: 184664 - DNA, 510 bp, synthetic construct
  misc_feature 1..510: note = Description of Artificial Sequence: Synthetic coding sequence
  source 1..510: mol_type = other DNA
atgagcgaggtgagctgcaagaagcgggacgactacctggagtggccagagtatttcatggccgttgcattcctgagtgcccagcggtcgaaggatccaaattcacaggttggcgcgtgtattgtgaatagtgaaaacaaaattgtgggcatcggttataatgggatgcctaacggctgctctgatgacgtgttaccatggaggcgcaccgcagagaacaaactcgatactaagtacccctacgtctgtcacgccgagctgaacgctatcatgaataagaacagcacagacgttaaaggctgcagcatgtacgtagccctttttccttgtaatgagtgtgccaagttgattattcaggctggtataaaggaggtgattttcatgagtgacaaatatcacgattccgacgaagcgacagccgctaggttattgtttaatatggctggtgtcacatttaggaaatttattcctaaatgtagcaaaatcgtaatcgattttgacagcatttag

SEQ ID NO: 184665 - DNA, 222 bp, synthetic construct
  misc_feature 1..222: note = Description of Artificial Sequence: Synthetic coding sequence
  source 1..222: mol_type = other DNA
atgagcgaggtgagctgcaagaagcgggacgactacctggagtggccagaatacttcatggctgtcgccttcttgtccgcccagaggagcaaggatccgaattcccaggtcggggcatgcattgtaaattccgagaacaagattgtaggcatcggctacaatgggatgcccaatgggtgttctgacgacgtattgccatggcggagaacagccgagaattag

SEQ ID NO: 184666 - DNA, 180 bp, synthetic construct
  misc_feature 1..180: note = Description of Artificial Sequence: Synthetic coding sequence
  source 1..180: mol_type = other DNA
atgagcgaggtgagctgcaagaagcgggacgactacctggagtggccagagtacttcatggctgtggccttcttgagtgcccagcgctccaaagacccaaactcccaggttggagcgtgtattgttaattctgagaataagatcgtgggcatcggatataacggcatgcccaatggttag

SEQ ID NO: 184667 - DNA, 72 bp, synthetic construct
  misc_feature 1..72: note = Description of Artificial Sequence: Synthetic coding sequence
  source 1..72: mol_type = other DNA
atgagcgaggtgagctgcaagaagcgggacgactacctggagtggcctgaatactttatggctgtagcctag

SEQ ID NO: 184668 - DNA, 363 bp, synthetic construct
  misc_feature 1..363: note = Description of Artificial Sequence: Synthetic coding sequence
  source 1..363: mol_type = other DNA
atgagcgaggtgagctgcaagaagcgggacgactacctggagtggcccgagtacttcatggccgtcgcattcctgtccgcgcaaagatccaaggaccctaactcgcaggtgggagcgtgcattgttaattcagagaataaaattgtcggcattggatacaacggcatgcccaacggatgtagcgacgatgtcctcccatggagaagaacagcggagaataagctggataccaaatacccctacgtttgccatgcagaactgaatgccattatgaacaagaattcaaccgatgtgaagggatgctcgatgtacgtggccctattcccttgcaatgagtgtgcaaaactcatcattcaggcctag

SEQ ID NO: 184669 - DNA, 537 bp, synthetic construct
  misc_feature 1..537: note = Description of Artificial Sequence: Synthetic coding sequence
  source 1..537: mol_type = other DNA
atgagcgaggtgagctgcaagaagcgggacgactacctggagtggccagaatacttcatggctgtggcatttctgtctgcgcagagaagcaaagacccaaattcccaggttggggcttgcattgtgaattctgaaaacaagatcgtaggtatcggctacaatggaatgcccaatggatgctctgacgatgtgctgccttggcggaggactgccgagaacaagctggacaccaaatacccttatgtgtgccatgccgaacttaacgccattatgaataaaaacagcaccgatgtcaagggctgttcaatgtacgtcgctctgttcccgtgtaacgaatgtgcaaagctcataatccaggccggtataaaagaggttatttttatgagcgacaagtaccatgacagcgatgaagccaccgccgcccgactgctcttcaatatggccggcgtgacatttcggaaatttattccaaagtgcagcaaaatcgtgatagacttcgacagtattaacagtagaccaagtcaaaagttgcagtag

SEQ ID NO: 184670 - DNA, 360 bp, synthetic construct
  misc_feature 1..360: note = Description of Artificial Sequence: Synthetic coding sequence
  source 1..360: mol_type = other DNA
atgagcgaggtgagctgcaagaagcgggacgactacctggagtggcccgaatactttatggctgtggcattcttatccgcccagcggtccaaagaccctaacagccaggttggagcatgtattgttaatagcgaaaacaagatagtgggcatcggttataatggaatgcctaacggctgttcagatgatgtgttgccctggcggcgcactgctgagaataaactggacactaagtatccatacgtctgccacgccgaactgaacgcaataatgaataagaatagcaccgacgtgaaaggctgttccatgtacgttgcgctattcccttgtaacgagtgtgcaaaactgattattcaatag

SEQ ID NO: 184671 - DNA, 297 bp, synthetic construct
  misc_feature 1..297: note = Description of Artificial Sequence: Synthetic coding sequence
  source 1..297: mol_type = other DNA
atgagcgaggtgagctgcaagaagcgggacgactacctggagtggcccgagtactttatggccgtggcgtttcttagtgcgcaaaggagcaaagatccaaattcacaagtgggggcgtgtattgtaaactcggaaaataagattgtcggcatcggatacaacggtatgccaaatggctgctcagacgacgtcttgccctggcgaaggactgccgagaataagcttgacactaaatatccatatgtgtgccatgcagagctcaacgccatcatgaacaaaaatagtactgacgtgtag

SEQ ID NO: 184672 - DNA, 780 bp, synthetic construct
  misc_feature 1..780: note = Description of Artificial Sequence: Synthetic coding sequence
  source 1..780: mol_type = other DNA
atgaacaagctgaagagcagccagaaggacaaggtgcggcagttcatgatattcacacagtcctccgagaagaccgcggttagttgtttatctcaaaatgactggaagctcgacgtggccacagacaattttttccaaaaccccgagctgtatatcagagaatctgtgaagggttctctcgaccgaaaaaagctagagcaactgtataaccgttataaagatcctcaggacgaaaataaaataggcattgacggaattcagcagttctgcgatgacctggccctggaccccgcatccatcagcgtcttaattatcgcctggaagtttagggctgcgacccaatgcgagttttcaaagcaggagttcatggatggaatgactgagcttgggtgcgacagcatcgagaagctgaaagcacaaatcccaaagatggagcaagagttgaaggagcctgggcggttcaaagacttctaccagtttacattcaacttcgctaaaaacccaggccagaaggggctggacctggaaatggcaattgcctattggaatctggtacttaatggtcgttttaaattcctggacctttggaacaagtttttactcgagcatcacaagcgtagtatccctaaggacacctggaaccttttgcttgacttcagcaccatgatcgcggatgacatgagtaattacgatgaggaaggagcctggcctgtactcatcgatgatttcgtggagtttgccagaccacagatcgccgggacaaagtccactaccgtttag

SEQ ID NO: 184673 - DNA, 660 bp, synthetic construct
  misc_feature 1..660: note = Description of Artificial Sequence: Synthetic coding sequence
  source 1..660: mol_type = other DNA
atgaacaagctgaagagcagccagaaggacaaggtgcggcagttcatgatatttacccagtcctccgagaagaccgccgtgtcctgcctgtcacagaatgattggaagctggacgtcgctactgataactttttccaaaaccccgaactatacattcgcgagagcgtgaagggcagcctcgatcgcaaaaagctggaacagctgtacaataggtacaaggatcctcaggatgagaataagatcggaatagatgggatgactgaattagggtgtgactccattgagaagctcaaagctcaaataccaaaaatggaacaggagctgaaggagcctggtaggttcaaagacttctatcagtttactttcaatttcgccaagaatccagggcagaaaggcttggacctagagatggcgattgcctactggaacctcgtcttaaatggccgattcaaattcctggacctttggaacaagtttctcctcgagcatcacaaaaggagcattcctaaggatacatggaacctcctcctagatttttctacaatgattgctgatgatatgagtaattacgacgaggaaggcgcctggccagtcctaattgacgatttcgtggagtttgcccggccacagatcgccgggactaagtctaccacagtgtag

SEQ ID NO: 184674 - DNA, 387 bp, synthetic construct
  misc_feature 1..387: note = Description of Artificial Sequence: Synthetic coding sequence
  source 1..387: mol_type = other DNA
atgatcttcacccagagcagcgagaagaccgccgtgagctgcctgagtcagaatgactggaagctcgatgtagctaccgataatttttttcaaaatccagagttatatattagagagagtgttaagggctccttagatagaaagaagctagaacagctctacaatagatacaaggacccccaagatgagaataaaattggaatcgatggcatccaacagttttgcgacgatcttgcccttgatcctgcctctataagcgtgctgattatcgcatggaaatttagagcggccacccaatgcgagttttccaaacaggagtttatggacggcatgacggagctcggctgcgatagcatagagaagcttaaagcccaaatccccaagtag

SEQ ID NO: 184675 - DNA, 879 bp, synthetic construct
  misc_feature 1..879: note = Description of Artificial Sequence: Synthetic coding sequence
  source 1..879: mol_type = other DNA
atgcacagcgacgccgccgccgtgaacttccagctgaacagccacttatcaaccctggcaaacatccataagatctaccataccctgaataaactgaacctcactgaggacattggacaggatgaccaccagactggatcactccgctcatgctcaagttctgactgtttcaacaaagttatgccacctaggaagaaaaggcgacccgctagcggcgatgacctcagcgccaagaagtcccgtcacgacagtatgtacaggaaatatgattccactagaatcaagactgaggaggaggcgttctcttcaaagagatgtctagaatggttctatgagtacgccggcaccgacgatgtggtgggccccgaggggatggaaaagttttgtgaagatatcggagttgaacctgagaacgtggttatgctggtgcttgcatggaagcttgacgcacagaatatgggctattttacactgcaggaatggttgaaagggatgacatctttgcagtgcgataccacagagaaactaaggaatactctggattatctgagatcgtttctcaacgacagcacaaactttaagctgatctacagatacgcgtttgacttcgcacgggagaaggaccagcggtccctggacatcaacacagcgaaatgtatgctggggctgctgctgggcaagatatggcccctgttcccggtatttcatcagtttttagagcaaagcaagtacaaagtcataaacaaagaccagtggtgcaacgtactggagttcagtcgcaccatcaatttggatctctccaactacgacgaggacggggcgtggccagtcctgttggatgagtttgtggaatggtacaaagacaagcagatgagttag

SEQ ID NO: 184676 - DNA, 699 bp, synthetic construct
  misc_feature 1..699: note = Description of Artificial Sequence: Synthetic coding sequence
  source 1..699: mol_type = other DNA
atgcccccccggaagaagcggcggcccgccagcggcgacgacctgtcagcaaaaaagtctaggcacgattctatgtatcgcaaatacgactccacaaggatcaagactgaagaagaggctttttcctcgaagcgttgcttagagtggttttatgaatacgccggaacggacgatgttgtgggtcctgagggaatggaaaaattctgcgaggatatcggtgtcgaacctgaaaacgtggtaatgctcgttctggcctggaagctcgatgcacaaaatatggggtactttacacttcaggagtggcttaagggaatgacgtccctgcagtgcgatacaactgagaagttacgtaataccttagactacctacgtagctttctcaatgatagcaccaacttcaaattgatctatagatatgcatttgacttcgcccgcgagaaggatcaaagatcacttgatataaacaccgccaagtgtatgttgggtcttctgctgggtaaaatatggcctttgtttcccgtattccaccagttcctagaacaatctaagtacaaggtaatcaataaggaccagtggtgtaatgtgttggaatttagcaggacaatcaacctcgatctttccaattacgatgaagacggagcctggccagtcctgctggatgaattcgtggagtggtataaagataaacaaatgagctag

SEQ ID NO: 184677 - DNA, 774 bp, synthetic construct
  misc_feature 1..774: note = Description of Artificial Sequence: Synthetic coding sequence
  source 1..774: mol_type = other DNA
atgcacagcgacgccgccgccgtgaacttccagctgaacagccacctgtcaactctggccaatatccataagatataccacaccctgaacaaactcaatctgacagaggacataggacaggacgaccaccagactggctctctacgttcctgtagttcctccgactgttttaataaagtaatgcccccccgcaaaaagaggagaccggccagtggcgacgacttgtccgctaagaaaagtcgccacgactctatgtatagaaaatatgattcaactcgtataaagactgaagaggaggctttcagtagcaaacgctgcttagaatggttttacgaatatgctggcacagatgatgtggtgggaccagaaggaatggagaagttttgcgaagatattggggtggagcccgaaaacgtggtgatgctggttctggcttggaaattagatgcacagaacatggggtatttcactctgcaagagtggttgaagggcatgacctctctccagtgtgataccacggaaaagctcagaaacacgttggactacctgcggtcctttcttaatgatagcacgaatttcaagctgatctatcgctacgcgtttgactttgccagacagagcaagtacaaggtcataaataaggaccaatggtgcaatgtactggagttctccaggacaatcaacctcgatttgtcgaattatgatgaggatggtgcttggccagtgttgctggatgagttcgtggaatggtataaggacaaacagatgtcttag

SEQ ID NO: 184678 - DNA, 1011 bp, synthetic construct
  misc_feature 1..1011: note = Description of Artificial Sequence: Synthetic coding sequence
  source 1..1011: mol_type = other DNA
atggaggtggaggccgccctgggctgcagcggccagggccggggctgcggcggggtagccccggccggccgcggccgtgagagagcttcggaacgtggaacacgcgtgcggatatcgaagggcctctccggcgctggaggctctgtcaggaaggctgattttcaactgaactcccacctgtccacgttggctaacatccacaaaatttaccataccctgaataagctgaatcttacagaggatattggccaagatgatcaccagaccggaagtctgcgctcttgtagcagcagcgactgtttcaacaaagtcatgccgcctagaaaaaaacgcagacctgcatccggagatgatttgagcgctaaaaagtcccggcacgactctatgtacaggaaatacgactccacccgcattaagacggaggaggaggcctttagtagtaagcggtgtttggaatggttctatgagtatgctggcacagatgatgtggtgggaccagagggcatggagaaattttgtgaggatattggggtggaaccggaaaatgtagttatgctcgttctcgcttggaaacttgacgcacaaaacatgggatactttacactccaggagtggttaaaaggtatgaccagccttcagtgtgatactacagaaaagctgcgaaacacactggactacctccggtcttttctgaacgatagcactaattttaaactcatttatcggtacgcctttgacttcgccagggagaaggaccagaggagtttagacattaatacggccaagtgcatgctcggcctcttactgggcaaaatttggccgctgttcccagtgtttcaccaattccttgagcagagcaagtacaaggtgattaataaggatcagtggtgtaacgttctggagttctcccggacaatcaatctggacctgagcaattacgacgaagacggagcctggccagtgctcttggatgaatttgtggaatggtacaaagacaagcagatgagctag

SEQ ID NO: 184679 - DNA, 1854 bp, synthetic construct
  misc_feature 1..1854: note = Description of Artificial Sequence: Synthetic coding sequence
  source 1..1854: mol_type = other DNA
atggccgccgtggccgccggcggcctggtgggcaagggccgggacatcagcctagcggctttgcagagacacgacccttacatcaacaggatcgtcgatgtcgccagccaggtcgctctttatacatttgggcatcgcgcaaatgagtgggaaaaaacagacgtggaggggaccctgtttgtgtacacacggagcgcgagccccaagcatggattcaccattatgaataggctgagcatggagaataggacagaacctattacgaaggacttggatttccagctccaggaccctttcctactgtatcgtaacgcaagactgtccatttacgggatctggttctacgacaaagaggagtgccaacgcatcgccgaactcatgaagaatctgactcaatacgagcagttgaaggcacaccagggcactggagcaggaatttcgcccgttatcctcaacagcggcgagggcaaggaggtggacattttgcgcatgctcattaaggcgaaagacgagtacactaagtgcaagacctgcagtgaaccgaagaaaattacaagttcctcagccatctatgacaacccaaatctgataaagccgatccctgtgaagcctagcgaaaatcagcagcagaggataccacaaccaaaccagactctggacccggagccacagcacctgagtctgaccgccctcttcggaaaacaggataaagccacctgtcaggagactgtggagcccccacaaaccttgcaccagcagcaacaacagcaacagcagcagcaggagaagctccctattagacagggagtcgtaaggtcactatcctatgaggaaccccggagacactcaccgcccatcgagaagcaactgtgccctgctattcagaaactgatggttcggtcggccgacttgcatcccctgtctgagctccctgaaaaccggccatgtgaaaatggcagcactcacagcgctggagagtttttcaccggacctgtgcagccagggtcccctcataatataggcacctcccgcggagtccaaaatgccagcagaacccagaatctgtttgaaaaattgcagtctactcccggtgctgcaaacaagtgtgatccatctacacctgctccggcctcttccgcagcactcaaccgatccagagctcccacatccgtgacaccagtcgcgcctggcaagggcctcgctcagcccccacaggcgtacttcaacggaagtctacctcctcagactgtggggcatcaggcccacggtcgcgaacagtccacacttcctcgccagacattacctatctccgggtctcagacaggcagcagcggcgtgattagtcctcaggagttgcttaagaagctgcagatcgtccaacaggagcagcagctccatgcgagtaatcggccggccctggctgccaaatttcccgtactcgctcagagctccggtacaggtaaacccctggagagttggatcaataagactcccaataccgaacaacagactcctctgttccaagtgatctcacctcaaagaatcccggccaccgctgctcccagcctactgatgagtcccatggtatttgcacaacctacttccgttccaccaaaggagagagaaagtggtctgctccccgttgggggccaggaaccaccagctgccgccacctccctgctgttaccaatccagagccctgagccaagcgtaatcacctcctctcctctcacaaagttgcagctccaagaggccttgctgtacctcatacagaatgacgataattttctcaacataatctatgaagcatatctcttcagtatgactcaggccgctatgaagaaaacaatgtag

SEQ ID NO: 184680 - DNA, 1548 bp, synthetic construct
  misc_feature 1..1548: note = Description of Artificial Sequence: Synthetic coding sequence
  source 1..1548: mol_type = other DNA
atgcagatcaaggtgagcatctacggcatctggttctacgacaaggaagaatgccagcggatcgccgaacttatgaaaaacctgactcagtatgaacagctcaaggctcatcagggcacaggcgcaggcatctcccctgtgattctgaattccggcgagggtaaagaagtagatatcctgcgtatgctcattaaggccaaggacgagtacacaaaatgcaagacgtgtagtgagcccaagaaaattacttcatctagcgctatttacgataacccaaatctcatcaaacccatcccggtcaagccttctgaaaaccaacaacagcggattccgcaacctaaccaaaccctggaccctgagcctcaacatctgtcattgacagcgcttttcggcaagcaggacaaggccacctgtcaggagaccgtggaacccccacagactttgcaccagcagcagcagcagcagcagcaacagcaggaaaaactcccaatccgccagggggtggttagatcactgtcctacgaggaacctaggaggcattctccgcctatcgagaagcagctctgccccgctatccagaagctaatggtgcggtctgccgatctgcaccccctgtccgagctccctgagaaccgaccctgcgagaatggttcaacgcactctgccggtgagtttttcaccgggcccgtgcaaccaggttctccacataacattggaacaagcaggggggtgcaaaacgcctcaaggacccagaacctgtttgagaaactccagtccacgcccggcgcagccaataaatgtgatccttctacgcctgcccccgcttcatctgctgccctcaacagatcaagagcgcctacctcagttaccccggtggcccctggcaagggactggctcagcccccacaggcctacttcaatgggtctctacctccacaaacagtgggccatcaagcacatggccgcgaacaatccacattgccaagacagactctgcctatatctggatcccagactggtagtagtggggtcattagtccacaggagctgttgaagaaactgcaaatcgtacaacaggagcagcagttgcacgcatctaatcggccggcgctcgccgccaaattcccagttctagcgcagtccagcggtaccgggaaaccgttggaatcctggattaataaaacgccaaatacggagcaacagacacctctatttcaggtgattagcccacagcgaattcctgcaaccgcggctccttcattacttatgtcgcctatggtgttcgctcagccaacttccgtccccccgaaggagagggaaagcggtctattgcctgtaggaggtcaggagcctcctgccgccgccacatcgttgctgttaccaatccagtctccagagcctagtgtgatcactagctctcctctcactaaattacagctgcaggaagctttgctgtatctcatacaaaatgacgataacttcttaaacatcatttatgaggcgtatctgttcagcatgactcaagcggccatgaaaaaaacgatgtag

SEQ ID NO: 184681 - DNA, 1263 bp, synthetic construct
  misc_feature 1..1263: note = Description of Artificial Sequence: Synthetic coding sequence
  source 1..1263: mol_type = other DNA
atggagaccaagcgggtggagatccccggcagcgtgctggacgacttttgtagcagatttattctgcatatacccagcgaggagcgagataacgcaattagggtgtgctttcagatcgagctggcacactggttctatcttgacttctacatgcagaacaccccaggcttgccacagtgcggcattcgggacttcgccaaggctgtcttttcccattgtccttttttgctgccacaaggcgaggatgtagaaaaagtgctcgacgagtggaaagaatataaaatgggagtgcccacctacggagctatcatactggatgagaccttggaaaacgtgctcttggtgcaagggtaccttgcaaagtctggatgggggtttccaaagggcaaggtaaataaggaagaggctccacacgactgtgctgccagggaagtgtttgaagaaaccggcttcgacatcaaagattatatttgtaaggatgactacattgagctgagaataaacgatcagctggcccgcttgtatattatcccaggtatccccaaggacacgaagttcaacccgaagacccgtcgcgagatccgaaatattgagtggtttagcatcgagaagttgccttgccaccgaaatgatatgacacccaaatccaagctgggtctcgcacctaataagttttttatggctattccattcattaggcctttacgagactggctttctcgacggtttggagattctagcgattctgacaatggcttcagtagcactgggtctacacccgccaaacctacagtggaaaagttgagccggactaaatttaggcactcacaacagctctttcccgatgggagtcccggagatcagtgggtgaaacatagacagccactgcaacagaagccttacaacaatcatagcgagatgagcgacctgctgaagggcaagaaccaatctatgcgcggtaatggcagaaagcagtaccaagatagtccaaatcaaaaaaagcgaaccaacggcctgcaacccgctaagcaacagaactccctgatgaagtgcgaaaaaaagttgcacccccgtaagctgcaggataactttgaaaccgatgctgtgtacgacttaccctccagtagcgaagaccaactgcttgagcatgcggagggtcagcccgtggcatgcaacggtcattgcaagtttccctttagcagtcgtgcctttctctccttcaagttcgaccacaacgccataatgaaaattctcgacttgtag

SEQ ID NO: 184682 - DNA, 1158 bp, synthetic construct
  misc_feature 1..1158: note = Description of Artificial Sequence: Synthetic coding sequence
  source 1..1158: mol_type = other DNA
atggagaccaagcgggtggagatccccggcagcgtgctggacgacttctgcagccgctttatccttcatattcccagcgaggagagagacaacgctatccgcgtgtgcttccagatcgagctggcgcactggttctatttggacttttatatgcagaatactcccggactgccccagtgcgggatccgggatttcgccaaggccgtttttagccactgccctttcctgttgccacagggggaagatgtggaaaaggtgttagacgaatggaaggagtacaagatgggcgtaccaacttacggagcgatcattcttgatgagaccttggagaacgtactgctggtgcagggatatctggcaaaaagcggatggggatttccaaaaggcaaggtcaacaaggaggaggcccctcacgactgcgctgcaagagaggtattcgaggaaacgggcttcgatataaaggattacatctgcaaagatgattacatcgagctcagaatcaacgaccaactggccaggctgtacataattcccgggatacccaaagataccaagtttaacccaaagacccggagagagatccggaacatcgaatggttcagtatagaaaagctgccctgccacagaaatgacatgactccaaagtctaaattgggtttggcccctaacaagttttttatggcaattccatttattaggccgttacgagattggctttctcggcggtttggggacagctcagactccgacaacgggttttcgtctactggctcgacgcccgccaagcccactgtcgagaaactgtcccgcacgaaatttcggcactctcagcaactgttccccgacggaagccccggcgatcagtgggtaaaacataggcagcccctgcagcagaaaccttacaataaccatagcgagatgtcagacctccttaaaggaaaaaagtgcgagaaaaagctccatccaaggaagctccaggataacttcgaaacggacgccgtatatgacctgcccagttctagtgaggaccagctgctggagcacgcagagggccaaccagtcgcctgtaatggtcattgtaaattcccattctcctctagagccttcctcagtttcaagttcgatcacaatgcaattatgaagatactggacttgtag

SEQ ID NO: 184683 - DNA, 630 bp, synthetic construct
  misc_feature 1..630: note = Description of Artificial Sequence: Synthetic coding sequence
  source 1..630: mol_type = other DNA
atgacccccaagagcaagctgggcctggcccccaacaagttcttcatggctatccctttcatcagaccactgcgagattggctctcaagacggttcggcgactcttctgattccgacaatggctttagcagcaccggctcgacccctgcaaaacctacagtggaaaagctatcccggacaaagtttcggcatagccaacaactgttccctgacggatctccaggtgatcaatgggttaaacaccggcaacccttgcagcagaaaccgtacaacaaccacagtgagatgtccgaccttcttaaaggtaagaaccagagcatgaggggcaacggaaggaagcagtaccaggactctcccaaccagaagaagaggacaaatggcctgcagcctgctaaacagcaaaacagcctgatgaaatgcgaaaagaagcttcacccacgaaagctgcaggacaacttcgagacggatgctgtgtatgacctgccctctagcagcgaagatcaactcttagagcatgcagaagggcaaccggtggcctgcaacggacactgtaagtttccttttagctctcgcgcatttctatcattcaagtttgatcataatgcgatcatgaagatcttggatctctag

SEQ ID NO: 184684 - DNA, 1341 bp, synthetic construct
  misc_feature 1..1341: note = Description of Artificial Sequence: Synthetic coding sequence
  source 1..1341: mol_type = other DNA
atgaccgagctgggcatggtggtgctgggcatcgacaccacccacttgtggatgcttcctctcacgcctggtagctggaactcaatgagaagccgtcacaagtggaactggccccaggggtcttggggtctgggaggtccaccaaggtcaacagcctttctggagtgttgtacttcctttctgccgaatgacctgggatttaccgacagctattcccagaaggccttttgcggtatttactccaaggacggacaaatattcatgtccgcatgtcaggatcagactattcgcttatacgactgcaggtatgggagatttcgcaagttcaaaagcataaaagcaagggacgtggggtggagcgtgctcgacgttgcctttacaccagacgggaaccactttctgtactccagctggagcgattatatacatatatgcaacatctacggcgagggcgacacacatacagccttggacctcaggccagacgaaaggagatttgctgtgtttagcatcgctgtgagcagtgacgggcgagaagtgctgggcggcgcgaatgatgggtgcctgtatgtcttcgatcgcgaacagaaccggagaactttgcaaattgagtcccacgaggacgacgtcaacgctgtggcctttgcagatatcagttcgcagatcttgttctccggtggcgacgacgccatctgcaaagtgtgggaccgccgcacaatgagagaagatgaccccaaaccggtaggagcactggccggccaccaggacggtatcactttcatcgatagcaagggcgatgcccgctacctcatatcaaattccaaagatcagactattaagctctgggatatcaggaggttttccagccgggagggaatggaggcctccaggcaagctgccactcagcagaactgggattatcgatggcaacaggtccctaagaaagcatggcggaagctgaagctccccggagactcatccttaatgacataccgagggcatggcgtgctacatacacttattcggtgtcgcttctcacctattcattcgactgggcagcagtttatatacagcggatgctccacgggcaaagtggttgtgtacgacctgctaagtgggcacatagtcaagaaactaacaaaccacaaagcctgcgtgcgggacgtgagctggcacccattcgaggagaagatcgtgtcgtcctcatgggacggaaatctcaggttgtggcagtatcgccaagccgaatacttccaggatgacatgcccgaaagtgaggagtgtgcctcagcccctgccccagtgccacagagcagtacacctttctcctcgccgcaatag

SEQ ID NO: 184685 - DNA, 1563 bp, synthetic construct
  misc_feature 1..1563: note = Description of Artificial Sequence: Synthetic coding sequence
  source 1..1563: mol_type = other DNA
atgggcagccggaacagcagcagcgccggcagcggcagcggcgacccctctgaagggttgcctcgcaggggagcagggctcaggcgaagtgaagaggaagaagaggaagacgaggatgtagatcttgcgcaagcccttctcgacagcgaagaggaaaacgatagagcttgggatggaagattaggagacagatacaatccacccgtggacgccacccctgacacaagggagctggagtttaacgagattaagacccaggtggagctggccacgggccaacttggtctgagacgggccgcccagaagcactcttttcctaggatgctgcaccagagggaacgtggcctctgccacagaggtagctttagcctgggcgagcagtcacgcgtcatttcgcattttttgcccaacgacttgggctttacagacagctactctcagaaagctttttgtggtatttatagcaaggacggccagatctttatgtcggcctgtcaggatcagactatacgattgtatgattgtagatacggacgattcagaaagttcaaatccatcaaggccagggacgtgggatggtcggttctcgatgtggcgttcactccagacggcaaccatttcctttactctagttggagtgactacattcacatttgcaatatttacggcgagggcgacacccacactgccctggatctgcgcccagatgaacgacggtttgcagtgttttccatagccgtgtccagtgacggacgagaggtcctgggtggcgcaaacgatggctgcttgtacgtgttcgacagagaacaaaataggagaacactccaaatcgagtcccatgaggacgatgtgaatgctgttgcctttgctgatatcagctcacaaattcttttttcaggaggcgatgatgccatctgtaaggtgtgggataggagaaccatgcgagaagatgatccaaagcctgtaggtgctctagccggccatcaggacggaataacatttattgatagcaagggtgacgccagatacttaatctccaattctaaggatcaaactatcaagttatgggacatccgtcggttcagcagtagagaaggcatggaagcatcacgacaggcagcaactcaacaaaactgggattaccgctggcaacaggtgccaaagaaggcctggaggaaattaaagctgcccggcgattcatctttgatgacctaccggggtcatggtgtcctccacacactgatccgctgcaggttctcccctattcacagcacaggccaacaattcatctattccggttgcagcacgggcaaggtcgttgtgtacgacctgctatcaggtcatatcgtcaaaaagcttaccaatcacaaagcctgcgtccgcgacgtttcctggcatccctttgaagaaaagattgtgtcttcatcatgggacggcaaccttaggctttggcagtaccggcaagctgagtactttcaggacgacatgccggaatcagaagagtgtgccagtgcccctgccccagtgccccagagcagcactcccttcagcagcccccagtag

SEQ ID NO: 184686 - DNA, 1641 bp, synthetic construct
  misc_feature 1..1641: note = Description of Artificial Sequence: Synthetic coding sequence
  source 1..1641: mol_type = other DNA
atgggcagccggaacagcagcagcgccggcagcggcagcggcgaccctagcgaagggcttccacggagaggtgcaggattgaggcgatccgaggaagaggaggaagaagacgaagatgtcgatctcgcccaagttctggcctatctgttgcggaggggccaggttcgactcgtgcaggggggaggggcagctaatcttcagttcatacaggctcttctggatagcgaagaggagaatgatcgagcttgggatggaaggttaggtgatagatacaacccacctgtagacgccactcctgacacacgggaactagagttcaacgagatcaaaacacaggtcgaactcgcgaccggacagctcggactgcgacgtgccgcccaaaagcactcatttccgaggatgctccatcagcgcgaaaggggcctgtgccaccggggatccttcagcctgggggagcagagcagggtgatttctcatttcctacctaatgatctgggttttacagacagctacagtcagaaggccttttgcgggatctattcgaaggatggacaaattttcatgagcgcgtgccaggatcagaccattagactgtacgactgccggtacgggcgtttccgcaagttcaaatcaatcaaagctcgcgatgtggggtggtctgtcctggacgttgcttttacccctgacggcaatcactttctttacagcagctggagcgattacatccacatttgtaatatctacggggaaggcgacacacacactgcactggatctccgacccgatgagcgtcggttcgccgtgttttccatcgctgtaagcagtgatggtcgggaggttctcggaggcgccaacgatggctgtctgtacgtcttcgatcgcgagcagaaccgcagaacccttcagatagagtcccatgaagacgacgtgaatgctgtggcgttcgccgatatctccagccagatcctgttttctggcggtgatgatgcaatctgcaaggtatgggatcggagaaccatgagggaggacgaccctaaacccgttggagccttagcaggccaccaagacggcattacattcatagacagcaagggggatgcacgctaccttatcagcaatagcaaagatcagacaattaaactctgggatattagaagatttagttcccgagaggggatggaggcctccagacaggcagccacacagcagaattgggattatcgatggcagcaggtgccaaagaaggcatggcggaaactgaagctgcctggcgatagtagcctgatgacataccgtgggcacggtgtactccataccctcattagatgcaggttctcccccatacattcaacagggcaacaatttatctactcaggttgttcaacggggaaagtagtggtgtatgatttactgtccggccatatcgtgaagaagctcacgaatcataaggcctgcgttcgagacgtgtcttggcacccatttgaggagaaaatcgtgtcctcctcctgggatggaaatctccggctgtggcagtatagacaggctgaatatttccaggatgacatgccagagtccgaggaatgcgcctccgccccggctccagtacctcagagcagtacgccgttcagtagcccccagtag

SEQ ID NO: 184687 - DNA, 369 bp, synthetic construct
  misc_feature 1..369: note = Description of Artificial Sequence: Synthetic coding sequence
  source 1..369: mol_type = other DNA
atgggcagccggaacagcagcagcgccggcagcggcagcggcgacccttccgaaggcctccctagacgaggtgccggcctccgcagatcagaagaggaagaagaagaggatgaagacgttgacctggcccaggtgctagcatacttgttgcggagggggcaggtgcgccttgtgcagggaggcggcgcagcaaatctccaatttatccaagccctcctggatagcgaagaggaaaatgatcgcgcctgggatggcagattgggagaccgttataacccgcccgtggacgctacacccgatacacgggaattagaattcaacgaaattaagacccaggtggagctggcaaccgggcagctcggactgtag

SEQ ID NO: 184688 - DNA, 222 bp, synthetic construct
  misc_feature 1..222: note = Description of Artificial Sequence: Synthetic coding sequence
  source 1..222: mol_type = other DNA
atgggcagccggaacagcagcagcgccggcagcggcagcggcgaccccagcgaaggactccccagaaggggagcaggactccgtaggtcggaggaagaggaggaagaagatgaagatgttgatctcgcgcaggtgctcgcctatctattgaggcgggggcaagtccggttggttcaaggcggtggggccgcgaacctccaatttattcaagctctgttatag

SEQ ID NO: 184689 - DNA, 282 bp, synthetic construct
  misc_feature 1..282: note = Description of Artificial Sequence: Synthetic coding sequence
  source 1..282: mol_type = other DNA
atgggcagccggaacagcagcagcgccggcagcggcagcggcgaccctagtgagggactgccccggcgaggggcaggtctcaggagaagcgaagaggaagaggaggaagatgaagatgtggatctcgcacaggtgctagcctacctgctgaggcggggccaggttcgtctggttcagggcggcggcgcggccaaccttcaattcattcaggctcttttggattccgaagaggaaaatgacagagcttgggacggcaggctcggtgaccggtacaacccttag

SEQ ID NO: 184690 - DNA, 327 bp, synthetic construct
  misc_feature 1..327: note = Description of Artificial Sequence: Synthetic coding sequence
  source 1..327: mol_type = other DNA
atgggcagccggaacagcagcagcgccggcagcggcagcggcgacccttccgaaggcctaccgcgccgaggtgcaggtcttcgaaggtccgaggaggaagaggaggaggacgaggatgtggacctggcccaggtgctggcctacctactgcgcaggggccaggtgcgcctggtgcaaggcggaggagccgccaatctccaatttatccaggcgctgctagactctgaagaagaaaacgatagggcatgggatgggaggctcggagacagatacaatccccccgttgatgcgactcctgacacaagggaactggagtttaatgagtag

SEQ ID NO: 184691 - DNA, 1641 bp, synthetic construct
  misc_feature 1..1641: note = Description of Artificial Sequence: Synthetic coding sequence
  source 1..1641: mol_type = other DNA
atgggcagccggaacagcagcagcgccggcagcggcagcggcgaccccagcgaaggacttcccaggaggggagcaggccttaggaggtcagaggaggaggaggaagaggatgaggacgtagacctggcacaggtgttagcgtacttgttaagaagggggcaggtcagactggtccaggggggcggtgccgcgaaccttcagtttattcaggccctgctcgatagtgaagaggagaatgatcgtgcttgggatggacggctcggggatcgctataaccctcctgtcgatgctacccctgacaccagagaattggaattcaacgaaataaagacccaagttgagttggccaccggtcagctggggctcagaagagccgcccagaagcattcctttccgcggatgctccatcagcgcgagcggggtctatgccaccggggatctttcagcctgggagaacaatcgcgggtcatcagtcatttcctgccgaatgatctgggttttaccgacagttattcccagaaggcattttgcggtatctattcgaaggacgggcagatttttatgtccgcttgccaggatcagacaattcggctttacgactgccgctatggcagattcaggaaattcaaatctataaaagcaagggacgtcggctggtcggtgcttgacgtggcctttactcccgacgggaatcatttcctgtacagcagttggagcgactacatccacatatgcaatatctatggcgaaggcgatactcacaccgcattggatctgcgccccgacgagcgacggtttgctgtgttttcaatagcagtatcctctgacggccgtgaagtgctgggtggagctaacgatggttgcctgtacgtgtttgatcgggaacagaacagacggaccctccagattgagtctcacgaggatgatgtgaacgccgtggcatttgccgacatcagttctcagattctgtttagcggaggtgatgacgccatttgcaaggtgtgggaccgtcgcacaatgcgcgaagatgatccaaaacctgtcggggcattggctgggcaccaagacgggatcacattcattgacagtaagggtgacgctcgatatctcatctctaacagcaaagaccagactatcaagctctgggatatacggcgattttcctctcgggaaggcatggaggctagtagacaggccgcaacccaacagaattgggactaccgctggcagcaagtgccgaagaaagcctggaggaagctcaagctgccaggcgattcctccttgatgacatatcgtggacatggcgtactacacacacttatccggtgtagattttctcccattcacagcaccggccagcagttcatctactcggggtgttcaacagggaaggtcgtggtctacgatcttctatctggccatatcgtcaagaaactcactaatcataaagcctgcgtcagggacgtctcctggcatccgttcgaggaaaagatcgtgtcatcgtcttgggacggaaacttgcgcctttggcagtaccgacaggcagaatatttccaagacgatatgcctgagagtgaggagtgcgcgtcagcacctgctccggttccgcaatcttcaacaccattcagtagtccccaatag

SEQ ID NO: 184692 - DNA, 273 bp, synthetic construct
  misc_feature 1..273: note = Description of Artificial Sequence: Synthetic coding sequence
  source 1..273: mol_type = other DNA
atgggcagccggaacagcagcagcgccggcagcggcagcggcgacccgagcgaaggactccctcggagaggcgccggacttcgaagaagtgaggaagaggaggaagaagatgaggacgtggaccttgctcaggccctgctcgattccgaagaagagaacgatagggcctgggacggacgactgggagaccgatacaatccaccagttgatgctactcctgacacacgggagctggaatttaatgaaatcaaaacgcaggtcgaactcgcctag

SEQ ID NO: 184693 - DNA, 93 bp, synthetic construct
  misc_feature 1..93: note = Description of Artificial Sequence: Synthetic coding sequence
  source 1..93: mol_type = other DNA
atgggcagccggaacagcagcagcgccggcagcggcagcggcgacccttcagaaggactgcctaggaggggtgcagggcttcgaaggagttag

SEQ ID NO: 184694 - DNA, 429 bp, synthetic construct
  misc_feature 1..429: note = Description of Artificial Sequence: Synthetic coding sequence
  source 1..429: mol_type = other DNA
atgggcagccggaacagcagcagcgccggcagcggcagcggcgacccctctgagggactgccacgccggggtgccggtctgaggcggtcagaagaagaggaggaagaagacgaggacgttgatctggctcaggtgttggcatacctgctgcggcgcgggcaggtgcgattggtgcagggcggaggtgccgccaatctccagtttattcaagcgctactagatagtgaagaggagaacgatagagcgtgggacggaagactaggggaccgatacaacccacctgtggatgccaccccagacacacgggagctcgagtttaacgaaattaagactcaggtggaacttgctactggccaactaggcctgcggcgtgccgcacagaagcatagtttcccgaggatgctgcatcaacgcgaacggggcctctag

SEQ ID NO: 184695 - DNA, 204 bp, synthetic construct
  misc_feature 1..204: note = Description of Artificial Sequence: Synthetic coding sequence
  source 1..204: mol_type = other DNA
atgggcagccggaacagcagcagcgccggcagcggcagcggcgacccatctgaggggctccctcgcagaggagccggcttgcggagatcagaggaggaggaagaggaggacgaggacgtggatttagcgcagaggccgtctgaggtgggtgctggtcgtagatgctcgaaatttacaatccacagtggtcccctgggtttatag

SEQ ID NO: 184696 - DNA, 321 bp, synthetic construct
  misc_feature 1..321: note = Description of Artificial Sequence: Synthetic coding sequence
  source 1..321: mol_type = other DNA
atgggcagccggaacagcagcagcgccggcagcggcagcggcgacccttcggaagggttgccccggaggggggccggcctccgcagatcagaagaagaggaagaggaggatgaagatgtggatctggctcaggtactggcctatcttcttagacggccttcctggacccagcgaaaacgaatgacagagctcggcatggttgtcttgggaatcgataccacccacttgtggatgttaccgttgactccgggaagctggaatagtatgaggtcacggcataaatggaattggccccaaggctcgtgggggctgggagggtag

SEQ ID NO: 184697 - DNA, 387 bp, synthetic construct
  misc_feature 1..387: note = Description of Artificial Sequence: Synthetic coding sequence
  source 1..387: mol_type = other DNA
atgggcagccggaacagcagcagcgccggcagcggcagcggcgacccttccgagggacttcctcggagaggcgccggattgcgacgttccgaagaagaggaggaggaagatgaagacgtggacctcgctcaggcccttttggattctgaagaggaaaacgatcgggcttgggacgggaggctcggagatcggtacaaccctccagttgacgccacccctgatacgcgcgaactcgagtttaacgagattaaaacacaggtagaactcgctacaggtcagttgggcctccgcagggctgcacagaagcattcttttccccgcatgctccaccagcgcgagagaggactctgtcacaggggcagcttttcactaggtgaacagtcttag

SEQ ID NO: 184698 - DNA, 465 bp, synthetic construct
  misc_feature 1..465: note = Description of Artificial Sequence: Synthetic coding sequence
  source 1..465: mol_type = other DNA
atgggcagccggaacagcagcagcgccggcagcggcagcggcgacccctccgagggtctgcctcgacggggagcgggtttacggaggtccgaagaggaggaggaagaggacgaagatgtcgacctcgcccaagttctggcatatttgctcaggagggggcaagtgcggctcgtgcagggaggaggcgcagcaaacctgcagttcatacaggccttacttgacagtgaggaggagaatgatcgagcctgggacggcaggctgggggatagatataatcctcctgtcgatgcaacacccgacaccagggagctagagtttaatgagataaagactcaggtagagctggctacagggcagctcggcttacggcgggcggcacagaagcacagtttccctcggatgcttcaccagagagaacgggggctgtgtcacaggggtagctttagtctgggcgagcagagttag

SEQ ID NO: 184699 - DNA, 2829 bp, synthetic construct
  misc_feature 1..2829: note = Description of Artificial Sequence: Synthetic coding sequence
  source 1..2829: mol_type = other DNA
atgaagcggcgggccggcctgggcggcagcatgcggagcgtggtgggttttttgtcccagaggggcctgcatggtgatccgctgctcacacaggattttcagcggagacggctgcgaggttgtaggaatctgtataaaaaggacctgctgggacatttcggatgcgtgaacgccattgagtttagtaacaatggcggccaatggctggtcagcggcggggacgatagacgtgtcctgctatggcatatggagcaggcaatacacagccgcgtcaagcccattcagttgaagggagaacatcattccaacatcttctgtttggcatttaactccggtaatactaaggtcttttctgggggaaatgatgagcaggtcatcttacacgatgtggagtctagcgagaccctcgatgtgtttgcgcacgaagatgcggtgtatggcctatctgtgagtcctgtcaatgataacatctttgccagtagtagtgacgacggtcgtgtgctgatatgggacatcagggagagtccacacggggaacctttctgcctggccaattacccaagcgcctttcactcagtcatgttcaaccctgttgaaccacggctgcttgcaacagccaacagcaaagagggcgtcggactgtgggatatccgcaagccccagagttctctgctgagatatggcggcaatcttagtcttcagagcgctatgagcgttaggttcaactcgaatggcacacaactactcgcactgcggcggcgcttgccgcccgtgttgtacgatatccattcgcggcttcctgtgtttcagtttgataatcagggttattttaactcctgtactatgaaaagctgctgtttcgccggcgatagagatcagtacattcttagcgggagcgacgactttaatctgtatatgtggcggattcccgccgacccagaagcaggtgggattggcagggtggtcaacggagctttcatggtcctcaaagggcataggagcatcgtaaaccaggtgcggttcaatcctcacacttacatgatctgttcaagtggagttgagaagattatcaagatctggtcaccttataagcagcccggctgtacaggtgatcttgatggcaggatcgaagacgactcacggtgtctttacacccacgaagaatacatttctcttgtgctcaattctgggtctggactctcccacgattacgcaaatcaatccgtgcaagaggaccccagaatgatggccttctttgactctctggtgagaagagaaatcgaaggatggtccagcgattccgacagtgatctgtccgaatcaacgattctccaacttcacgctggggtttccgagagatctggctataccgactctgaatcctctgccagcctgccacgttcccctccacccactgttgacgaatctgctgacaacgcttttcacctgggcccactgcgcgtcaccacaacgaacacagttgccagcacccctcccacgccgacgtgcgaagacgccgcttccagacaacagcgactgtctgcattgaggcggtatcaagacaaaagactgctggccctatctaatgagtccgactctgaggaaaatgtatgtgaggtagagttagatacagacctatttcctcgtcccaggtctcccagtcctgaagacgaatcttcctcatcaagcagctcgtcctcctctgaggacgaagaagaactcaatgagcgacgggcttccacgtggcagcgcaacgccatgcggcgcagacagaagacaacgcgcgaggacaagccctccgcacccattaaaccaactaacacttacattggggaagacaactacgactacccacagattaaagtggatgatctgtctagctccccaacttcttcacccgagcggagtacttcaactttagagatccaacctagccgcgccagcccaacatcagacatcgagtctgtagagagaaaaatttacaaagcatataagtggcttcggtattcctacattagctactcgaataataaagacggtgaaacttccctagttaccggcgaggcagatgaagggcgcgctggcactagtcacaaggataatcccgcccctagctcctccaaggaagcttgcctcaacattgccatggctcagcgaaatcaagatctgcctccggaggggtgttcaaaggacaccttcaaggaggaaactcctcgcaccccttccaacggtccgggacacgaacattcatcacatgcttgggctgaagttcccgaaggcacctcccaggacaccggcaattccggatctgtcgaacaccctttcgaaaccaagaaactgaacggaaaggcgctgtcctctcgagccgaggagcctccctcccccccagtgcctaaagctagcggttcaacattaaatagcggtagtggaaattgtccccgaacccagtctgacgatagtgaagaaagatcactcgaaactatctgcgctaaccacaataacggtcgtctgcacccaagaccaccccatccacataacaacgggcagaacctgggcgaactcgaggtagtggcttacagctctccaggacatagtgacaccgaccgtgataattcgtcactcactgggaccctgctccataaggattgttgcggaagcgagatggcctgtgaaacccccaatgctggtacacgggaggatccaactgatacgcctgccactgactcatctagagccgtacacggacattctgggctaaagaggcagcggattgagctggaagacactgacagtgaaaattcatctagtgaaaagaaactgaagacttag

SEQ ID NO: 184700 - DNA, 2583 bp, synthetic construct
  misc_feature 1..2583: note = Description of Artificial Sequence: Synthetic coding sequence
  source 1..2583: mol_type = other DNA
atggagcaggccatccacagccgggtgaagcccatccagctgaagggcgagcaccattcaaatatcttctgtctcgccttcaattccggcaacacaaaggtgttcagcggggggaatgacgagcaggtcattctccacgacgttgaatctagtgagacactcgacgtgtttgcacatgaggacgctgtgtacggcctctctgtttctccagtgaatgataacatattcgccagtagttcagatgacggtagagtgctgatttgggatattagagaatccccccacggggaacctttttgtctggcaaactacccttctgccttccacagtgtgatgtttaatcctgtggagccaagactactggcaaccgcaaattcgaaggaaggtgtcggactgtgggacatcagaaaaccgcagtcttccctcctgcggtacggagggaacctttcactgcagtctgctatgtccgtgcgtttcaacagcaatggcacccagctgctggccctccgaagaagactaccgcccgtgttatacgatatacacagccgcctgcccgtgtttcagttcgataatcagggttattttaacagttgtactatgaaatcttgctgctttgcaggtgacagggaccagtacatcttgtctggtagcgatgactttaacctgtacatgtggcgcatccccgccgaccctgaagctggtggtattggtagggtcgtgaacggagcattcatggtcttaaaggggcataggagtattgttaaccaggtccggtttaatccacacacgtacatgatttgcagcagtggggttgaaaagattatcaaaatttggagcccttataaacaacccggctgtacgggagacctggatggacgcatagaagatgattcgcgttgtctatatactcacgaggaatacattagtctagtgctcaacagcggctcgggactgagccacgactatgcgaaccagagcgtccaggaggaccctaggatgatggcattttttgattctctggtgcggagagagatcgagggttggtcctctgactcggatagcgatctgtccgagagcactattctgcagctccatgccggggtttcggaaagatcagggtatacggatagtgagtccagcgccagtcttccgagaagccctccccccactgtggatgagagcgccgacaacgctttccacctgggacctctgcgagtaaccaccaccaacacagttgcatctacgccccccacccctacatgcgaagatgctgcaagccgccagcagcgactgtccgccctgaggcgctatcaggataagagattgctcgccctaagcaatgagtctgacagcgaggagaacgtctgtgaagtcgagctcgacacggatctttttccgcggccacggtctccgtcccccgaagacgaatcctccagttctagctcctccagttctagtgaggacgaagaggagttgaatgaacggagggcgtccacatggcagagaaacgccatgcgacgtaggcaaaaaaccactagagaagataagccgtctgcaccgataaagcctacaaacacttatattggggaggacaactacgattaccctcagatcaaggttgacgacctgtcttcaagtccgacatctagtcctgaaaggagcacatcaacccttgagatccagccatcacgggccagtcccacgagtgatattgaatccgttgagcggaaaatctataaagcctacaaatggttgcgatacagttacatctcttattctaacaacaaggacggggagacctctctggtgacaggggaggcagacgagggtcgagcgggcacttcccataaagacaatcccgcaccttcctcctctaaggaggcgtgtctgaatatagccatggcccaaaggaatcaggacctgccacccgaaggatgtagtaaagacacctttaaggaggaaaccccaagaacccccagcaacggtcctgggcacgagcattcctcccacgcctgggccgaggtccccgagggaaccagtcaagacactggcaactccgggagcgtggaacacccatttgagaccaagaagctgaacggcaaggccctgtcctcacgagccgaagaacccccctcaccacccgtgccaaaggcctctggaagtaccctaaacagcggaagtggcaactgtccccggacccaaagcgatgattccgaagagcggagcttagagacaatttgtgccaatcataacaacggcagactgcaccctagacccccacacccacacaataatggacagaatcttggagaactggaggttgttgcctatagtagtcccgggcattcggacaccgatcgagacaacagtagtctcactgggaccctcttgcataaagattgctgtggcagcgagatggcctgcgagacacccaatgctggaaccagagaagacccaacggacacaccagccaccgactcctcccgggctgtgcacggccactcaggactgaaacggcagcgcatcgagctcgaggacacagactcggaaaactcctccagcgagaagaaactgaagacctag

SEQ ID NO: 184701 - DNA, 633 bp, synthetic construct
  misc_feature 1..633: note = Description of Artificial Sequence: Synthetic coding sequence
  source 1..633: mol_type = other DNA
atggagcaggccatccacagccgggtgaagcccatccagctgaagggagaacatcatagtaatattttctgtctggccttcaactcaggaaacaccaaagtcttctctggaggtaacgacgagcaagtcattctacacgatgtggaatctgaaacacttgacgtattcgcacatgaggacgcagtgtacgggctgagcgtttcccctgttaatgataacattttcgcctctagttcagacgacggacgagtcttgatctgggacattagagaatcacctcatggcgaacccttttgtttggccaattaccccagcgcgttccacagcgtcatgttcaatcccgtggaaccaagacttctcgccaccgccaattcgaaagagggtgtggggctgtgggatattaggaagccgcagagttctctgctcagatatggcggcaacctgagcctgcaaagtgcaatgtcagtgaggtttaacagtaatggaacgcagctcttggccctgaggagacgtttacctccagtcctctatgatattcatagcaggttaccagtgttccagtttgacaatcaggggtacttcaatagctgtaccatgaaaagctgttgctttgcaggggaccgggaccagtag

SEQ ID NO: 184702 - DNA, 2583 bp, synthetic construct
  misc_feature 1..2583: note = Description of Artificial Sequence: Synthetic coding sequence
  source 1..2583: mol_type = other DNA
atggagcaggccatccacagccgggtgaagcccatccagctgaagggggagcaccactccaacatattctgcctggccttcaattccggcaataccaaggtgttttctggcggcaatgatgagcaggtgatactgcacgatgtagaaagctccgagacactggatgtattcgcccatgaggatgccgtgtacggactgtctgtatccccagtcaacgataacatcttcgcatctagcagcgatgacgggagggtgctgatctgggatatcagagagtcaccccatggagagcccttttgcttagcaaactacccatctgctttccattctgtaatgtttaaccctgtcgaacctcgattactggcgacagcgaatagcaaggaaggagtgggactctgggacatcagaaaacctcagtcgagtctactgagatacggaggcaacctctctctgcagtccgctatgtcagtacgctttaattcaaatggcacacaactcctcgcgctgaggagacgtcttccaccagtgctttacgacatccactctcgattacccgtgttccagtttgacaaccaagggtacttcaattcatgtactatgaagtcatgctgctttgcaggagatcgtgatcaatatatcctttcggggtctgatgacttcaatctgtatatgtggcgaatacctgccgatcctgaggccggcggaatcgggcgtgtcgtgaatggagcctttatggttctcaagggacaccggtccattgtgaaccaggttcgctttaacccacacacttacatgatttgcagcagcggagttgagaaaattatcaaaatttggtctccttataagcagccaggctgcactggagatctggacggtagaatagaggacgatagccggtgcctttatacacacgaggaatatattagtttagtgctaaacagcggatccggcctgtcacacgactacgccaaccagtctgtccaggaagaccccagaatgatggcattcttcgactcactggttagacgagaaatcgaaggctggtctagcgactccgatagtgatttgtcagagagcacaatactgcagctgcacgccggggtgtctgagcgttccggctacacagatagcgaaagttcagcctccctgccgaggagccctcctcccacggtggacgaatctgccgacaatgcatttcaccttggccccctgagagtgacgaccactaatacagtggcaagcacaccccctactcccacttgcgaggatgctgcctcacggcagcagcgtttaagtgcgttgcggcgctaccaagacaaacgattgcttgcgctcagtaatgaatccgactctgaggagaacgtgtgcgaggtggaacttgatacggacctcttccctaggccgagatccccgagtccggaggacgagtcctcgtcatcttcatcgtcatcatctagcgaagatgaggaggaactcaatgagcgtcgggcctcgacttggcagcgcaatgctatgaggaggcggcagaaaacaacgagggaagataagccctctgcccctatcaaacctacaaacacctatatcggggaagacaactatgactaccctcaaataaaggtggatgatctgtcatcaagcccaacaagtagtcccgaaagaagtacttcaaccctggaaatccagccatctagggcaagtccaacctcagacattgagtcagtcgagagaaagatctacaaggcgtataagtggctacgctatagttatataagctattccaacaacaaagatggagagacttccttggtaacgggagaagccgacgaggggcgcgctggcacctctcacaaagacaatccagcaccatcctccagcaaagaagcctgcctgaacatcgcgatggcacagaggaaccaggaccttcctccagagggctgttctaaagatacttttaaagaggaaactccgaggacacccagcaatggccctgggcacgaacattctagccatgcatgggccgaagttccagaaggaacctctcaggatacggggaattcagggagtgtggagcacccttttgagactaagaagttgaatggcaaagctctgagctctcgcgctgaagaacctccttcacctcccgtgcccaaggcatccggtagcacactgaacagcggtagtgggaattgtcctcgcacacagtcagatgactccgaggaacgcagcctcgagacaatttgcgctaaccacaacaacgggcggttgcatccacggcctcctcaccctcataataatggccaaaatctgggcgagctcgaggtcgtggcctactcctcacccggtcactctgacaccgaccgggataattcaagcctgacagggacattattgcacaaggactgctgcggaagcgagatggcgtgtgagacccctaacgctggtacaagagaagacccaaccgatacaccagcaacagactcctctcgcgcggtgcacggacacagcgggctaaaaaggcaaagaattgagctggaggataccgactcagagaattccagttcagaaaagaagctgaagacctag

SEQ ID NO: 184703 - DNA, 357 bp, synthetic construct
  misc_feature 1..357: note = Description of Artificial Sequence: Synthetic coding sequence
  source 1..357: mol_type = other DNA
atgcccttcctggagctggacaccaacctgcccgccaaccgggtgcctgccggcttggagaaaagactctgcgccgcggcagctagtatcctcggaaagcctgcggatagagtcaacgtgactgttagacccggacttgccatggcactctcaggttcgaccgaaccatgtgctcaactcagcatctcttctattggtgtggtcggcaccgccgaggacaaccgctcccattctgcgcattttttcgaatttctgaccaaggagctggctctgggacaggaccgaattctgatcaggttcttccctctcgagtcctggcagattggaaagatcggtacggtcatgacctttctttag

SEQ ID NO: 184704 - DNA, 357 bp, synthetic construct
  misc_feature 1..357: note = Description of Artificial Sequence: Synthetic coding sequence
  source 1..357: mol_type = other DNA
atgcccttcctggagctggacaccaacctgcccgccaaccgggtgccagcggggttggaaaaaagattatgtgccgccgccgcatcaatcctgggtaagcctgctgaccgggtaaatgtgactgtgcgacctggactagcaatggcactgtcaggatctaccgaaccttgtgcacagctctctatatctagtataggcgtcgtcggcacagccgaagataacaggtcccactcagcccacttctttgagtttttaaccaaggagctcgcccttggacaggatcgcatcctaatcagattctttccccttgaaagttggcagattggtaaaatcggaacggtgatgacctttttgtag

SEQ ID NO: 184705 - DNA, 399 bp, synthetic construct
  misc_feature 1..399: note = Description of Artificial Sequence: Synthetic coding sequence
  source 1..399: mol_type = other DNA
atgcagctgttcctgctggccgtgagcgtgcccctgcccgccatgcccttcttagaactggatacgaacttgcctgcaaaccgagttcctgccggactggagaagagactgtgcgccgctgccgcctcaatcctcggtaaaccagccgatagagttaatgtcactgtgcgccctggacttgccatggccctgagcggctcgacggagccttgcgcacagctgtccataagcagtatcggcgttgtcggaacagccgaagacaatcgatcgcactccgcccatttctttgagtttctcacaaaagagttggccctaggccaggataggattctgatccgctttttccccctagagtcctggcagattgggaagatcggcacagtcatgacctttctgtag

SEQ ID NO: 184706 - DNA, 348 bp, synthetic construct
  misc_feature 1..348: note = Description of Artificial Sequence: Synthetic coding sequence
  source 1..348: mol_type = other DNA
atgcccatgttcatcgtgaacaccaacgtgccccgggccagcgtgcccgatgggttcctgagcgagctcacacagcagctcgcccaagccacaggcaaaccgccgcaatacattgcggtccacgtcgtgccagaccagctgatggcattcggcggcagtagcgagccttgcgctctgtgcagcttacattctatcggaaaaatagggggagctcagaaccggtcttactccaaattgctgtgtgggcttttagccgaaaggctccgcattagtccagaccgcgtttacattaattattacgacatgaatgctgcaaatgtcggatggaacaattctacctttgcctag

SEQ ID NO: 184707 - DNA, 1224 bp, synthetic construct
  misc_feature 1..1224: note = Description of Artificial Sequence: Synthetic coding sequence
  source 1..1224: mol_type = other DNA
atgaacaacagcggcgccgacgagatcggcaagctgttcgtgggcggactggactggagcactacccaagagaccctgcgttcctacttcagccagtatggggaagtagtcgactgcgtaatcatgaaagataagacaacaaatcagtctaggggcttcggtttcgtaaagtttaaggatcctaactgcgtcggaacagtactagcctcccggccccatacgctggatgggcggaacatcgatcctaagccttgtacaccgcggggaatgcagcccgaacgaactcgtcccaaggaggggtggcagaaaggacccagatccgacaactccaaatccaacaagatcttcgtggggggaatcccgcacaactgtggggagaccgaactgcgtgagtacttcaagaagttcggcgtagtgactgaagtcgtgatgatctatgacgccgaaaaacagaggccaaggggatttgggttcattacgttcgaggatgagcagtctgtggatcaagctgtaaacatgcatttccatgacatcatggggaagaaagtggaagtgaaaagagccgagccccgcgacagcaagtcccaggccccaggccagccaggggcttcacagtggggatcccgggtggtccccaatgcagccaatgggtgggccggacagcctcctcccacgtggcaacagggctacgggccacaggggatgtgggtgccagcagggcaggctatagggggctacggccctccccccgctggtcgcggcgctccaccgccacccccacccttcacctcctacatcgtgtccacccctcctggcgggtttcctcctcctcaagggtttccccaggggtacggagcacctccccaattctcttttggctacggaccccctccgcccccccctgaccagttcgctcctcctggagtcccacctcctcccgcaacaccaggtgctgctccgttggctttcccacctcctcccagtcaggcagcgcccgatatgtccaagcccccaactgctcagccggactttccatatggacagtacgccggatacggacaggacttgtcaggctttggccagggattttccgacccttcccagcaaccaccgagctacggcgggccgtccgttcccggctctgggggcccacctgctggtggaagcggattcggccggggccagaaccacaacgttcaggggttccacccctataggcgttag

SEQ ID NO: 184708 - DNA, 2223 bp, synthetic construct
  misc_feature 1..2223: note = Description of Artificial Sequence: Synthetic coding sequence
  source 1..2223: mol_type = other DNA
atggccgccttcagcgagatgggcgtgatgcccgagatcgcccaggcagtggaggagatggactggcttcttcccacagatatacaggctgagtctataccactcattctgggcgggggagatgtgctgatggccgccgagaccggcagcggtaaaaccggagctttttcgatacctgtgatccaaatcgtatacgaaactctcaaggatcagcaagaagggaaaaaggggaagaccactatcaaaacaggcgcctctgtcctcaacaagtggcagatgaatccttatgacagagggagcgcatttgctatcggtagcgacgggctgtgctgccagagccgagaagtcaaggaatggcacggctgtagagccaccaagggtctcatgaagggtaagcattattatgaagttagttgtcatgaccagggtttatgcagggtcggctggagtacaatgcaggcttcattggatctggggactgacaaatttgggtttggttttgggggaaccggcaagaagagccacaataagcaattcgataattacggcgaagaatttacaatgcacgacaccatcgggtgctacttagacatcgacaaaggccacgtgaaattctctaaaaacgggaaggatctggggctggcttttgaaattccgccccatatgaagaatcaagcactgtttcccgcttgcgtgttgaaaaatgccgagcttaagttcaactttggggaggaggagttcaaattcccacctaaggacggattcgtggccctctccaaggcccccgatggctacatagttaagtcacaacacagtgggaacgcccaggtgacacagaccaagtttttgcctaacgctcctaaggcgctcattgtggagccctctagggagctagccgagcagacactcaataatattaagcagttcaagaagtatatcgacaatcctaagctccgcgagctgctgataatcggcggcgtcgccgcccgggatcaacttagcgttctcgagaatggagtggacatagtcgtagggacgcctggacggctggacgacttggtgtcaacagggaaattgaatctctctcaagtgcgcttcttggtccttgacgaagccgacggtctgctcagccagggctattctgactttatcaacagaatgcacaatcagatccctcaggtgacctcggatggaaaaagattacaggtaatagtgtgttccgccactctccattccttcgatgtaaaaaaactcagcgaaaaaattatgcattttcctacttgggtggacttaaaaggggaggactcagttcctgatacagtacaccatgtcgtcgttcctgtgaatcctaagaccgaccgtctgtgggaaaggctcggtaaaagtcacattcgcaccgatgacgtgcatgcaaaggacaatacacgtccaggagccaatagcccagagatgtggagtgaagcgattaaaatacttaagggagagtacgccgtgagagctatcaaagagcataagatggaccaggctatcatcttctgtcgtactaagatcgactgtgataacttagaacagtattttatccagcaagggggcggcccggataagaagggccaccaattctcctgcgtgtgcttgcatggtgacagaaagccccatgaacggaagcagaacctggaacgtttcaagaaaggagatgttaggtttctcatctgcacagacgtcgctgcccggggaatcgacatacacggggttccgtacgttattaacgtgaccctgccagacgagaaacagaactatgtgcacaggatcggccgagtgggccgcgcagaacgaatgggcctggccatatctctcgttgcaacagagaaggagaaagtctggtaccacgtgtgctcttcacgtggcaaagggtgttataatacccgtctaaaagaggacggcggatgtactatctggtacaacgaaatgcagcttttgtcagagatcgaagagcatttaaactgtaccattagtcaggtagagcccgatataaaggtccctgtggacgagttcgatggcaaagtcacgtacggacagaagagagcagccggtgggggcagctataagggtcacgtcgacatcctggctccaacggttcaggagctggccgccctggagaaggaagctcagacctcctttttgcaccttgggtatctcccaaatcagctgtttagaaccttttag

SEQ ID NO: 184709 - DNA, 51 bp, synthetic construct
  misc_feature 1..51: note = Description of Artificial Sequence: Synthetic coding sequence
  source 1..51: mol_type = other DNA
atggccgccttcagcgagatgggcgtgatgcccgagatcgcccaggcatag

SEQ ID NO: 184710 - DNA, 1869 bp, synthetic construct
  misc_feature 1..1869: note = Description of Artificial Sequence: Synthetic coding sequence
  source 1..1869: mol_type = other DNA
atggccgccttcagcgagatgggcgtgatgcccgagatcgcccaggcagtagaggagatggattggctcctgccaacagatatccaagctgagtctatcccattaattttggggggtggagacgtcctcatggccgcagaaactgggtctggcaagaccggcgccttctccattcccgttatccagatcgtttatgaaacccttaaagaccagcaggagggtaagaagggtaagacaaccatcaagacaggagccagcgttctgaataaatggcaaatgaacccatatgatcgcgaggtcaaggaatggcatgggtgcagagccacaaaaggactgatgaagggtaagcattactatgaagtgagttgccatgaccagggcctgtgccgagtcggctggtccactatgcaggcttccctggatctgggtactgacaaattcggctttggctttgggggcacgggcaagaaaagtcacaataaacagttcgacaactacggcgaggaatttaccatgcacgacactatcggatgctacctggatattgataagggccacgttaaattcagtaaaaacggaaaagatctgggtctggccttcgagatccctccacacatgaagaaccaggcactgtttcccgcctgcgtccttaaaaacgcggaactaaagttcaacttcggggaggaagagttcaagttcccacccaaggacggcttcgtggccctctccaaagctccagatgggtacatcgttaaaagccagcattcagggaatgcacaggtgacccagacgaaatttctacccaacgcgcctaaggctctgatagtggagccatcccgcgaacttgcagaacagacactcaataacattaagcagtttaaaaaatacattgacaaccccaagctcagagaactgctcattattggcggcgtggctgcccgtgaccagctcagtgtgcttgagaatggcgttgatattgtagttggcacccctggacgactggacgaccttgtgtcgaccggaaagctgaaccttagccaggttaggttcctggtgcttgatgaggctgatgggctgctgagtcaggggtactccgactttataaaccgaatgcataatcaaatcccacaggtgacttccgacggtaagcggctgcaggtcattgtgtgcagcgctaccctacacagctttgacgtgaaaaaattgagcgagaaaattatgcacttcccaacttgggtggacctaaagggggaggattccgtgcccgatacggtacaccatgtggtcgtcccagtgaatcctaagaccgatcgtctatgggaacgccttggaaagtcccatatccgtactgacgacgttcatgctaaagataatactcgacctggagcaaattctccagagatgtggtccgaggccatcaaaatcttaaaaggcgagtacgcggtcagagccattaaggagcataaaatggatcaggccatcattttttgcaggacaaaaatcgattgcgacaacctggagcagtattttatccagcaaggaggaggtcctgacaagaagggacatcagttcagctgcgtctgtcttcacggcgacagaaagccccacgagcggaaacagaacctcgagcggttcaagaaaggcgatgtgcgcttccttatatgcaccgatgtggctgctcgcggaatcgacatccacggtgtgccctatgttattaatgtgacattacccgatgagaaacagaattacgtgcataggattggcagagtcgggagagccgaacgtatggggctagcaatttcacttgtggctacggaaaaggagaaagtgtggtatcatatggtacagagggacgcagtgactatttag

SEQ ID NO: 184711 - DNA, 2628 bp, synthetic construct
  misc_feature 1..2628: note = Description of Artificial Sequence: Synthetic coding sequence
  source 1..2628: mol_type = other DNA
atgggcaagaccgccaacagccccggcagcggcgcccggcccgacccggtgcggagctttaacaggtggaagaaaaagcattcacaccggcagaacaaaaagaagcagcttagaaagcagctgaaaaaacccgaatggcaggtagaacgcgagagcattagtagactaatgcagaactacgagaagatcaatgtgaacgagataactaggtttagtgattttcccttaagtaagaaaacgctgaagggtctacaagaggcacagtataggcttgtcacagagatccagaagcagaccattgggctcgcactgcagggcaaagacgtccttggggctgctaagaccggctccggcaagacgctcgcttttctggttcccgtgcttgaagccctgtatcgtctgcagtggacaagtacagacggtcttggcgttctgattatatctcctacacgagagctagcgtatcagactttcgaagtcctgcgaaaagttggtaagaaccacgattttagcgctggtcttattataggcgggaaagatctgaaacatgaggcggaacggattaacaatataaatatcctagtgtgcacccccgggagactcctccagcacatggacgagacagtgtcattccatgccactgatctgcagatgctagtgctcgatgaagctgatcgcattcttgacatgggctttgccgacacaatgaatgctgtgattgagaaccttccaaaaaaacgacagacactactgttttcggcaacacagactaagagcgttaaagacctggcccgactctctctcaaaaatcccgagtacgtgtgggttcacgagaaggcgaaatacagtaccccagcaacacttgagcagaactacattgtatgtgagctgcagcagaaaatatcagtgctctactccttcctcaggtcacacctaaaaaaaaaatccatcgtttttttctcttcatgtaaagaggtgcagtacctctaccgcgtattttgtagactgcgtcccggcgtgagtatcttagcgctccacggccggcagcagcaaatgcggaggatggaggtttacaatgagttcgtccgcaagagagcagcggtgctctttgccacggatatcgcagcccgggggctggatttccctgcagtgaattgggtcttgcagttcgactgccccgaggacgccaatacttacatccatagggctggtaggaccgcaagatataaagaggacggtgaggcccttctaattctcctgccatcagagaaggctatggtgcagcagctgctgcagaagaaggtgccggtgaaagagatcaaaattaaccccgagaagcttatcgacgtgcaaaagaaacttgagtctatacttgctcaagatcaggaccttaaggaaagagcacagcggtgctttgtgtcctatgtccgaagcgtttacttgatgaaggacaaagaagtctttgacgtatctaagttgccaattcccgaatatgctctatccctcggcttggctgttgcaccacgcgtcagatttctacaaaaaatgcagaagcaaccaacgaaagaactcgtccggtctcaggccgataaggtgattgagccaagagccccaagtctgacgaacgacgaagtcgaagaatttcgagcttatttcaacgagaagatgagtatactccaaaaggggggaaagagactggagggcacagagcataggcaggacaatgacactggaaacgaggaacaggaagaggaggaggatgatgaagaagaaatggaagaaaaactagctaaagccaaggggtcccaggccccgagcctgcctaacacctccgaagcccagaagatcaaagaggtcccaacacagttccttgaccgagatgaggaggaggaagatgccgacttcctcaaggtgaagaggcacaacgtgttcggtctagacctgaaggacgagaagacgctgcagaaaaaggagcctagtaaatcgtccattaagaaaaaaatgactaaggtcgctgaagcgaagaaagttatgaaaaggaacttcaaggtgaataaaaaaattacctttacggacgaaggggagctcgtgcaacagtggccccagatgcagaaaagcgcgataaaagatgctgaagaagatgacgataccggggggattaacctccataaagcgaaagagcgattgcaggaggaagataagtttgataaggaggagtaccgcaaaaagattaaagccaaacaccgggaaaaacgacttaaggaacgtgaagcgaggcgcgaagctaataagaggcaggccaaggccaaggacgaggaggaagccttcttagactggtctgatgacgatgacgacgacgatgatggttttgacccatccactttgccagaccctgataagtatcgctcaagtgaagacagcgactcagaagatatggagaataaaatctctgacacaaagaagaaacaaggtatgaaaaaacgaagcaattctgaagtagaagatgtgggtcccacaagccacaaccggaagaaagccagatgggacactcttgagccgctggataccggcctctctctcgcagaagacgaggagcttgtgctccacctgctcaggtcccaatcttag

SEQ ID NO: 184712 - DNA, 2346 bp, synthetic construct
  misc_feature 1..2346: note = Description of Artificial Sequence: Synthetic coding sequence
  source 1..2346: mol_type = other DNA
atgggcaagaccgccaacagccccggcagcggcgcccggcccgacccagtgcggtccttcaatcgatggaagaaaaaacacagtcacagacaaaataaaaagaagcagcttcgaaaacagctgaaaaagcctgaatggcaagtcgagagggaatctatttcaagattaatgcagaactatgaaaaaattaacgttaacgagatcaccaggttcagtgatttccctctttcaaaaaagaccctgaaagggctgcaagaggcccagtatcgcctggtgaccgagatccaaaaacagacaatcggtctcgctctccagggcaaggatgtgctgggggctgccaagaccggcagtggcaaaacactggcctttctcgtgcctgttaatgaggcagatcgtattctggacatggggttcgctgacaccatgaatgcagtgattgagaatctaccgaagaagcgacagaccctcctcttttccgcgacccagaccaagagcgtgaaggatcttgctagactttcgctgaagaaccctgagtacgtctgggtacatgaaaaggccaaatattctactccagcaaccctcgagcagaattatatcgtttgtgagctccagcaaaaaatttccgtattgtatagcttccttcggtcccacctcaagaaaaagtctattgtgttcttctcttcctgtaaagaagtccagtacctgtaccgcgtgttttgccgactaaggcccggcgtctcgatccttgctctccacggccgacagcagcagatgcggcgaatggaggtgtataacgagtttgttcgcaagagggctgctgtactgttcgccactgacattgctgcacggggactggacttcccggcagtgaattgggtactccagttcgactgtcccgaagacgccaatacttacatccatcgagccggaaggaccgcccgctataaggaggatggggaagcattgctgattctgctgcccagtgaaaaggcaatggttcagcaattacttcaaaagaaggttccggtaaaggagatcaagatcaaccccgaaaagcttattgacgtgcagaagaaactagagtccatcttagcccaagatcaagatctgaaggaaagggcccaaagatgctttgtgtcttacgttagaagtgtctacttaatgaaggacaaggaagttttcgatgtttctaaactgcccatacccgagtatgccctgtctctgggcttggcagtggccccccgagttcggtttcttcaaaagatgcagaagcagccgacaaaggaactggtccggtcccaagctgataaggtcattgagccacgagccccctcactgacgaacgatgaggtggaggagtttagagcgtacttcaatgagaagatgagcatacttcaaaaaggcggaaagaggctggagggcaccgagcaccgtcaggataatgacactggcaacgaggaacaagaagaggaggaagatgacgaggaggagatggaggagaagcttgccaaagccaagggttctcaagctcctagcttgcccaatacaagtgaggcacagaagatcaaagaggtccccacccagttcctggaccgggacgaggaggaagaggatgcagatttccttaaggtgaagagacataatgtctttggactagatctgaaagatgaaaaaacgctgcaaaaaaaggagcccagtaagtcttctattaagaagaaaatgactaaggtagcggaagcaaagaaagtcatgaaacgaaactttaaggtaaacaaaaagatcaccttcaccgacgagggcgaacttgtccagcagtggccacaaatgcaaaaatctgcaattaaagacgccgaggaggacgatgacacagggggaatcaacttacacaaggcgaaggagagactgcaggaagaagataagttcgataaagaagagtaccgcaagaagattaaagccaagcaccgcgagaagcgtttgaaggagagagaagcacgccgagaagccaataagcggcaggccaaagcgaaggatgaagaggaggcattcctggactggtcagacgacgacgatgacgacgacgacggttttgacccaagcaccctgccagatccggacaaataccgttctagcgaagacagcgactctgaagatatggaaaataagatttcggacactaaaaagaaacagggaatgaagaaacgatccaattcagaggtggaggacgttggccctacaagccacaatagaaagaaggccaggtgggatacactggaaccactagatacaggcctgtcacttgcggaggatgaagagctggtgttacatctgctcagatcgcaatcgtag

SEQ ID NO: 184713 - DNA, 1959 bp, synthetic construct
  misc_feature 1..1959: note = Description of Artificial Sequence: Synthetic coding sequence
  source 1..1959: mol_type = other DNA
atgcggggcggcggcttcggcgaccgggaccgggaccgggaccggggcggcttcggcgcccgcgggggcggaggccttcccccgaagaaattcgggaatccaggagagcggctgcgtaaaaaaaagtgggacctgagcgaactccccaagtttgagaagaatttttacgtagagcaccccgaggtggcacgtttgactccttacgaagtcgatgagctgaggagaaagaaggagattacagtcagaggaggtgatgtgtgccccaaacctgttttcgcttttcatcacgctaacttcccgcagtatgtaatggacgttctgatggaccagcattttactgagccaaccccgattcagtgccaggggttcccgctagccctcagtggaagggatatggtggggatcgcgcaaactggttcagggaaaacactcgcctatctgctgcctgccattgttcatatcaaccatcagccatatctggagaggggagacggccccatttgtcttgttttggccccgacgcgggaactggcacagcaagtgcagcaggtggccgatgactatgggaaatgcagccgccttaagagtacgtgtatttatggaggggccccgaagggcccccaaatccgcgatctcgaaagaggtgtagagatctgtatcgccacacccggccggctaatcgactttctagaaagtggaaagaccaatctgagaagatgtacgtatctagtcctggatgaggcagatagaatgttagacatgggctttgagcctcagatccggaaaatcgtagatcagattagacctgaccgacagaccctcatgtggagcgcgacttggcccaaggaggtgcgacagctcgctgaggactttctcagagactatacccagattaatgttggaaacctggaactgtcagccaatcacaatatcctgcagatcgtagacgtttgcatggaaagcgagaaagaccataaactgattcagttgatggaagaaattatggccgaaaaggaaaacaagaccatcatattcgtcgaaactaagaggcgatgcgatgacctgaccagacgcatgcgacgtgacggttggcctgcaatgtgtatccacggcgataaatcccagccagagcgggactgggtgctgaatgaattccgttcaggcaaggcaccgattcttatcgccaccgacgtggcctcaagaggtctggggttcgatgtagaggacgtcaagttcgtcataaattacgactaccctaacagcagtgaggactacgtccatcggattggacggacagcccgctccacaaataaaggaacggcctacactttttttacgcccggcaacctaaagcaagccagagagttgattaaggtgttagaggaggctaaccaagccataaacccaaaacttatgcaacttgttgaccatcgcggcggtggtggcggcggaggggggcgttctagatataggacgacatctagcgcaaacaaccccaatcttatgtatcaggacgagtgtgatcgcaggctgaggggggtgaaagatggcgggcgacgcgatagtgcctcttatcgggatcgttctgagactgacagggccggatatgctaacggcagcggatatggcagtccaaattctgctttcggcgcccaggccggccagtacacttacgggcaggggacttacggagccgcggcatatggcacgtcctcttataccgcccaagagtacggcgcaggaacttatggggcctcctctacaacttcaaccgggagaagttcacaatcatcgtcccagcaattcagtgggatcgggagaagtggacagcagccccaacccttaatgtcacagcagtttgcacagcctcccggggccaccaatatgatagggtatatgggacagaccgcctaccagtaccctccaccgccccccccacccccgccaagccggaaatag

SEQ ID NO: 184714 - DNA, 2196 bp, synthetic construct
  misc_feature 1..2196: note = Description of Artificial Sequence: Synthetic coding sequence
  source 1..2196: mol_type = other DNA
ctgcccaccggcttcgtggcccccatcctgtgcgtgctgctgcccagtccaacccgggaagccgccacagtggctagcgctaccggagatagtgctagcgaaagggagtcagcggctcctgcggcggcacccaccgcagaagcacctcctcctagtgttgttacccgcccggaacctcaagccttaccatctccggctattagagcccctttaccagatctgtacccctttggaacaatgcgtgggggcggctttggcgacagagatagagatcgggatagaggcggattcggcgcaaggggaggcggagggctgccacctaaaaaatttggcaatcctggcgagagactgcggaagaaaaaatgggacttgagcgagctgccaaagtttgagaagaacttttacgtggaacatcctgaagtggccagactcacaccatatgaggtggatgaactgcggaggaaaaaagaaattactgtgagaggcggagacgtttgccctaagcctgtcttcgcttttcaccatgcaaatttcccacagtacgtgatggacgtcctaatggatcagcactttacggaaccaaccccaatccagtgtcagggatttcctctggcactctccggacgcgacatggttggcatcgctcagactgggtctggcaagaccctcgcttacctgttaccagcaatcgtgcacatcaatcaccagccttacctcgagagaggggacggcccaatttgtttggtcttggcacctacacgtgaattagcacagcaagtgcagcaagttgcagacgactatgggaaatgcagcagactcaaaagcacatgcatctacggcggcgcacctaagggtccccaaattagagatctggagaggggcgtggaaatctgcattgccaccccaggtcggttgatagactttctcgaatctggtaaaaccaatcttcgcagatgtacctatttggttcttgatgaggcagatagaatgctcgacatgggatttgagccccagattagaaaaatcgtggaccagattaggcctgatcgccaaacactcatgtggtccgccacctggcctaaggaggtgcgtcagctggcggaggatttccttagggattatacgcagattaacgtggggaatttagaactgagcgctaatcataacatcttgcagattgtggatgtgtgtatggaatcagaaaaggatcacaagctgattcaactcatggaggagattatggcggagaaggaaaataaaactatcatcttcgtggagacaaaaagaaggtgcgatgacctgactaggagaatgcgacgggatgggtggccagctatgtgcatccatggcgataaaagtcagcccgagagagactgggttctgaatgaatttaggagcggaaaggctcctatcttaatagctaccgatgtggcaagccgtggcctggatgttgaagacgtgaagttcgttattaattatgactacccaaattcttccgaggactacgtgcatagaataggccggacagcgagaagcacgaataaagggaccgcctatacattcttcactcctggaaatctgaagcaggccagggaactgattaaagtcctggaggaggctaatcaagcaatcaaccccaaactcatgcaattggttgatcaccgagggggaggaggaggaggtgggaagggaggacgctccaggtatcgaacaacttcctctgcaaacaatccaaacctgatgtatcaagacgagtgcgatcgaagactgcgtggtgtcaaggacggtggacgccgtgattcggcctcgtaccgtgaccgttccgaaacggacagggccggatatgccaatggaagtggctatggctctccaaacagcgcattcggggctcaggcaggacaatacacttatgggcagggaacttacggcgccgccgcgtatgggacctctagttatactgcccaggaatatggagccggcacatatggcgcgagttccacgactagtaccggaagatcctcacaatcatcatcacagcagttttcgggtatcggcaggtcgggccaacaacctcaacctttaatgtcccagcagttcgcccagccgccgggtgcgaccaacatgataggctacatgggccagacagcctatcaatacccccctccccctccacctccgcccccgtccagaaagtag

SEQ ID NO: 184715 - DNA, 2190 bp, synthetic construct
  misc_feature 1..2190: note = Description of Artificial Sequence: Synthetic coding sequence
  source 1..2190: mol_type = other DNA
ctgcccaccggcttcgtggcccccatcctgtgcgtgctgctgcccagtccgacccgggaagccgccaccgtggcttccgccaccggcgattctgcatcagaaagggaatcagcggccccggcagccgcccccaccgctgaggcaccccctccctcagtcgtgactcgccccgaaccgcaggcactcccatctcccgctatccgagcacctcttcctgacctatacccctttgggaccatgagggggggaggcttcggtgatcgggatcgcgatcgtgatagaggcggtttcggagccagaggcggtggaggacttccgcccaagaaatttggcaatccgggggagagactgcgaaaaaagaaatgggaccttagtgaactccccaagttcgaaaagaatttctatgtcgagcaccctgaagtggcccgtctcactccttacgaggtggatgaacttagaagaaaaaaagaaatcactgttcggggaggcgacgtctgtcccaaaccggtgtttgcatttcaccacgcaaattttccacagtacgtgatggacgtgctgatggaccagcatttcacagagccaacccccatccaatgccagggcttccccctagctctctctggccgcgatatggtgggcattgcgcagaccggcagcggtaagacactggcctacctccttcctgcaattgtccacattaaccaccagccttacttggagagaggcgatggtccaatctgccttgtactggcccctaccagagagttggctcagcaggtgcagcaggtggccgatgattatggcaagtgctctcgactgaaaagcacctgtatttacggtggggcccctaaagggccccagatcagggatctcgagagaggagtggagatttgtattgcaacccctggtcgcctcatagatttcctggagagtggcaagactaacctccgcagatgcacatacctggtgctcgacgaagccgatcgaatgcttgatatggggttcgagccgcagatcagaaagatcgtggatcagattcggcccgaccgtcaaactctgatgtggagcgcaacatggcctaaggaggtcaggcagttggctgaagatttcctcagggactatacacagatcaatgtgggtaacctggagttaagcgcaaatcataacatccttcagattgtggacgtatgcatggagtcagagaaagaccacaaactcatccagctcatggaggagattatggccgagaaagaaaacaagaccatcatctttgtggaaaccaaacggagatgcgatgatcttactcggcgtatgcgcagagacggctggcccgctatgtgtattcatggggacaaatcccaacctgagcgcgactgggtgcttaatgaattccgcagtggtaaggcccccatcctgatcgccaccgatgtcgctagtcggggtcttgacgtggaagacgtaaaatttgttattaactacgattatcctaatagcagcgaagactacgttcaccgcatcggtaggactgctagatccacaaacaagggcacagcttatacttttttcacacccgggaacctgaagcaggctcgcgagttaattaaggtcctggaagaagccaaccaggcaatcaacccaaaactgatgcagttggtcgatcaccggggtgggggaggaggtggaggagggcggtcccgctaccgaacaacaagctccgcaaacaaccctaaccttatgtaccaggatgagtgtgatcgaagactgcggggcgtaaaagacgggggccgcagagatagcgcaagctatcgcgacaggtctgagaccgacagagcaggctatgccaacggctctggctacgggtctccaaattctgcctttggggctcaagccggtcagtatacctacggccagggaacctatggcgccgccgcgtatggaacgagcagctataccgcccaagagtatggggctgggacatatggagcctcttcgaccacttctactgggagaagttcacagagcagttcccaacagttcagcggcatcggtcgttctggacagcagccgcagcctctcatgtcccagcaatttgcacagcctcccggagctaccaatatgatcgggtatatggggcaaactgcgtaccaatatccccctcctccgcccccacctccgccgtctagaaaatag

SEQ ID NO: 184716 - DNA, 2214 bp, synthetic construct
  misc_feature 1..2214: note = Description of Artificial Sequence: Synthetic coding sequence
  source 1..2214: mol_type = other DNA
cccaacctgcccaccggcttcgtggcccccatcctgtgcgtgctgctgccttcacccactcgggaagcagccaccgtcgcttctgcaactggcgactctgcttcagaacgggaatcggcagcaccagcagctgccccgaccgccgaagctccacctccaagcgttgtgacaagaccggaaccccaggcactgccatcccccgcaatacgcgcccctctgcctgatctctatccgttcgggacaatgcgggggggaggatttggagatagagatcgcgaccgggaccgcggcggttttggagctagaggagggggaggcctaccaccaaaaaaatttgggaacccgggcgagcgcctcagaaaaaaaaagtgggatctgtcagagcttccaaagttcgagaagaatttctacgtcgagcacccggaggtagcccggctcacaccatatgaagtggacgaactgcggcgcaagaaggaaattaccgtaaggggcggtgacgtatgtcctaaaccagttttcgcctttcatcatgctaattttcctcagtacgtaatggacgtgctgatggaccaacacttcacagagcccacacctatacaatgccaagggtttcccctggccctgagcggccgggatatggtcggaattgcccagacagggagcggcaagacgttggcttaccttttgccagcgatcgtgcatatcaatcatcagccttatctcgaacggggagacggcccaatatgtctggttctggctcccacccgggaactggcacaacaggttcaacaggtcgcggatgactatggaaaatgttctcggctcaaatctacctgcatctacggaggtgcacctaaaggaccccagatcagagacctggagcgaggggtcgaaatctgcatcgccacccctgggcggctgattgacttccttgagtcgggcaagacaaatctgcgaagatgtacgtatctggtcctggatgaagcagatagaatgctcgacatggggttcgagcctcagatacggaagattgttgatcagatacggccagaccgccaaactctgatgtggagcgccacgtggcccaaagaagtgcgtcagctcgccgaagacttccttagggactatacccaaatcaatgtgggtaatctggagttgagtgcaaaccacaatatcctccagatagtggacgtttgcatggagtcagaaaaagaccacaagttaattcagctcatggaggaaattatggccgagaaagagaacaagaccattatttttgtagagacaaaaaggcgctgcgacgacctcacgcgacggatgagacgagacgggtggcctgcgatgtgcatccacggagataagagccagccagagcgggactgggtgctgaatgaatttaggtctggtaaagctcccatcctcatcgctaccgacgttgcatcccggggattggacgtcgaagacgtcaaattcgtcatcaactatgattacccgaactcaagcgaggactacgtgcatcggatcggtaggacggcccgcagcacaaacaaggggaccgcctatacgtttttcacaccaggtaacctgaaacaggctcgggagctgattaaggttctagaagaagccaatcaagcaatcaacccaaagctcatgcaactagttgaccacaggggtggaggaggtggtggtggcaagggcggccgctcgaggtacaggactacgtcaagtgctaacaaccccaacttgatgtatcaagacgagtgcgatcgtaggcttaggggagtgaaagacggtgggagacgtgattccgcgtcctatcgggacaggtctgagaccgaccgcgcaggctacgccaacggctctggttacgggagcccaaactccgcctttggtgcacaggccggccagtatacttacggccaggggacctatggtgccgcagcctacgggacatcttcttatactgcccaggagtacggggctggaacttatggagcttcttccacaacaagcactggacgtagttcacagagctcatcccagcaattttcagggattggccgatcggggcagcagccacagcccctgatgtcacagcaatttgctcagccacccggtgctacaaacactttgttgcttctccccctgttactgctccatgttaatgagactacacaggtcgtggtcaccccggccgatctgatcactttttag

SEQ ID NO: 184717 - DNA, 546 bp, synthetic construct
  misc_feature 1..546: note = Description of Artificial Sequence: Synthetic coding sequence
  source 1..546: mol_type = other DNA
atgcagctggtggaccaccggggcggcggcggcggcggcggcggccgaagcagatacagaacaaccagttccgcaaacaaccccaacctgatgtaccaagacgagtgtgatcggcgcctgcgaggcgtgaaagatgggggcagacgtgatagcgccagctatagggatagatctgaaactgatcgtgctggatatgctaatggatccggctacgggtcccctaatagcgccttcggggcgcaagccggccagtacacatatggacaaggtacttacggggctgccgcatacgggacgtcgtcttatacagcacaggaatacggtgcaggcacctatggagcctcctccaccacctctactggtcgctcatcgcagagcagttctcagcagttcagtgggataggaagatctggacagcagcctcagccactgatgtcccagcagttcgcccagccaccgggcgccaccaacatgatcggttatatgggacaaacggcttatcagtatccgcccccccccccccccccacctccaagtaggaagtag

SEQ ID NO: 184718 - DNA, 2013 bp, synthetic construct
  misc_feature 1..2013: note = Description of Artificial Sequence: Synthetic coding sequence
  source 1..2013: mol_type = other DNA
atgagccacctgcccatgaagctgctgcggaagaagatcgagaagcggaatctgaagctgaggcagaggaacttgaaatttcagggcgcatctaacctgaccctcagcgagacccagaacggggacgtcagtgaagagaccatgggaagccgcaaagtgaaaaagtctaagcagaagcccatgaacgtgggcttaagcgaaacacagaatgggggcatgtcacaggaggcggtgggaaatataaaggtaacaaagtccccacagaaatctacagtccttaccaacggcgaggctgcgatgcagtccagtaacagtgagagcaagaagaaaaagaagaagaaaagaaaaatggtgaatgacgccgagcccgacacaaaaaaggcaaagacagagaacaaaggaaaaagcgaggaagagtcggccgagactaccaaggaaaccgagaacaacgtggaaaaaccagacaatgacgaagatgagtccgaggttccttcactgccactcggacttaccggcgcttttgaggacacaagtttcgcatcgctgtgtaatctcgtgaacgagaacaccctaaaggccattaaggagatgggtttcaccaacatgactgagatccagcacaaaagtatccgccccctcctcgaagggcgggatctgctggcagccgctaaaactggtagtggcaagaccctggcatttctgatccctgcggtggagctcatcgttaagttaagattcatgcctaggaatggcacaggcgtccttattttgtcccccaccagggagttggctatgcaaacctttggcgtcctcaaggaactcatgactcaccacgttcacacctacggtctgatcatgggcgggtctaatcgcagtgcagaagcacagaaattgggaaacggcatcaacatcatcgtcgcgaccccgggacgtctgttggaccatatgcagaacactcctggctttatgtacaaaaacctgcaatgcctggtcatcgatgaggccgataggatactggatgtgggattcgaagaggagttgaagcagataatcaaactgttaccaacaaggaggcagacgatgctgttttccgctactcagactcgaaaagtggaagatctcgcaagaatatctcttaaaaaggagccattatacgttggcgtcgatgacgataaggcaaatgctacagtcgatggtctggagcaaggctatgtggtttgcccctctgagaagagattcttactccttttcactttcttgaagaaaaatagaaaaaagaagcttatggtgttcttcagctcttgcatgtccgtgaagtaccactacgagctcctaaactacattgacttacctgttctggccatccacggaaagcagaagcagaacaagcggaccaccaccttctttcagttttgcaatgcagactccggcaccctcctttgcactgatgtggcagctcgtgggttggacatcccagaggtggattggatcgttcagtatgaccctccagatgatccgaaggagtacatacaccgcgtgggaagaaccgctcggggactgaacggcagaggtcatgcgttgctgatccttcgccccgaagagctcggcttcctcaggtacctgaagcagtcaaaagtcccacttagcgagtttgacttctcctggagtaagatttcagacatccaatcacagttagagaagctgatcgagaaaaattacttcctgcacaagagtgcacaggaggcctacaagagctatataagggcttatgactcacacagtttaaagcaaatttttaatgtgaataaccttaatctgccgcaagtcgctctctcctttgggttcaaggtgccacccttcgttgatctgaacgtgaacagtaacgaggggaagcagaagaaacgaggtggcggaggcgggtttgggtaccagaaaaccaagaaagtggagaagtctaagatctttaagcacattagcaagaaaagctctgatagccggcagttcagccactag

SEQ ID NO: 184719 - DNA, 1230 bp, synthetic construct
  misc_feature 1..1230: note = Description of Artificial Sequence: Synthetic coding sequence
  source 1..1230: mol_type = other DNA
atggagcaggagcagaccttcggcgtgctgaaggagctgatgacccaccatgtgcatacgtatgggctgataatgggaggcagtaacagatcagccgaggcgcagaaactggggaatggtataaacatcatcgtggccactcctggtagattgctggatcatatgcagaatactccagggttcatgtataagaaccttcagtgccttgtgattgatgaagctgaccgtatcttggatgtgggttttgaagaggaactgaaacagataattaaacttctgcccaccaggcgacagaccatgctgttctctgccacccaaactaggaaggtggaagacctggctaggattagtctaaagaaggagcctctgtacgtcggtgtcgacgacgataaagctaacgcaacagttgacgggctcgagcagggatacgttgtatgcccatctgaaaaaagatttctgctgctgttcactttcttgaagaagaacaggaaaaagaagctaatggtctttttcagttcttgtatgagtgttaaataccactatgagctgctgaactatatcgacctgcctgtgctggctatccatggcaagcagaagcagaacaaacggactacaacctttttccagttttgcaacgccgattcgggaacccttctatgcactgacgtggccgcacggggactggacatccccgaagtcgattggatcgtccaatacgatccaccagatgatcctaaggagtacattcaccgggttggaagaaccgcaaggggcctgaatggtagaggccacgcactcctgattctccgccctgaggaactgggctttctgcgctatctcaagcagagcaaagtgccgctatcagagttcgatttttcctggtccaaaatcagcgacatccagtcacaattggagaaattaatcgaaaagaattacttcctccacaaaagcgctcaggaagcttacaaatcctacatcagagcgtacgactctcattctttaaaacagatattcaacgtgaacaacttgaacctgccccaggtcgctctctcttttggattcaaggttccaccattcgtggatctcaacgttaattctaacgagggcaaacagaaaaagcgcggcggaggcggtggttttggatatcaaaagactaaaaaggttgagaaaagcaaaatcttcaagcacatttccaaaaagtccagcgactcccgacaattttcccattag

SEQ ID NO: 184720 - DNA, 2475 bp, synthetic construct
  misc_feature 1..2475: note = Description of Artificial Sequence: Synthetic coding sequence
  source 1..2475: mol_type = other DNA
atggccgccgccttcgaggccagcggcgccctggccgccgtggccaccgcaatgcctgccgaacacgtggccgtgcaagtgcctgcccctgagccaactcctggcccagtccgtattctgagaaccgcccaggacctctcaagtccccgcactagaacaggtgacgtacttctggccgagccagctgactttgagtccttgctgttgtcccgaccagtgctcgaaggtctacgcgcagctggattcgagagaccctctccggtgcagcttaaagcaatacctttaggacgctgcggcctggacctgattgtccaggcaaaatctgggacaggtaagacatgtgtatttagcaccatagccctcgattcacttgtcctagagaatctctctacgcagattcttattctggccccgactcgggagattgccgttcagatacacagcgtcattactgctatagggataaaaatggaagggctggaatgccatgtgttcattggcggaacacccctctcccaagacaagactaggctgaagaagtgccacattgctgttggtagcccaggcaggattaaacagctaattgagctggactacctcaaccccgggagtatcagacttttcattttggacgaggccgataagctgttagaagagggaagttttcaagagcagattaattggatctactcatcacttccagcatcgaagcagatgctggcggtgagcgctacatacccagaattcctggcaaacgccctgaccaaatatatgcgcgacccaactttcgtccggctcaactcatccgacccaagtctcatcggcctgaaacaatattacaaggtagttaactcgtaccccctggcacacaaagtattcgaggaaaagactcaacatctccaggagctgttctccaggattcccttcaaccaggcgcttgtttttagtaaccttcattcaagggcacagcacctagctgatatcttatctagtaaaggctttcctgccgagtgtattagcggcaatatgaaccagaatcaacgtctggatgccatggctaagctcaaacacttccactgtcgggttctgataagtacagatcttacgtcacgaggcatagacgctgagaaagttaatctcgtggtgaacctggatgttcctctggactgggagacttatatgcacaggataggacgggctgggcgctttggcacactaggattaaccgttacgtattgctgccggggggaggaggagaacatgatgatgcgcattgcccagaagtgcaatattaatctgctcccccttcccgatccgatcccaagcgggctgatggaagagtgtgtggattgggatgttgaggtgaaagcggccgtgcacacgtacggcattgcctctgtgccaaatcagcctctgaaaaagcaaatacagaagatcgaacgaacgctccagattcagaaggcccacggtgaccacatggccagcagccgcaacaattctgtgagcggcttgtccgtcaaatccaagaataatactaagcagaagttacctgttaagagtcatagtgagtgtgggattattgagaaggctacgagtccaaaagagctcggatgcgacaggcagagcgaagaacagatgaagaactctgtgcagacaccggtggagaactctaccaactcccagcaccaggtgaaagaggcactgcctgtctccctgcctcaaatcccctgtctgtcttcgtttaagatccatcagccctacactctgacatttgctgaactcgttgaagactatgaacattatattaaggaaggcctggaaaaaccagtcgaaataatccgtcactacacagggcccggggatcaaaccgtgaatccacagaatgggttcgtgcgaaacaaagtgatcgaacagagggtgccagttctcgccagttcatctcagtcaggagacagtgagtccgacagcgactcttacagcagcagaacctcaagccagtccaagggcaacaaaagttaccttgaaggtagctctgataaccagcttaaagacagcgaatccacacctgttgatgacaggattagtctggagcagccacctaacggcagcgacacacctaacccagagaagtatcaggaatcgccaggcatccagatgaagacaaggctgaaagagggggccagccagcgagcaaagcagagtagaagaaacctaccaagaagatcatcgtttaggctccagacagaggcgcaggaggatgactggtacgattgccaccgagagatacgcctgtccttttccgacacttaccaggactacgaggagtattggcgcgcctactaccgggcttggcaagagtactacgctgccgcttcccatagctactactggaatgctcaaagacatccaagctggatggctgcataccacatgaataccatatacctccaagaaatgatgcacagcaatcaatag

SEQ ID NO: 184721 - DNA, 417 bp, synthetic construct
  misc_feature 1..417: note = Description of Artificial Sequence: Synthetic coding sequence
  source 1..417: mol_type = other DNA
atggccgccgccttcgaggccagcggcgccctggccgccgtggccacagctatgcccgccgaacacgtggctgttcaagttcccgcaccggaacctacacctggccctgtccgcatcctacgcactgcacaggacttaagttcaccacgtaccaggacaggcgatgtcctcctcgcggagcctgccgacttcgagtccctgctgttgagcagacctgtgctggagggcctgagggcagccgggtttgaaagaccttcaccagtgcagctgaaggccattccactcggccggtgtgggttggacttgatcgttcaggctaagtccggcaccggaaagacctgtgtattctccacaattgcgttggactcattggtgctggagaacttaagtacccaggcagagctaagcaattcctag

SEQ ID NO: 184722 - DNA, 2352 bp, synthetic construct
  misc_feature 1..2352: note = Description of Artificial Sequence: Synthetic coding sequence
  source 1..2352: mol_type = other DNA
atgcccggcaagctgcggagcgacgccggcctggagagcgacaccgctatgaaaaagggagaaacactgcgcaagcagaccgaagagaaagaaaaaaaggagaaacctaaatcagacaagacagaggagatcgccgaagaagaggagacagtcttccccaaggccaagcaggttaagaaaaaagccgaaccctccgaagtggacatgaatagcccaaagagtaagaaggcaaagaagaaagaggaaccatcccagaacgatatttccccaaaaaccaaatcactgcgcaaaaaaaaggagccgatcgagaaaaaagtggtgtcttctaaaactaagaaagttaccaagaacgaggagccctctgaagaggaaattgatgctcctaagcctaagaagatgaaaaaggaaaaggaaatgaacggcgaaacccgagagaaaagcccaaaactgaaaaacggattcccacaccccgagcctgactgcaatccctcagaagccgccagtgaagagtcaaactctgaaatcgagcaagaaatccctgtggaacagaaggagggagcatttagtaactttcccatatcagaagagactattaagctgctgaaggggaggggcgtgacatttctgttccccattcaggccaagacatttcaccatgtctacagcgggaaggatctcattgctcaggctaggacaggtaccgggaaaaccttcagtttcgctatccctctgatcgagaagctgcacggtgagctccaagaccgaaaaagggggcgggctccgcaggtgctggtgctggcgccgactcgggagttagccaatcaggtttcaaaggatttcagtgacattacaaaaaagctgtccgtagcctgcttttatggagggacaccctatggggggcaattcgagcggatgcggaacggaatagacattctggtcgggaccccaggcagaattaaggatcacatccagaatggtaaactggatctcactaagcttaaacacgtggtgctggacgaggtggaccagatgctagatatgggattcgcagatcaagtggaagagatcctgagcgttgcctacaaaaaggactcagaagacaatcctcaaactctactgttttctgctacctgcccacattgggtgtttaacgtggcaaagaaatatatgaagagcacttacgaacaggtcgacctaatcgggaagaaaacccagaagaccgctattactgtagaacatctcgccatcaagtgtcattggacacagagagcagcagttatcggcgacgtgatcagggtctattctgggcaccagggacgaacaattattttctgtgaaacaaaaaaggaagctcaggagctgagccaaaactccgccattaaacaggatgcacagtccctccatggtgacatcccacagaaacagagagaaattacactgaaaggatttaggaatggatctttcggcgtgttggtggccactaacgtagcagctaggggtttggacatcccagaagtggaccttgtgatccaaagctcaccccctaaggacgtagagagctacatacatcgcagcgggaggaccggtagggctggccgcacgggcgtctgcatttgtttttaccagcacaaagaggagtaccaactggtgcaggtcgagcagaaagcagggattaagtttaagcggatcggtgtgccttccgcaactgagatcattaaggcgtcatctaaggatgctatccgactgctagattcagtgcccccaacagctatttcccattttaaacagagcgcagaaaagctcattgaagagaagggggctgtggaagccttagccgccgctttagcccacatctctggtgctacaagcgtcgaccagagatccctgataaatagcaacgtaggcttcgtgaccatgatcctgcaatgcagcatcgaaatgccaaatatctcatatgcgtggaaagaactcaaggaacagctcggcgaagagattgactccaaagtcaaaggcatggtgtttcttaaaggaaaattaggcgtgtgtttcgacgttcctacggcatccgtcactgagattcaggagaagtggcatgatagtcgccgatggcagctcagtgtcgccactgaacagcccgagctggagggccctcgagaaggctacggcggtttcagagggcagcgcgagggtagcagagggtttagaggccagcgggatggaaaccgaaggttccgcggccagagagaaggctccagagggccacggggccaacgatccggaggagggaacaagagtaaccgctctcagaataaaggacagaaacgaagcttcagtaaggcattcggccagtag

SEQ ID NO: 184723 - DNA, 249 bp, synthetic construct
  misc_feature 1..249: note = Description of Artificial Sequence: Synthetic coding sequence
  source 1..249: mol_type = other DNA
atgcccggcaagctgcggagcgacgccggcctggagagcgacaccgcgatgaagaaaggggaaacgctgagaaagcagaccgaggagaaggagaaaaaagaaaagccaaaatcagacaaaacagaggaaattgcagaagaggaggagaccgtgtttcccaaagccaagcaagtgaagaaaaaagcagagccctccgaagttgacatgaacagtcccaagtcaaagaaaaaaaagaagaagaagaaatag

SEQ ID NO: 184724 - DNA, 2463 bp, synthetic construct
  misc_feature 1..2463: note = Description of Artificial Sequence: Synthetic coding sequence
  source 1..2463: mol_type = other DNA
atggccggcgagctggccgacaagaaggaccgggacgccagcccctctaaagaagagagaaaacgctcgagaacccccgaccgcgagcgtgatcgggatcgggatcggaagtctagtccatctaaagatcggaagagacacagatcgagagaccgccggcgggggggatctcgatctcggagtagatcaaggtctaaaagcgccgagcgcgagcgtagacataaggagcgggagagggacaaggagagagacagaaataagaaggatcgtgaccgcgataaagacgggcatcggagggacaaggaccgcaaaaggtcgagcctatccccaggaaggggcaaggactttaaatcccgaaaggatagggactccaagaaggatgaggaggacgagcacggggacaaaaaaccgaaagcacagcctctctctctggaggaactgctggcaaaaaaaaaagctgaggaagaagctgaagcaaaaccaaagttcctctccaaggcggagagagaagccgaggctctaaaaaggagacaacaggaggtggaggaaagacagaggatgctcgaagaggaacggaagaagcgcaagcaattccaggatctgggccgcaaaatgctggaggacccgcaggaaagagaaaggcgggagagacgtgagcgtatggaacgggagactaacggaaatgaggacgaagaaggcagacaaaagattagagaggagaaggacaagtccaaggagttacacgccatcaaggagcggtatctggggggaattaaaaaacgccggaggacccgccatcttaatgatcgaaaatttgtgtttgaatgggacgcatctgaggatacctccattgactacaacccattgtacaaggagcggcatcaggtgcaattattggggagggggtttatcgccggaatcgacctgaagcagcagaaacgggaacagagccgcttctacggcgacctgatggaaaagcggaggactttggaagagaaggagcaggaagaagccagactgagaaagctaagaaaaaaggaggcaaagcagaggtgggacgaccgacactggagtcaaaagaagctggatgaaatgaccgacagagactggcggatattccgagaagactattcgatcaccacaaaaggcggcaaaatcccgaatccaatacgttcgtggaaagactcctctctgccccctcatattctggaggtcatcgataaatgtgggtacaaagagcctactccaattcagaggcaggcaattccaatcgggctgcagaaccgcgacattattggcgtagcggagaccgggtccggaaagaccgctgcattcctgatcccattgctggtgtggatcaccactctgcccaagatagatcggatagaagagagcgatcagggtccctacgcaatcatactcgcccccactcgtgaactggctcagcaaattgaggaggagactatcaagtttgggaagccactgggaatcaggaccgttgcagtgattggggggatcagccgagaggaccagggcttccggctcaggatgggctgcgagatcgttatcgcgacaccggggcgtctgattgatgtgctggaaaacaggtatctcgttctctcaaggtgcacatacgtcgtgttggacgaggcggacaggatgattgacatggggtttgagcctgacgttcagaaaattttggaacacatgcccgtgtcaaatcagaagcctgacaccgatgaggcggaggacccagagaaaatgctggcaaactttgagtctggaaagcataagtacaggcagacagtgatgttcacggccaccatgccgcctgctgttgaaagattggccagatcatacctccgacgcccggccgtcgtgtatataggctctgctggaaaaccacatgagagagtggagcagaaagtcttcctaatgagtgagagcgagaaaaggaaaaagcttctggcgatactggagcagggctttgatcctcccatcattatctttgttaatcagaagaaggggtgcgacgtgttagcgaagtccctcgagaaaatgggctacaacgcttgcaccttgcatgggggaaagggtcaggagcaacgagaattcgcactctccaacctcaaggcaggcgctaaagatatcctcgtcgcgaccgatgtggcgggcaggggcatagatatacaagatgtgagtatggtggtgaactacgacatggccaaaaacatcgaagactatattcatcgcattgggagaacaggaagggccggcaagagcggtgtagccattaccttcctcaccaaagaggacagcgcagttttctacgagttgaagcaggcaatcctggagtcacccgtcagtagctgcccacctgaactcgccaaccatcccgacgcccagcacaagcctggcacaatcctgacaaagaaacggagggaggagacaattttcgcctag

SEQ ID NO: 184725 - DNA, 417 bp, synthetic construct
  misc_feature 1..417: note = Description of Artificial Sequence: Synthetic coding sequence
  source 1..417: mol_type = other DNA
atggccggcgagctggccgacaagaaggaccgggacgccagcccctctaaggaagagaggaaacggagtaggacccccgatagagaaagggatagagatcgggataggaaatccagtccctccaaggatcggaaacgccaccggtcgcgggacagaagacgcggaggctctcgctctaggtcaagaagtcggtccaagtcagccgagcgtgagcggcgacataaagagagagagagggacaaagaaagggaccggaacaagaaggatcgggaccgggacaaggacgggcacagaagggataaggatagaaaaaggagttcactctcacccggtcggggcaaagatttcaaatcaagaaaagatagggactccaagaaggatgaggaggatgaacacggagacaagaaacctaaatag

SEQ ID NO: 184726 - DNA, 549 bp, synthetic construct
  misc_feature 1..549: note = Description of Artificial Sequence: Synthetic coding sequence
  source 1..549: mol_type = other DNA
atggccggcgagctggccgacaagaaggaccgggacgccagccccagcaaagaggagagaaagcggagcaggaccccagacagggaacgagatagggatcgggatcggaagtcgtccccttccaaggatcgtaagcgccacagatctagagaccgccggcggggggggagcagatcccgctcaagatcgcgctccaaatcagccgagcgagagaggcggcacaaagaacgggagagggacaaggaacgcgacagaaataaaaaggacagagatcgagataaggatggacacaggcgggataaggaccggaaaaggtccagcctgtcccccgggaggggtaaagatttcaagagtcgcaaggacagagacagcaaaaaggatgaggaggacgaacatggagataaaaagcctaaggcccagcccctatccctggaggaactactggccaagaagaaagcagaagaggaggcggaagctaaaccaaagttcctatctaaggccgaaagagaggccgaagcgttgaagagaaggcaacaggaggtggagtag

SEQ ID NO: 184727 - DNA, 2580 bp, synthetic construct
  misc_feature 1..2580: note = Description of Artificial Sequence: Synthetic coding sequence
  source 1..2580: mol_type = other DNA
atgaagctgaaggacaccaagagccggcccaagcagagcagctgcggaaaattccagacaaaagggattaaagtggtggggaagtggaaggaggtaaaaatcgatccaaacatgtttgccgatggtcagatggacgatctggtgtgtttcgaagagctgaccgactatcaactggtcagtcccgccaagaatccctcatctctgttttccaaggaagccccaaagaggaaggcacaagcggtaagcgaggaagaagaagaggaggaaggaaaatcctcctcccctaaaaaaaagatcaaactcaaaaaaagcaagaatgtggctaccgagggcacctccacccagaaagagtttgaagtgaaggatcctgagctggaagcgcagggcgacgacatggtctgtgacgaccccgaagccggagagatgacatcggaaaatctggtccagacagcgccgaagaaaaagaaaaataaggggaagaaagggttggagccatctcaatccacagctgcaaaagtaccaaagaaggcaaaaacatggatccccgaggtgcacgaccagaaggccgacgtctcggcgtggaaagatctttttgtgcctaggcctgttctaagagcactatctttcctgggattttctgctcctactccgatccaagctctgacgttagccccggccatcagggataaactcgatatcctgggtgcagccgagaccggatccgggaagactctcgcattcgcaatcccaatgatccacgctgtccttcagtggcagaagaggaacgcggctcccccaccctccaataccgaggctcccccaggagagacacggacagaggcgggggccgaaacccggtcccctggcaaagccgaggctgagtctgatgccctgccggacgataccgtaattgagagcgaggcgctgccaagcgatatcgcagctgaagctagagccaagaccggcggtaccgtatctgaccaggccttgctgttcggagatgacgatgccggcgagggcccatcttcgctgattcgcgagaaacctgtaccgaaacagaatgaaaacgaagaagaaaatctagataaagaacagaccggaaacctgaaacaggaactcgatgataagtcagccacttgcaaagcttatcccaagcggccactactgggactggtgctgacccccactagggagctggcggtgcaggttaagcagcacatcgatgccgtggcccggttcacaggaataaaaacggctatcctggtgggtgggatgtctacgcagaagcagcaaagaatgctgaaccggcgtccagaaatcgtagtggcaactccagggcgcctgtgggagctgatcaaggaaaagcactaccatctccgcaatttacgccagttgcgctgtcttgtcgtggacgaggctgatcggatggtggaaaaaggccactttgctgagctgtctcagctgttagagatgttaaacgacagtcagtataaccccaaaagacaaacacttgtctttagcgctacactgacattggtccaccaagcccccgcacggattctgcacaaaaaacacactaagaaaatggataagacggccaagctcgacctcttgatgcagaagatagggatgagaggaaagcctaaagtgattgatctgacccgtaatgaagccacagtagagacacttacggaaacgaagattcattgcgagaccgatgagaaggacttttacctgtattatttcctgatgcagtaccccggaaggtctctggtgttcgcaaactctatttcctgtatcaagcgtctgagcggcctgctgaaggtgctggatatcatgccactcaccctccacgcctgtatgcaccagaaacagagacttaggaacttggaacagttcgcaaggctggaggattgcgtactgctggccactgatgtggctgcacgcggcctcgacattcccaaggtacaacatgttattcattaccaggtaccgagaacttcagagatttatgtccaccgctccggccggacagctagagccacaaacgagggcctgtcattgatgttgatcggcccagaagatgtcatcaatttcaagaaaatttataagacactgaaaaaagacgaagatataccattgttcccagtgcagactaagtacatggacgtggttaaggaaaggatccggttagcaagacagattgaaaaaagcgagtatagaaactttcaggcctgcttgcacaactcctggattgagcaggcagctgccgccctggaaatcgaactggaggaggatatgtataaaggggggaaggccgaccagcaagaggagcgccggaggcaaaagcagatgaaggtgctcaaaaaggaactgcggcatctactgagccagcccttattcacagagtctcagaagacaaagtatcctacacagtcagggaagcctccactcctggtgagtgccccaagcaagtcagaaagcgccctgtcgtgcctgagcaaacagaagaagaagaaaacaaaaaagccgaaggagccccagcccgaacaaccccagccctctacatccgccaactag

SEQ ID NO: 184728 - DNA, 2415 bp, synthetic construct
  misc_feature 1..2415: note = Description of Artificial Sequence: Synthetic coding sequence
  source 1..2415: mol_type = other DNA
atgaagctgaaggacaccaagagccggcccaagcagagcagctgcggcaagtttcagaccaagggcatcaaagttgtgggcaaatggaaagaggtcaaaatcgaccctaatatgttcgctgatggacagatggacgacctggtttgcttcgaagaactcactgactaccagctcgtgtcccctgctaaaaatccatccagcctgtttagcaaagaggcccccaagcggaaggctcaggcggtgtctgaggaagaagaggaggaggagggcaagtcctcatcacccaagaagaagattaagcttaagaagtctaagaatgtcgcaacagaaggcacctcaactcaaaaagaattcgaggtgaaagatccagagctcgaggctcagggcgatgatatggtctgcgatgaccctgaggctggggagatgaccagtgaaaaccttgtgcaaactgccccgaaaaaaaaaaaaaacaaagggaagaagggactggagcctagccagtctactgcagcgatccgagacaaattggacatcctaggcgcggcggaaaccgggtccgggaaaactctggccttcgccatcccgatgatacacgcagtcctgcagtggcagaaaagaaacgctgccccccccccatctaataccgaagcgccgccgggcgagacccgcaccgaggccggggcggagactcgcagccccgggaaggcagaagccgagagcgacgccctccccgacgacaccgtaatcgaaagtgaagcgctgccctcagatatcgcggccgaggcaagggctaaaaccggaggtaccgtgagtgatcaagccctcttgttcggcgacgacgatgctggagaaggtccctcaagccttatccgcgaaaagcctgtccccaagcagaatgaaaatgaggaggagaacctggataaagagcaaactggaaatttaaagcaagagttggatgataagtcagctacgtgtaaagcatacccaaagaggccactcctcggtcttgtcctgacaccgaccagggaactggccgtgcaagtgaagcagcatatcgacgctgtggctagatttacgggcatcaagacagctattctggtcggcggaatgtctacccaaaaacagcagcgaatgctgaatcgccggcccgagatcgttgttgcaacacccggccgcctctgggagctgatcaaggagaaacactatcatctgaggaatctaaggcagctgaggtgtctggtggtcgacgaagccgacagaatggtcgaaaaggggcatttcgctgagctgtcacaactcttggagatgctgaatgactctcaatacaaccctaagcgccagaccctggttttttccgcgaccctcactctggtccatcaagcccccgccagaatacttcacaaaaagcacaccaagaaaatggataaaaccgcaaagttagacttgctcatgcagaagatcgggatgcgtgggaaaccgaaagtcattgaccttactcgaaacgaggccaccgtggaaactttaaccgaaacgaagattcattgcgagactgatgaaaaagacttctatctctactacttcctcatgcagtaccctggccgatcacttgtttttgccaactcaatcagctgtatcaagcgtctgagcgggctccttaaggtgttagacataatgccattgacactgcacgcctgtatgcatcagaagcagaggctccggaacctggagcagttcgctcgtctggaggactgcgtccttcttgctaccgatgtggccgctcgcgggctcgacatcccgaaggtgcagcacgtcattcactatcaagtccctcggacatccgagatctatgtacaccgatcgggccgaactgcgcgagctactaacgaggggctgtcccttatgctcatcggacccgaggacgtaatcaatttcaaaaagatttataagaccctgaaaaaggatgaagacatccccctcttcccagtgcaaaccaaatatatggatgtggtaaaggaacggatccggctcgcgaggcagatcgagaaatctgagtacaggaacttccaggcttgcctccataacagctggattgagcaggcagcagctgccctcgaaatcgaactggaggaggatatgtataaagggggaaaggctgatcagcaagaagagaggcggcggcagaaacaaatgaaagtgctgaaaaaagagctgaggcacttgctgagccagcctctgttcactgagtcacagaagaccaaataccctacgcaaagtggcaaaccccctctacttgtgtcggcaccgtcaaagtccgaaagcgcactgagttgcctctcaaagcagaaaaagaagaagaccaagaagccaaaggaaccccagcctgagcagccccagcccagtactagcgccaattag

SEQ ID NO: 184729 - DNA, 2292 bp, synthetic construct
  misc_feature 1..2292: note = Description of Artificial Sequence: Synthetic coding sequence
  source 1..2292: mol_type = other DNA
atggacgacctggtgtgcttcgaggagctgaccgactaccagctggtgtccccggccaagaacccttcctctctcttcagtaaggaggcacccaaaaggaaagcgcaagctgtttctgaggaagaggaagaggaggaaggaaaaagctctagccccaagaagaagattaagttaaagaagagtaaaaacgtcgccacagaaggcacaagcacacaaaaggagtttgaggtgaaagatcctgagcttgaagcacagggcgacgatatggtttgcgacgatcctgaggcgggcgaaatgacatccgagaatctggtgcagaccgcccccaagaaaaagaagaataaaggcaagaagggattggaacccagccagagtaccgccgccaaggtgcctaagaaggctaagacatggatacctgaggtacacgaccagaaagcagacgtgtccgcatggaaggacctgtttgtgccacgcccggtgctacgcgcactatcctttttggggttctcagctcccacccccatacaagcccttaccctcgcccccgctatcagagataaactagacattctgggagccgcagagaccggttccggtaaaacattggcgtttgctatacccatgatccacgccgtccttcagtggcagaaacgtaacgctgctccccctccctctaacaccgaagcccctccaggggagactcgcacagaggccggcgccgaaacccgcagtcccggcaaagcggaggccgagagcgatgcactgcccgacgacacggtgattgaatctgaggcactgccgagtgacatagccgccgaagcaagagctaagactggtgggactgtgtccgatcaggccctgctatttggggacgatgatgcgggtgagggacccagcagcctgattagagagaagcctgtgccgaaacagaacgaaaacgaggaggaaaatctggataaggagcagactggtaatttaaagcaggagctggacgacaaaagtgctacctgcaaagcttaccccaagaggcccttgctggggctggtcctgaccccaacgcgcgagctggcggtacaggtaaaacagcatattgacgcagtggccagatttactgggatcaagacagctattttggtcggtggcatgagcacccaaaaacagcagcggatgctgaataggcggcctgagatcgtagtagctactccagggcgtctttgggaactcattaaagagaaacactaccatctgcgcaacctccgccagctgcgctgtctcgtggtcgacgaggcagaccgcatggttgagaagggacatttcgccgagctgtcccagctgctggaaatgctgaacgattctcagtacaacccaaaacgacagactctcgtgttcagtgccactctgaccctggttcaccaggctcccgccagaattctgcacaaaaaacacacaaagaagatggacaaaacggctaaactggatttgctgatgcagaaaatcggcatgcgagggaaacccaaagtaattgatctgacccggaacgaggcaaccgtggaaaccctcaccgagacgaaaatacactgcgaaactgatgagaaggacttctacctatattacttcctgatgcagtacccgggccgctcgctcgtgttcgctaactcgatttcctgtatcaagcggctgtccggtctgctgaaggtcctcgacataatgcccttaacgttacacgcctgcatgcatcagaagcaacgactacgtaacctggagcagtttgccagacttgaggattgtgtgcttttggccacagatgtcgcagcgcgagggctggatattcctaaagtccaacacgtcatccattaccaagtcccaaggactagtgaaatctacgtccaccgatcaggtagaaccgcacgggccaccaatgagggtctcagcctcatgctgatagggcccgaagacgttatcaacttcaaaaagatttataagactctgaagaaagatgaggatattcccctttttccagttcagacgaagtacatggacgttgtcaaggaaagaattaggcttgccaggcaaatagagaaatctgagtatcgaaactttcaggcttgcctgcacaactcttggatcgaacaagcagcagcagctttggaaatagagctggaagaggacatgtataaagggggtaaggctgaccaacaggaggagaggaggcgacagaaacagatgaaggtgctaaagaaggaattgagacacctattaagccagccccagccatcaacctcagccaactag

SEQ ID NO: 184730 - DNA, 1458 bp, synthetic construct
  misc_feature 1..1458: note = Description of Artificial Sequence: Synthetic coding sequence
  source 1..1458: mol_type = other DNA
atgaccaaggccccctgcaaggcctaccccaagcggcccctgctgggcctagtcctcacgcctacccgcgaactggccgtccaggtgaaacagcatatcgatgctgtcgctaggttcacaggcataaagacagcaatcctagtgggtgggatgagcactcagaaacagcagaggatgcttaataggcgtcctgagattgtggtcgcaactcccggccgactgtgggaactcatcaaggagaagcattaccatctacggaatcttagacagttgcgatgtttagtggtggacgaagccgaccgcatggtcgagaagggccattttgctgaattgagccaactgctcgagatgctgaacgattcccagtacaatccgaaacgccaaacccttgtgtttagtgccacccttactctggttcaccaggccccagcccggatactgcataagaagcacactaaaaagatggacaagacagctaaactcgacctcctcatgcagaaaatcggtatgcgcggaaagcctaaggtgatcgatctgacacgcaatgaagcaaccgtggaaactctgaccgagactaagattcattgtgagacagatgagaaagatttttacctgtactatttcttgatgcagtatcccggaagatcactggtctttgcgaatagcatttcttgcatcaagcgcctgagcggactgctaaaggtcctggacatcatgccattgacattgcacgcctgcatgcatcagaaacagcggctgagaaatctagagcagtttgcacggctggaggactgtgtcctgttggccacggatgtggccgctaggggtctggatatccctaaggtgcagcatgtgatccactaccaggtgcctagaaccagcgagatctacgtacatagatcagggagaaccgcacgcgctactaacgagggattaagtctcatgctcatcggtccggaagacgtcatcaattttaagaagatctacaagactctgaaaaaagatgaggacatcccgctgttcccggtccaaacaaagtatatggatgtcgtgaaggaaaggatacgtctggcccgccagatcgagaagagcgagtacagaaatttccaggcctgcctgcataatagttggatcgagcaggccgctgcggcccttgaaattgagctagaggaggatatgtacaaaggtggtaaggctgaccaacaggaggagcggcgccggcagaaacagatgaaggtactgaaaaaggagctccgtcatttgctctcccagccattgtttaccgaatctcagaagacaaaataccctacgcaaagcggaaaacctcccctgctcgtgtccgccccttccaagtccgagtccgcactaagttgcctctcaaagcagaagaaaaaaaaaaccaaaaagccaaaggagccacaacccgagcaacctcagccatcaacgagtgctaattag

SEQ ID NO: 184731 - DNA, 1623 bp, synthetic construct
  misc_feature 1..1623: note = Description of Artificial Sequence: Synthetic coding sequence
  source 1..1623: mol_type = other DNA
atggccctgacccggcccgtgcggctgttcagcctggtgacccggctcctgttggcccctcggcgaggattgaccgtacgatcaccagacgaaccactgccggtagtccgcataccggtggcattgcagcgacagttagaacagcgtcagtctaggcgacgaaaccttccgcggcccgtgcttgtgaggccaggccctctacttgtctctgccaggcgtcccgagctcaatcagcctgcccggctgactctgggccgctgggaaagagcccctctggcaagccagggttggaagtcaagacgcgcccgtagagatcatttctccatcgagagggctcagcaagaggctcccgccgtcaggaagcttagttccaagggctcatttgctgacttgggtctggaaccacgggtactacacgccctccaggaggcagccccggaggtggtccagcccaccactgtgcagtccagtacaatcccatccctgctgagaggcagacacgtcgtttgcgcagcggaaactggctccggaaagaccctgtcgtatttactgcctctgctgcagcgactcctcgggcaaccctccctagactcactgccaattccggcaccgaggggtctagtgttggtgcccagtcgcgaactggcacagcaagtgcgggctgtggcccagcctctgggtagaagtctcgggctattagtgagagatttggagggcggccacggcatgcggcggattcggttgcagttgagccgccagccttctgctgacgttttggtcgcaactcctggcgctctgtggaaggccctgaagagccggttaatctcgcttgagcagttatctttcttggtattggacgaggcggatacattgttggatgagtcttttctcgaactcgtggattatatcttagagaagagtcatattgcggaagggcccgcagatctggaagatcccttcaaccctaaagcccaactggtacttgtgggagctacgtttccggaaggcgtcggtcagttacttaataaagtggcctcaccagacgccgtcactactataacatctagtaagttacactgcattatgccccacgtaaaacagacttttttgcgactgaaaggcgctgacaaggtagctgagttggtccatatcttgaagcatagagacagggccgagaggactggccctagcggcacagtactggtgttttgcaactcaagctcaaccgtcaactggctagggtatatacttgacgaccacaagattcagcatctgcgactgcaaggccaaatgccagctctaatgagggtaggcatattccagtcatttcagaaaagtagccgggatatcttgctctgtacggacatcgcctccaggggcctggatagcactggtgtagagctcgtggtgaactacgacttcccccccactctgcaggattacatacatcgcgctggcagagtaggccgtgtggggtccgaagtccctggcacagtgatttcgtttgtgacccacccctgggacgtgagcctggttcaaaaaatcgagttagcagccaggaggcgcagatctctgcctgggctggcttccagcgttaaagaacctctcccacaagcgacatag

SEQ ID NO: 184732 - DNA, 1989 bp, synthetic construct
  misc_feature 1..1989: note = Description of Artificial Sequence: Synthetic coding sequence
  source 1..1989: mol_type = other DNA
atgagccacgtggccgtggagaacgccctgggcctggaccagcagtttgctggcctcgaccttaattcttctgataaccaatcgggggggagtactgcctcaaaaggacggtacattcccccccacttgaggaatcgcgaagccactaagggcttctacgacaaagattcctctggctggtcgtcctcaaaggataaggacgcttattcgtcttttggaagcagaagcgactcaagaggaaagtcttcatttttcagtgacagaggatccggaagtcgcggcagattcgacgaccggggccgttctgactacgatggaattggcagtcgcggagatcgctccgggtttggaaaattcgagcgagggggaaactcccggtggtgtgataagtcagatgaggacgattggagtaaacctcttccaccaagcgaacgactagagcaagagctcttctccggtggtaataccggaatcaactttgagaaatacgacgatatccctgttgaagccaccgggaataattgtccaccgcatattgagagcttttccgacgttgagatgggggaaataatcatgggtaacatcgagctgacaaggtatactagaccaacgcctgttcagaaacacgccataccaattattaaggaaaaacgggaccttatggcttgcgcacaaactggatccggcaagacagccgctttccttttacctatcctttcacagatttacagcgatgggcccggcgaggctctccgggccatgaaagagaatggacgatatgggcgcaggaagcaataccctatctcactggtcctcgcgccaaccagagagctggcagttcaaatttatgaagaggccagaaaattctcatacaggtcacgcgttagaccatgtgtcgtgtatggaggagccgacattgggcaacaaataagagatctggagcggggctgtcatctgctcgttgcgaccccaggccgtctcgtggacatgatggaaagagggaagattggtcttgatttctgcaaatacctggtgctggacgaggccgatcgcatgttggacatggggtttgaacctcaaattcggaggatcgtcgagcaggatacaatgcctccaaagggcgttcgtcacacgatgatgtttagcgccacattccccaaggagattcaaatgctcgctagggactttcttgatgaatatattttcttggccgtgggccgtgtggggtcaacttccgagaatatcactcagaaagtcgtatgggttgaggaatctgataaacggtcctttctgctggacctcttgaacgctactggcaaagactctctcacacttgtatttgtcgagactaaaaagggcgcggattccctggaagattttctatatcatgaaggctacgcttgcacgtccattcacggggatagatctcaacgcgatagagaggaggctctgcatcaattccgtagtggaaagagccccatcttggtcgcaaccgccgtggcagctcggggccttgatataagcaatgtaaaacatgtgatcaactttgatctccctagcgacattgaggaatacgttcatcgaataggccggaccggacgcgttggtaaccttggcctcgccacttccttcttcaacgagaggaacatcaatataacaaaagatctcctagatctcctcgtcgaggccaaacaagaagtgcccagctggttagagaacatggcttacgagcatcattacaaaggctcttctcgtggacgcagtaagagttctcgattttcgggagggttcggggcacgggactatagacaaagtagcggggcctcttctagttctttttccagcagccgagcgtcctcttctcgctctggaggcggggggcacggctccagccggggattcggcggaggagggtacggagggttttataacagcgacggttacggaggcaactacaattcccagggcgtggactggtggggaaactag

SEQ ID NO: 184733 - DNA, 420 bp, synthetic construct
  misc_feature 1..420: note = Description of Artificial Sequence: Synthetic coding sequence
  source 1..420: mol_type = other DNA
atgagccacgtggccgtggagaacgccctgggcctggaccagcagttcgctggcctcgacttgaactctagcgacaatcaatctggcggctccaccgcttccaaagggaggtatatacccccgcacctgcggaacagggaagcgaccaaggggttttacgacaaggacagctccggatggtcctcttcaaaggataaagacgcctattccagctttggaagtaggagtgactcacgaggcaagtccagctttttctcagaccggggctcggggtcccggggtcgcttcgatgacagaggacgctctgactatgacggaatcggctccaggggtgatcggtctggatacgggggcttctacaactcagacggatatggcggaaactataactctcaaggagtggactggtgggggaactag

SEQ ID NO: 184734 - DNA, 1941 bp, synthetic construct
  misc_feature 1..1941: note = Description of Artificial Sequence: Synthetic coding sequence
  source 1..1941: mol_type = other DNA
atgagccacgtggccgtggagaacgccctgggcctggaccagcagttcgccggtctggatcttaattcgagtgataaccaatccggagggagtactgcttctagcttttatgacaaggatagtagcgggtggagcagctcgaaggataaagacgcctattcatcctttggaagtagatccgatagcagaggaaaatcttcgtttttctccgatagaggatcagggagccgcgggagatttgatgaccgaggccggagcgattatgatggaattgggagccgcggagaccgttcgggttttggaaaatttgaaaggggaggcaactcaaggtggtgtgacaaatccgacgaagacgactggagtaagcctctgcctccatccgaaagactggagcaggaattgttctcagggggaaacaccggaatcaatttcgagaagtacgatgatattccagtggaagcaacaggaaacaactgtccaccccatattgaatcattttctgacgtggaaatgggagaaattattatgggcaatattgaactgactcgatatactagacccacgcctgtacagaaacatgctattcccatcatcaaagaaaagagggacctgatggcctgcgcccaaactggatctggcaaaactgctgcttttctgctcccgatcttgagccagatttactccgatggaccgggtgaagcattgcgcgccatgaaagagaatggacgttatggacgtaggaagcagtaccctattagcttggtgctggctccaacgcgagaacttgcggtgcagatatacgaagaggccagaaagtttagttacaggagccgggtgaggccctgcgtggtatatgggggagctgatattggccagcagatccgtgatctagaaagagggtgccacctgctggtggccacaccaggtaggctcgtggacatgatggagcgcggaaagattggtcttgatttttgcaagtaccttgtgctggacgaggccgatcgtatgctggacatgggcttcgagccgcagatcaggaggatcgtagagcaagacaccatgcctcccaaaggggtgagacatacgatgatgtttagcgcaaccttcccaaaggaaatccagatgcttgctcgcgattttctggatgaatacatatttctggccgtaggtcgcgtggggtccacatctgagaatattacccagaaagtcgtttgggttgaagaaagtgacaagcgctctttcctgctggatctccttaacgctaccggcaaggactctctgacgctggtgtttgtcgaaactaagaagggcgcggatagcctggaagacttcctgtatcacgaggggtacgcgtgcactagcatccatggcgatcgctctcagagggacagggaagaggctctacatcagtttaggagtggcaagagtcctatcctcgtggccaccgccgtggccgctaggggcctggacatctcaaatgtgaaacacgttatcaattttgatctgccgtccgacatagaggagtatgtgcaccgtatagggaggacaggcagagtgggtaatttgggactggcaacctccttctttaatgagagaaacataaacataaccaaggacctgctggatctgctggtggaagccaagcaggaggtcccgagctggctcgaaaacatggcctacgaacatcactacaaaggatcctccagggggcgctccaaatcaagccggttctccggaggtttcggggccagagattacaggcagagtagtggagcctcttcgtcaagcttctcttccagccgtgccagtagtagccggagcggaggagggggccatggcagtagccgcggatttggcggcgggggctatgggggattctataacagcgacgggtatggcggaaattacaattcgcagggcgtggattggtggggtaattag

SEQ ID NO: 184735 - DNA, 927 bp, synthetic construct
  misc_feature 1..927: note = Description of Artificial Sequence: Synthetic coding sequence
  source 1..927: mol_type = other DNA
atgcgggagagccggctgatcagcgacctgggcggcttcgccggcgtgaggagcgcagccggacgcgactggcggccgttctggctcggagggttgcgcccaagtcggctcgcccaacctggatttccctcaggcggccccggaggaacgcggtgtctgcgggcctgcgaacagggcttcgccggcttggatctgaactctagcgataatcagtcaggaggcagtacggcatccaaagggcgctacattccccctcacctgaggaaccgtgaggccacaaagggattttacgacaaagatagttctgggtggagcagttcaaaggacaaggacgcttattcatcttttggatctaggagcgattcccgggggaagtcaagcttcttcagcgaccgtggctcaggaagcaggggcagattcgacgaccgaggtcggtccgactatgacggcattggcagtagaggtgaccggtcaggtttcgggaaatttgaaaggggaggcaattcaagatggtgtgataagagcgatgaggacgactggtctaaaccattaccacctagcgaaaggcttgaacaggaacttttctctggagggaacaccggtattaatttcgagaagtacgatgatattcccgtcgaggccaccggaaataactgtccccctcacatagagtctttctcagacgttgaaatgggcgagataatcatgggtaacatagagttgacgagatacacccggccaacacctgttcagaagcacgcaatcccaattattaaagagaaaagggatctaatggcatgcgcccaaacaggaaagtggaaggtatgggcccctcagaccatccccaatctgttgggaatttctacgaatgagagggttggcagcaccgacctgcgggggtcccagaaaatttttatacctatttag

SEQ ID NO: 184736 - DNA, 1983 bp, synthetic construct
  misc_feature 1..1983: note = Description of Artificial Sequence: Synthetic coding sequence
  source 1..1983: mol_type = other DNA
atgagccacgtggtggtgaagaacgaccccgagctggaccagcagctggcaaacttggacttgaatagcgagaaacaatctggcggggctagcaccgcaagtaaaggacgttatattcctccccacctgcggaaccgtgaagcctcaaagggcttccacgacaaggactcctccggatggagctgtagtaaggacaaagatgcttattcatcctttgggtccagggatagtcggggaaagcccggatacttctctgagcgaggcagcggctcacgggggagatttgacgacaggggtcggtcggattacgatgggattggcaaccgcgaacgaccaggtttcgggcgatttgagcgatccgggcatagcaggtggtgcgataaatctgttgaggatgactggtctaagcccctgcccccctcggaacgcctggaacaggagctgttctcaggaggcaacacagggataaatttcgagaagtacgatgacatcccagtggaagccacaggatccaattgtccgcctcatatcgagaatttttccgatatcgacatgggggaaataattatgggcaatattgagctcaccagatacacccgaccaacccccgtgcagaaacacgccattcctatcatcaagggcaaacgcgacctgatggcgtgtgcgcaaaccggaagtggaaaaactgccgcgttcctcctgcctatcctctctcagatctataccgacggcccgggcgaagcacttaaggctgttaaggagaatggtcgttatgggagaaggaaacagtatccaattagtctggtgctcgctcctactcgggagttggcggtacaaatttacgaagaggcacgcaagttcagttacaggtcgagggtgcgaccatgtgtagtgtacgggggcgccgacattggtcaacagattcgggaccttgaaagggggtgtcacttgctggtggcaacccccggtcgactggtcgacatgatggaacgaggaaagattggcttagatttttgcaaatatctggtgctggacgaagccgaccgtatgttagacatgggtttcgagccccaaataaggaggatcgttgagcaggacacaatgcctcctaaaggggtcagacatacgatgatgttctcagcaacatttccaaaggagatccagatgctggctagggactttcttgatgagtacatctttctggccgtgggccgcgtaggctcgacttcagaaaacatcacccagaaagtggtgtgggtcgaagatcttgacaagaggtccttcttactggacattctcggcgcaaccgggtcagactcactgaccctggtattcgttgagactaagaagggagcagacagtctggaagatttcctgtaccacgagggatacgcctgtacatcaatacacggagacagatcccaacgcgaccgggaggaagctctgcaccaattccgcagcggaaagtccccaatcctggtcgccacagctgtagccgctcgcggtctggatatctccaacgtgaggcacgtgataaacttcgatctgccctccgacattgaggaatatgtacaccgcatagggagaaccggccgggtggggaaccttggactggctacctcattttttaatgagaaaaatatgaacatcaccaaagatcttttagatttattggtcgaagcaaaacaggaggtgcccagctggctcgaaaatatggcgtatgaacaccattataaaggtggcagtcgcggccggagtaaaagtaacaggtttagcggcgggttcggcgcccgcgattacagacagtcctcagggtcatcttcgtccggcttcggggcctccagaggaagttcttctaggtcagggggcggcggttatggcaactccagagggttcgggggcggtggttacggcggattttacaactccgacggctacggggggaattacaactcccagggtgtcgattggtggggcaactag

SEQ ID NO: 184737 - DNA, 1983 bp, synthetic construct
  misc_feature 1..1983: note = Description of Artificial Sequence: Synthetic coding sequence
  source 1..1983: mol_type = other DNA
atgagccacgtggtggtgaagaacgaccccgagctggaccagcagcttgccaacctggatctgaatagcgaaaaacagtccgggggcgcgtctaccgcgagcaagggccgctacatcccacctcacctgaggaatagagaagctagcaagggctttcacgacaaggacagcagcggatggagttgcagtaaggacaaggacgcgtattcatccttcggaagcagggattcaagagggaaacccgggtacttttcagaaaggggtagcggcagtagagggaggttcgatgatcggggtcggtcagactatgatgggattggcaaccgcgagaggcccgggtttgggagattcgaaaggagcgggcacagtaggtggtgtgataaatcagtggaggatgattggtcaaaacctcttcccccatccgagagacttgagcaagagcttttctcaggcggaaatacaggtatcaactttgagaagtatgacgatattccagtggaagccactggtagcaactgcccccctcacatcgaaaacttttccgatattgatatgggtgaaatcattatgggcaacatcgagcttacccgctatacacgccccactcctgtccaaaagcacgctattccaataattaagggtaagcgtgatctgatggcctgtgcacaaacagggtcaggaaagactgcagcattcctgctgcccatactttcacagatctacaccgatgggcccggagaggccctcaaagctgttaaagagaatggacgctacggccgacgaaaacagtatccaatcagcctggttctcgcaccgacacgggagctcgccgttcagatctacgaggaagctcgaaagttctcctaccgatccagggtccgaccttgcgtggtatatggcggcgcagatatcggacagcaaatcagagatctggagcgggggtgtcacttgctggtcgccacccccgggcgacttgtggatatgatggaacggggaaagatcggacttgatttttgtaagtacctggtgctggacgaggccgaccgcatgctggacatggggttcgagccccagattaggcgaatcgtggagcaggatacaatgccccctaaaggagtacgacatactatgatgttttccgcaacttttccgaaagagatccaaatgctggctcgggactttctggatgaatacatatttcttgcggtggggagggtgggatccaccagcgagaatatcactcagaaggtggtttgggttgaggacctagacaagaggtctttcctgcttgatatactgggagccactggaagtgatagcctgaccctcgtatttgttgagacaaaaaagggtgcggattcccttgaggacttcctctaccacgaaggttatgcctgcacttccattcacggtgaccgcagtcagcgcgaccgcgaagaggcactacaccagtttaggtcgggcaagagccctattctcgtggccaccgctgtcgccgcgcgtggtcttgacatttcaaacgtacggcacgtgattaactttgacttgccgtcagacattgaggaatacgttcatcggatcggacgaactggccgagtgggtaatttaggactggcgacctccttcttcaatgaaaaaaatatgaatatcactaaggacctgctcgacctgctggtcgaagccaagcaggaagtcccctcttggctggagaatatggcttacgagcaccactacaaaggcgggagccgaggaagatccaaaagcaatcgcttttctggcggatttggtgcacgggactacagacagtcttctgggagctcctcatctggtttcggcgcctctaggggctcttctagccgttccgggggcggtggttatgggaacagccgaggctttggaggtgggggttatggcggattttataattcagatggctatggaggcaactataacagccagggtgtagactggtggggaaattag

SEQ ID NO: 184738 - DNA, 753 bp, synthetic construct
  misc_feature 1..753: note = Description of Artificial Sequence: Synthetic coding sequence
  source 1..753: mol_type = other DNA
atggagatcggccggccccggaaggacacctggaagctggccaacctggatcttaatagcgagaagcagtctggtggagcgtccaccgctagtaagggacgatacatccctccacatttaagaaacagggaagcctcaaaggggttccatgacaaggacagcagtggctggtcatgttccaaagataaagatgcctatagtagttttgggagcagggacagcagagggaagccaggttactttagcgagagaggcagtggctctcgggggcgtttcgacgatagaggaagatctgattacgacggtataggcaatcgagaacgacccggctttggaaggttcgagcgcagtggacatagccggtggtgcgacaaatccgtagaagatgactggtccaagcctctcccaccctcagaacgtttggaacaggagcttttcagtggtggaaatactgggatcaactttgagaaatacgacgatattcccgtcgaagcaacggggtcaaattgccctcctcacattgaaaacttctctgacattgatatgggggagatcatcatggggaatatcgagttaacccggtacactcggcccacacctgtccagaaacatgccatacccatcattaaaggtaagcgcgatctaatggcgtgcgcgcagacaggtagcgggaaaaccgctgcttttctgctccccatactaagtcagatatacacagacggtcctggtgaggccctgaaggcagtgaaatag

SEQ ID NO: 184739 - DNA, 675 bp, synthetic construct
  misc_feature 1..675: note = Description of Artificial Sequence: Synthetic coding sequence
  source 1..675: mol_type = other DNA
atgagccacgtggtggtgaagaacgaccccgagctggaccagcagctggccaacctggatttgaactctgagaaacaatctggtggcgcatctacagcgagcaaggggagatacatccccccacatctcagaaatagagaagcgagcaagggtttccatgacaaagacagctcaggctggtcctgcagcaaggacaaagacgcctactcttctttcgggagtcgagactcaagggggaaacccgggtatttctcagaaagaggatctggctctaggggtaggttcgacgacaggggccgcagcgattacgatggaattgggaaccgcgagcgacccggctttggtcggtttgagaggtctggccactccaggtggtgcgataagagtgttgaagacgactggagcaaacccctgcctcccagcgagaggctggaacaggagctgttctccgggggtaacacaggaataaactttgaaaagtatgatgacatccccgtggaggctacgggttcaaattgtcccccccacatcgagaacttctcagatattgatatgggcgagatcatcatgggcaatatagagctgaccaggtacacaagaccaacccctgtgcaaaaacatgccatccctataattaaaggtaagcgcgatctgatggcctgtgcccaaacttag

SEQ ID NO: 184740 - DNA, 1974 bp, synthetic construct
  misc_feature 1..1974: note = Description of Artificial Sequence: Synthetic coding sequence
  source 1..1974: mol_type = other DNA
atggagatcggccggccccggaaggacacctggaagctggccaacctggatctaaatagcgagaaacagagcggaggggcgtccaccgctagtaaagggaggtacatccccccccatctcagaaatcgcgaggcaagtaagggatttcatgataaagactccagcggctggtcctgtagtaaggacaaggacgcgtacagcagctttgggtcccgggatagtaggggcaagcctggctacttcagtgagcgcggcagcgggagtaggggaagatttgacgaccgcgggaggtcagactacgacgggataggcaatcgggagcggcctggatttggcaggttcgaaaggtccggtcatagccggtggtgcgataagtctgttgaggatgactggtcgaagccccttccaccctccgaaaggctggaacaggagctcttttctggagggaacaccggtattaatttcgagaaatacgatgacattccggttgaggctactgggtctaactgcccaccacacattgagaacttctccgatatcgatatgggggaaatcattatgggcaacatcgaactgacaagatatactagacctactcccgttcagaaacacgccatccccataatcaagggcaagagggacctgatggcctgcgctcagacagggtccggaaaaacagctgcatttttgctccctatactcagtcagatttataccgatgggccaggagaagccctgaaggcagtaaaggagaatggaagatacggcagaagaaaacaataccctataagtctcgtcctggctcccacacgtgaactggccgtgcagatttatgaggaggcaaggaaattcagctatcgatcccgagtgaggccctgcgtggtgtacggaggtgctgatataggacagcagatcagagatctcgaaaggggatgtcaccttcttgttgctaccccgggtcgtttggtggatatgatggagaggggaaagatcggcctcgatttctgcaagtacctggtgctcgacgaagcggacagaatgttggacatgggcttcgagccacagataaggcgcatcgtggagcaggacactatgccaccaaaaggggtcaggcataccatgatgttcagcgccactttccccaaggagattcaaatgctggcccgcgattttctggacgagtatattttcctcgccgtaggaagggttggctctaccagcgaaaatattacccagaaggtggtttgggtggaagatcttgacaagcggagctttctgctcgatatcctgggtgcaaccgggtctgacagcttaaccctggttttcgtggagacaaagaaaggggctgacagtctggaggactttctttaccacgaaggctacgcatgcacgtccatccacggtgacaggtcccagcgggatagggaagaggccctgcaccagtttaggagcggaaaaagcccgatattggtggctacagcagtggcggcgcgtgggttagacatttccaatgttagacatgttataaacttcgacctgccttcggatatcgaagagtacgtccatagaatcggtaggactggacgcgttgggaatctcggcctcgcgacatctttcttcaacgaaaagaatatgaacataacgaaggacctgctggatctgctagtcgaggcaaagcaagaagttccctcttggctggaaaacatggcctacgaacatcattataagggtggatccagaggaaggagcaagagcaaccgattctctggtggctttggagccagagactatagacagtcaagcggctcttccagtagtgggttcggggccagccggggcagctctagcagatccggaggcggcggctacgggaactccagagggtttgggggcggcgggtatggcgggttctataactcagacgggtatggaggcaactacaacagccagggagtcgactggtggggcaactag

SEQ ID NO: 184741 - DNA, 1278 bp, synthetic construct
  misc_feature 1..1278: note = Description of Artificial Sequence: Synthetic coding sequence
  source 1..1278: mol_type = other DNA
atggccgagaacgacgtggacaacgagctgctggactacgaggacgacgaggtcgaaacagccgccgggggggacggtgctgaagcacccgctaagaaggatgtcaagggatcatacgtgagcattcactcttcaggcttccgggacttcctgctaaagccggagctcctgcgagccattgttgattgcggctttgagcatccctcggaggtgcagcatgaatgcattcctcaagctatactcggtatggatgtcctctgtcaggcgaaaagtggcatgggcaagaccgcagtgtttgtcctggctactcttcagcagctggagcccgtgacaggtcaggtgtcggtcctggtgatgtgccatacccgcgaactggcattccagatctctaaggaatatgagagattcagcaagtacatgcccaatgtgaaagtggcagtgttcttcggcgggctgagcattaaaaaagatgaagaagttctcaaaaagaactgtcctcacatcgtcgtcgggaccccagggaggattttggcgcttgccaggaataagtctctgaacctaaagcatattaagcacttcatcttggatgaatgcgacaaaatgttagagcagctagatatgagaagggatgtgcaggagatttttaggatgacaccgcacgagaagcaggtgatgatgttttctgccaccctaagcaaggagatccgtcctgtgtgccgcaagtttatgcaggacccaatggaaatattcgtggatgacgaaactaaactgacactccacggcctacagcagtattacgttaagctgaaggacaacgaaaagaaccgcaaattgttcgatctgctggatgtgcttgagtttaaccaagtggttatttttgttaagtcagtgcagcgttgtattgctctcgctcaactccttgtggagcagaactttcccgccatcgctattcataggggcatgccacaggaggagcgcctttctagataccagcagtttaaagattttcagcggcggatcctggtagctacgaacctctttggtcgcggcatggacatagagcgcgtgaacatcgccttcaactatgacatgcccgaggattcagatacctatctgcatcggtgctaccctttgtcccctagtaggtggcccgagcaagcaggtcttgctccccgcgcatggctctcccatctctgtccgatgcgcatgatgccgaggtccagtatgatgtgccggatcgctcttcggtccatcctcgtgtcttgtctcatgcggtag

SEQ ID NO: 184742 - DNA, 1287 bp, synthetic construct
  misc_feature 1..1287: note = Description of Artificial Sequence: Synthetic coding sequence
  source 1..1287: mol_type = other DNA
atggccgagaacgacgtggacaacgagctgctggactacgaggacgacgaggttgaaacggcagctggcggggatggcgccgaggctcccgcaaaaaaagatgttaagggctcttacgtcagcatacactcttccggattccgtgactttctgctgaagccagagctccttcgagcaattgtggattgtgggttcgagcacccgagcgaagtgcagcatgaatgcattccccaagctatcctcggaatggacgtcctgtgtcaggcaaaaagcgggatgggaaagacggcagtgtttgtgctggcgacgctgcaacagctggagcccgtgacaggccaggtatctgtccttgtgatgtgccatacacgagagcttgccttccagattagcaaagaatatgagagattctccaagtacatgccgaacgtgaaagtggcagttttctttggcggcctctctataaagaaggacgaggaagtgctgaagaagaattgtccccacattgtcgtcggaactcctggtcggattctggctctggctcggaataagtccctgaatctgaagcatattaagcacttcatactagacgaatgtgacaaaatgctcgagcaacttgatatgcgcagagacgtccaggaaatattcagaatgacaccacacgagaagcaggttatgatgtttagcgcaaccctgtctaaggagataaggcctgtctgcagaaaatttatgcaggatcctatggaaatatttgtggacgatgagactaaattgactctccatggcctccagcaatactacgttaaacttaaggacaatgagaaaaaccgcaagctgtttgaccttctggatgtcctggagttcaatcaggtcgttatcttcgtgaaatctgtgcagaggtgcattgctctggctcagctcctcgtggagcagaatttccccgccatagctatccataggggcatgccacaggaagagaggctatctagatatcagcagttcaaggactttcagaggaggatattagtagcaaccaaccttttcggacggggcatggatatcgagcgcgttaatattgccttcaattatgacatgcccgaggatagtgatacttatctgcatcgtgttgcaagggctggacgctttggtacaaagggtctcgccattaccttcgtgagcgacgagaacgatgccaaaatactgaatgacgtacaggacagatttgaggtcaacatctctgaactgccagacgagattgacatctccagctatattgagcagactagatag

SEQ ID NO: 184743 - DNA, 1287 bp, synthetic construct
  misc_feature 1..1287: note = Description of Artificial Sequence: Synthetic coding sequence
  source 1..1287: mol_type = other DNA
atggccgagaacgacgtggacaacgagctgctggactacgaggacgatgaggtggagactgccgctggcggcgatggcgccgaagcccccgcaaagaaagatgtcaagggctcttacgtgagtatccacagcagcggcttcagggactttctgttaaagccggagttattaagagccatcgtggactgcggcttcgaacacccatccgaggtccagcacgaatgcatcccacaggctatactggggatggatgtgctgtgtcaggctaaatcgggcatgggtaagacagctgtcttcgtgctcgccactctccagcaattggagcctgtaacggggcaggtaagtgtcctggtgatgtgtcacaccagggagttagccttccaaataagtaaagagtacgagagattttccaagtacatgcccaacgttaaagtagcagtttttttcgggggcctcagcataaaaaaagacgaagaggtccttaagaagaattgtccgcacatcgtagtgggaacacctggtaggatcctggctctcgcgaggaacaagagtttaaacctgaaacacatcaaacactttatcctggatgaatgtgataagatgctggagcagcttgatatgagacgcgacgtgcaggaaatttttagaatgactccgcacgagaaacaggtgatgatgttttctgcgacactcagtaaggagatccggccagtctgccggaagttcatgcaggatccaatggagatttttgtcgatgacgaaacgaagcttacactgcacggtctgcagcagtactacgtcaagctcaaggataatgagaagaaccggaagctcttcgacttactagacgtgctcgaatttaaccaggtcgtgatctttgtaaaatccgtgcaacgctgtatcgcactggcgcagctgctggtcgaacagaatttccctgctattgcaatacataggggtatgccacaggaagagagattaagtaggtaccagcagtttaaggactttcagcgaaggattctggtggcaactaatctgtttgggcgaggcatggatatagaacgagtgaacatcgcgtttaactacgatatgcccgaggacagcgacacttacctgcacagggtggcacgcgccggtcggttcgggactaaagggctggccatcaccttcgtgtctgatgaaaatgacgccaagatcctcaacgatgttcaagatcggtttgaagttaacatatcagaattgccagacgaaatcgatatctcctcttatattgaacagaccagatag

SEQ ID NO: 184744 - DNA, 1278 bp, synthetic construct
  misc_feature 1..1278: note = Description of Artificial Sequence: Synthetic coding sequence
  source 1..1278: mol_type = other DNA
atggccgagaacgacgtggacaacgagctgctggactacgaggacgatgaagttgagactgcagctggtggcgatggtgccgaggcccccgccaaaaaagacgtgaagggatcttatgtgtccatacattcctcagggttccgcgactttctcctcaaaccagaattgctgagagcaatcgtagactgtggctttgagcaccctagtgaagtccagcacgagtgcatcccccaggctatcttgggaatggatgtactctgtcaggctaagtctgggatgggtaaaacggcggtctttgtgcttgctaccctgcagcagcttgaaccagttacaggtcaggtgtctgtgctggtaatgtgccacacccgagaactcgcgttccagatctccaaggagtacgaacgcttcagtaaatatatgccaaacgtgaaggttgctgtgttttttggcggtctctcaatcaagaaagacgaggaagttttaaaaaaaaattgtcctcacattgtcgtgggcacacctggcaggatcctagctctcgccaggaacaagagcttaaaccttaaacatatcaagcatttcattcttgacgaatgtgataagatgttggagcagctggacatgcggcgcgatgtgcaggagattttccgcatgaccccccatgagaagcaagtaatgatgttcagcgctacactcagcaaagaaatccgccccgtttgcagaaagtttatgcaggatccgatggagatatttgtggacgatgagacaaagctgaccctacacggactgcagcagtactacgtgaagctgaaggataatgagaagaacaggaagctattcgacctactggatgtgctcgaattcaatcaagttgtgatctttgtgaaaagcgtgcagcgctgcatcgccttagcacaactgctggtggaacagaatttccccgcaattgccatccaccgtggaatgccgcaggaagagcgcctgagcaggtatcagcagttcaaggacttccaaagacggatcctggtggccacgaatctctttggacgaggcatggatatcgagagggttaacatcgcttttaattacgacatgcctgaggacagcgacacctacctccacaggtgctacccactcagcccctcccggtggcctgagcaggccgggcttgctcctcgcgcctggttgtcacatctctgccctatgcgcatgatgccaagatccagtatgatgtgtagaatcgcacttcggagcatcctggtgtcatgcttaatgcgctag

SEQ ID NO: 184745 - DNA, 1287 bp, synthetic construct
  misc_feature 1..1287: note = Description of Artificial Sequence: Synthetic coding sequence
  source 1..1287: mol_type = other DNA
atggccgagaacgacgtggacaacgagctgctggactacgaggacgacgaggtagagactgctgccggtggggatggtgccgaagcccccgctaagaaggatgtcaaagggtcatatgtgagcattcactctagtggcttcagagacttcctgctaaagcccgaactgctaagagccatcgtagattgtggattcgaacaccctagcgaggttcaacatgagtgtatcccacaggccatcctaggcatggatgtgctttgccaagcgaaaagcggcatgggaaagaccgcggtcttcgtgttagccacgctgcaacagctcgagccagtgaccggacaggtgagtgtcctcgtgatgtgccacacaagggagttggctttccaaattagtaaggagtacgagcggttcagcaaatatatgcccaacgtgaaagtcgcggtgttcttcggcgggctaagcatcaaaaaagacgaagaggtcctcaagaaaaattgtccgcacatcgtggttgggaccccgggtagaattctagcattagcacgaaataagagtctgaacttaaaacatataaaacatttcatcctagacgaatgcgataagatgctggaacagttggatatgcgacgagatgtacaagaaattttccggatgacaccccatgagaagcaggtgatgatgttctccgccacattgtccaaggagattagaccagtgtgtcggaagttcatgcaggaccccatggagattttcgttgacgacgagactaaactcacgctccacgggcttcagcagtattatgtcaagctcaaggacaatgagaagaatcggaaacttttcgacctgcttgacgtgttggagttcaaccaggtggtgatcttcgtgaagagcgttcaacggtgcattgcactggcccaactgctggtagagcagaactttccagcgattgctatccatcggggcatgccccaggaagagaggctctcgcgttaccagcagttcaaagatttccaacggaggattttggtcgcaacaaatctctttggccgggggatggacattgaacgggtgaatattgcattcaactacgacatgccagaggacagcgacacctatttacatagagtggcacgggccggaaggttcggaaccaagggactggctattacttttgtgtccgacgaaaatgatgccaagatcctcaacgacgtccaggatcgcttcgaggtcaacatcagtgaattaccagatgaaatagatatctcatcatacatcgaacaaactcggtag

SEQ ID NO: 184746 - DNA, 1287 bp, synthetic construct
  misc_feature 1..1287: note = Description of Artificial Sequence: Synthetic coding sequence
  source 1..1287: mol_type = other DNA
atggccgagaacgacgtggacaacgagctgctggactacgaggacgacgaggtcgagactgcagcgggtggcgatggagcggaagccccggccaagaaagatgtcaagggcagctacgtcagcattcactcatccgggttccgcgactttctgctgaagccggagttgctgcgtgctatcgttgactgcgggtttgagcaccctagtgaagtgcagcatgagtgtattccacaggctattctcggaatggacgtgctctgtcaggccaaatccgggatgggcaagaccgcggtcttcgtactcgctacattacagcaactggagccggttaccggtcaagtttctgtattggttatgtgccacaccagagaactggctttccaaatatctaaggaatacgagcggttctccaaatacatgccaaacgtgaaggtagccgtgttctttggcgggctgagcatcaaaaaggacgaggaggttctgaagaagaactgcccccatattgtcgtgggcacaccaggcagaatactggcgctggcacgtaataagtcactcaatctgaaacatatcaaacatttcattctggacgaatgcgacaaaatgctggaacagctggatatgcgacgagatgtgcaggaaatattccgaatgacacctcacgagaagcaggtgatgatgttctccgctacactctccaaagaaattcggccggtctgtcgcaagttcatgcaggatcccatggaaatctttgtggatgacgagacaaaacttactcttcatggtttgcagcagtactacgtaaaacttaaggacaacgagaagaaccgaaaactgtttgaccttctggatgtgctcgaattcaaccaggtggtcatatttgtgaaatccgtgcagaggtgtattgctctggcacagctattagtcgaacagaattttcctgctatagctattcatagggggatgccccaggaggagcgcctctcaaggtaccagcagttcaaagactttcaacgacgcatcctcgtagctacaaatttgtttggtcgaggcatggatattgagcgtgtgaacatcgcattcaactatgatatgcccgaggattctgacacatatctgcaccgggtggcgagagctggccgctttgggaccaaagggttggctatcacctttgtgtcagatgagaatgacgccaagattcttaatgatgtgcaagacaggttcgaggtaaacatcagcgagttgcctgacgagattgacatcagcagctatattgagcaaacgcgttag

SEQ ID NO: 184747 - DNA, 564 bp, synthetic construct
  misc_feature 1..564: note = Description of Artificial Sequence: Synthetic coding sequence
  source 1..564: mol_type = other DNA
atgggcagcagccacatcggcggcctgagcatcaacgagcggcggtgtagcgcctctctcggcctggtgatggccgaaaacgacgtggacaatgaattgttagattacgaggacgacgaagttgaaaccgctgctggaggggatggggctgaagcccccgctaagaaggatgtgaaagggagctatgtgtctatccatagctccggatttcgggattttctgcttaaacctgagctccttcgcgccatcgtcgattgtggctttgaacacccttcggaagtgcagcacgaatgcatcccacaggctatacttggaatggatgtgctgtgtcaggctaaatctggaatgggcaaaacagccgtattcgtactcgccaccctgcaacaactggagccagtgacaggtcaggtgagcgtgctggtgatgtgccacactagagagctggcctttcagatttctaaggaatacgagcgattttccaaatatatgcctaacgtcaaggtggccgttttttttggcgggctgtcaataaagaaggacgaagaggtgctgaaaaagaactag

SEQ ID NO: 184748 - DNA, 1287 bp, synthetic construct
  misc_feature 1..1287: note = Description of Artificial Sequence: Synthetic coding sequence
  source 1..1287: mol_type = other DNA
atggccgagaacgacgtggacaacgagctgctggactacgaggacgatgaagtggaaactgccgccggtggggacggggcggaagcaccggcaaagaaagatgttaagggcagttacgtttcaattcattccagcggttttcgcgattttctattaaagccagagctactgcgcgccattgtcgactgtggtttcgagcatccatcggaagtccagcacgagtgcattccccaggcgatactggggatggacgtgctgtgccaagctaaatctggaatgggcaaaaccgcggtcttcgtgctggcaactctccagcagctggagccggttacgggacaggtgagcgtgctggtcatgtgtcacacccgcgaactcgctttccagataagtaaggagtatgaacgcttcagcaaatacatgccaaatgtcaaagtggctgtgttttttggagggctgtccattaagaaggacgaggaggtccttaaaaaaaattgcccccatattgtggtgggcacaccaggacgcatcctggctttggcccggaataaatctctgaatctgaaacacattaagcatttcattctggatgagtgtgacaagatgcttgaacagctggacatgaggagggacgtgcaagagatcttccgtatgactccccacgaaaagcaggtcatgatgttttctgcgacactgtccaaggagatccgaccagtttgtcgcaagtttatgcaggaccccatggagatatttgtggacgatgagacaaaactgacattacacggactacagcagtattacgtaaagttgaaggataatgaaaagaaccggaaactgtttgacctgctggacgtgcttgagttcaaccaggtggtcattttcgtgaagtctgttcagaggtgtatcgcactggcccagttattggtggaacagaattttcctgcaattgctatccatagaggcatgccccaggaagagcggctgtctcgctatcagcaatttaaggattttcagaggagaattctggtggccaccaacctgttcggacgcggcatggacatagagagggttaatatagctttcaattatgatatgccagaagactctgacacttaccttcatcgcgtggcacgcgctggacgattcggcaccaaggggctggccatcacattcgtgtcagacgagaacgacgccaagatacttaacgacgtacaggataggtttgaagtcaacattagtgagctgcctgatgagatcgacataagctcctacatcgaacagacacgctag

SEQ ID NO: 184749 - DNA, 378 bp, synthetic construct
  misc_feature 1..378: note = Description of Artificial Sequence: Synthetic coding sequence
  source 1..378: mol_type = other DNA
atggccgagaacgacgtggacaacgagctgctggactacgaggacgatgaagttgagaccgccgctggcggggacggagctgaagccccagcaaagaaggatgtcaagggttcatatgtgtctattcattcctcaggtttcagggatttcctcctcaaaccagagctacttcgagctatagtggattgcgggttcgaacaccccagtgaagtgcagcatgaatgtatcccccaggctatcctcggaatggatgtcctatgccaggccaagagtggtatgggaaagacagccgtgtttgtcttggcgactctgcagcaattggagccagttaccggacaggtgagtgtattagtcatgtgtcatacgagagagctctag

SEQ ID NO: 184750 - DNA, 1287 bp, synthetic construct
  misc_feature 1..1287: note = Description of Artificial Sequence: Synthetic coding sequence
  source 1..1287: mol_type = other DNA
atggccgagaacgacgtggacaacgagctgctggactacgaggacgacgaagtggaaaccgccgcagggggcgacggcgcagaggcacccgccaaaaaagacgtgaaagggagctatgtgagcattcattcctccggtttcagggattttctccttaagcctgagctgctcagggctatagtagactgcggcttcgagcacccttccgaagtgcagcatgagtgtattccccaggctatcctcggtatggacgtgctgtgccaggcaaagagcgggatgggaaaaactgccgttttcgtgctggctactctgcagcaactggaaccagtcactggccaagtgagtgtgctggttatgtgtcacacacgcgagctggcatttcagatcagtaaagagtatgagcgcttttccaaatacatgcccaacgtcaaggtggcagtgtttttcggcgggctttctatcaaaaaggatgaggaggttctgaaaaagaattgcccccacatcgtggtgggtacccccggtaggattctggcactggcacgaaataagtctctgaaccttaagcatatcaaacactttattctcgacgagtgcgacaaaatgctggagcagcttgatatgcggcgggatgtccaagaaatttttaggatgacacctcatgaaaaacaggtgatgatgttcagcgcaaccctgagcaaagagattaggcccgtctgtaggaagtttatgcaggacccgatggagatattcgtggacgatgagactaagctaaccctgcatggacttcagcaatactacgtgaagctgaaggacaatgaaaaaaacagaaagctctttgacctccttgacgttctggaatttaatcaggtggtgatattcgtgaagtcagtgcagcgatgtattgctctggcccagcttctcgtggagcagaattttccagccatcgccatccatagaggcatgccgcaagaggaacgattgagtaggtatcagcagttcaaggactttcaacgccgcatcttggtggcgacgaacctgtttggcagagggatggatattgaacgcgtcaacatcgccttcaattatgacatgcctgaggatagcgacacatatcttcaccgcgtagcacgagccgggcgctttggcacgaaaggcctggctattaccttcgtgtccgacgagaacgatgccaagatccttaacgacgtgcaagatagattcgaagtgaacatatccgaactgcccgacgaaattgacatttcatcttatattgagcagactcgatag

SEQ ID NO: 184751 - DNA, 564 bp, synthetic construct
  misc_feature 1..564: note = Description of Artificial Sequence: Synthetic coding sequence
  source 1..564: mol_type = other DNA
tgaagcgaggagcgggacatcggcaagcccatggagatcttcgtggacgacgagactaaactgacactgcacggccttcagcagtactacgtgaaattgaaggacaatgagaaaaatcggaaattattcgacctcctcgacgtcttagagtttaaccaggtggtcatttttgtgaaatctgtgcagcggtgcatagcgctggcccagttattagtcgaacagaacttccctgccattgctattcatagggggatgcctcaagaggagaggctgagcagataccagcagttcaaagattttcagcggcggatcctcgtagccactaatctgttcggaaggggtatggatatcgaacgcgtcaatatcgcgtttaattacgatatgcctgaggatagtgatacttatctgcatagggtggcaagggctggacgcttcggcactaagggacttgccattacctttgtgtccgacgagaatgatgcgaagatcttgaacgatgtgcaggatcggttcgaagtaaacatctcagaactgcctgacgagattgacatctcctcctactag

SEQ ID NO: 184752 - DNA, 378 bp, synthetic construct
  misc_feature 1..378: note = Description of Artificial Sequence: Synthetic coding sequence
  source 1..378: mol_type = other DNA
atggccgagaacgacgtggacaacgagctgctggactacgaggacgacgaagtcgagaccgctgctgggggggacggcgccgaggctccagccaagaaagatgtgaaaggtagctatgtatctatacatagtagtggcttccgggatttcctcctgaaacccgagctgctaagggccattgtagactgcggtttcgaacatccgtccgaagtccagcacgaatgcataccgcaagccattttgggcatggatgtactttgccaagcgaaatccggtatgggaaaaacagccgtgttcgtcctggctaccctccagcaactggagccagtaacaggccaggtcagcgtccttgttatgtgccatactcgtgagctgtag

SEQ ID NO: 184753 - DNA, 1287 bp, synthetic construct
  misc_feature 1..1287: note = Description of Artificial Sequence: Synthetic coding sequence
  source 1..1287: mol_type = other DNA
atggccgagaacgacgtggacaacgagctgctggactacgaggacgatgaggtggagaccgctgcaggcggagacggggccgaagccccagcaaagaaagacgttaaaggctcgtacgtctctattcattccagcgggtttagagactttcttctcaaacctgagctcctgagggctatcgtggactgcgggttcgagcacccttccgaggtccagcacgaatgcatccctcaggctatcctaggaatggatgttctgtgccaggccaagtcaggaatgggcaaaaccgctgtatttgtcctagctactctccagcagttggagcccgtcacggggcaggtcagcgtgctggtaatgtgccatacacgcgagcttgccttccagatctcaaaagagtatgaacgcttcagtaagtatatgcccaatgtgaaagtcgcagtatttttcggaggtttaagcatcaagaaagacgaggaagtgctgaagaagaactgccctcatattgtcgtcggcacgcctggaaggatcctggccctggcgagaaataaatccttgaacctgaagcatattaagcattttatccttgacgagtgtgataaaatgctggaacagctcgacatgcggcgagacgtgcaggaaattttcagaatgactccccatgagaagcaggttatgatgttttccgctacactctcaaaggaaatccgccctgtatgtagaaagttcatgcaggatcccatggagatctttgtggacgacgaaacaaagttaacactgcacggcttacagcagtactacgtgaagctgaaggacaatgaaaaaaatcggaagctgttcgaccttctggatgttctggagttcaaccaggtggttatcttcgtgaaaagtgtacagcgctgcatcgctttggcacagctgctggttgaacagaattttcccgcaattgcaatccaccgcggtatgccacaggaggagcgccttagccgatatcaacagttcaaggatttccaacgtcgcattctggtggccaccaatctgtttggcagaggtatggacattgagcgcgtgaacattgcttttaattacgacatgcctgaagacagtgacacctatttacacagggtggctagggcgggccgctttgggacgaaaggcctcgccattaccttcgtgagcgacgaaaacgatgccaagattctgaacgacgtgcaggatcgtttcgaggtaaacattagcgagttacctgatgagatagatatctcgtcttatatcgagcaaacgcggtag

SEQ ID NO: 184754 - DNA, 870 bp, synthetic construct
  misc_feature 1..870: note = Description of Artificial Sequence: Synthetic coding sequence
  source 1..870: mol_type = other DNA
atggccgagaacgacgtggacaacgagctgctggactacgaggacgacgaggtcgagacagcggcagggggcgacggggctgaagctccggctaagaaggatgtaaaggggtcatacgtctccatacattcctccggatttagagattttcttctcaagccagagctcttaagggccattgttgactgcggctttgagcaccccagcgaggtccagcacgaatgtattccccaggcgattctgggtatggacgtgctttgccaggccaagtctgggatgggtaaaacagcagtgttcgtgttggccacactgcaacagctggagcctgtgaccggacaggtttccgtcctcgtaatgtgtcatacgcgcgagctggcctttcaaatttctaaggagtacgagcgcttttccaagtacatgcctaacgtgaaagtggccgttttcttcggagggctctccatcaaaaaagatgaagaggtgctcaaaaagaattgcccccatatcgtggtggggacaccagggcggattctcgcactcgccagaaacaagagcttgaatctgaagcatattaaacactttattctagacgaatgtgataagatgttggagcagcttgatatgagacgcgacgttcaggaaattttccggatgacacctcacgagaagcaagttatgatgtttagcgccactctcagtaaggaaattaggccggtgtgccggaaatttatgcaggaccccatggagatcttcgtggacgacgagaccaagctgactctgcacggacttcagcagtattatgtgaaattaaaggataatgagaaaaatagaaagctgttcgatttacttgacgtgctcgaattcaatcaatag

SEQ ID NO: 184755 - DNA, 1287 bp, synthetic construct
  misc_feature 1..1287: note = Description of Artificial Sequence: Synthetic coding sequence
  source 1..1287: mol_type = other DNA
atggccgagaacgacgtggacaacgagctgctggactacgaggacgacgaggtggaaacagccgcagggggcgatggagctgaagcccctgccaagaaagatgtgaaaggaagttatgttagtatccattcgtcagggtttcgtgatttcttactaaagcctgagctgctgagggccattgtggattgtgggttcgaacatccctctgaggtgcagcacgaatgtataccacaggcaatcctcggcatggacgtgctctgtcaggccaaatccggcatgggcaagacagccgtcttcgtgctcgctaccctccagcagctggaaccagtgactggacaggtgtctgtgttagttatgtgccacaccagagagctcgcctttcagatttcaaaggaatacgaaaggttcagtaagtacatgcctaacgttaaagtggcagtgtttttcggtggcctgtctatcaagaaggacgaggaagtgctaaaaaaaaactgcccccatatcgtcgtcggcactccaggccggatcctggcactggccagaaataagtctctgaacctcaagcatattaagcacttcattttagacgaatgcgacaaaatgctggaacagctcgacatgcggcgagacgtgcaggaaatctttcgcatgactccccacgagaagcaggtgatgatgttttctgctaccttaagtaaggaaattcgtcccgtatgccggaagttcatgcaggacccaatggaaatctttgtggatgatgagaccaagttaactctgcatggtctgcaacaatactacgttaagcttaaggacaacgagaagaaccgaaagctttttgatctgttggatgtgctggagttcaaccaggtcgtgatctttgtaaaaagtgtgcagcgctgtatcgctctggctcagctgctggtagagcaaaatttccccgccatcgccatccaccgcggcatgccccaggaggagaggctgtccaggtaccagcaatttaaggacttccagcggcgcatccttgtggcaacaaatctcttcggcagagggatggacatagagagagttaatattgccttcaattacgacatgcctgaagatagtgatacatacttacaccgtgtagcccgcgccggtcgcttcggcacaaagggcttggccattactttcgtcagcgatgagaacgatgcgaagattctgaacgacgtacaagatcgatttgaagtgaacatcagtgaacttccagatgaaatagacatatcatcttatatagaacagacgcggtag

SEQ ID NO: 184756 - DNA, 291 bp, synthetic construct
  misc_feature 1..291: note = Description of Artificial Sequence: Synthetic coding sequence
  source 1..291: mol_type = other DNA
atggccgagaacgacgtggacaacgagctgctggactacgaggacgacgaggtggaaaccgccgcaggcggagatggagccgaggccccagcgaagaaagacgtcaaaggctcttatgtgagcatacatagtagcgggttccgagatttcctgctaaaacctgaacttctgcgcgctattgtcgattgcggcttcgagcacccctctgaggtacagcatgaatgcatcccccaggccatcctcgggatggacgttctgtgtcaagcgaagtctggcatggggaaaacctag

SEQ ID NO: 184757 - DNA, 378 bp, synthetic construct
  misc_feature 1..378: note = Description of Artificial Sequence: Synthetic coding sequence
  source 1..378: mol_type = other DNA
atggccgagaacgacgtggacaacgagctgctggactacgaggacgacgaggtggaaactgcagcggggggagatggggccgaagctcctgcaaaaaaggatgtaaagggcagctacgtttcgatccatagtagcggatttcgcgatttcctgctcaagcctgagctgctccgcgcaatcgtggattgcggttttgagcacccgagcgaggtgcagcacgaatgcattcctcaggccattttgggtatggatgtcctctgccaggctaagtcaggcatggggaagacagcggtgtttgttctggctaccctgcagcagttagagcctgttactggccaagtgagcgtgctggtgatgtgccacactagggagctctag

SEQ ID NO: 184758 - DNA, 696 bp, synthetic construct
  misc_feature 1..696: note = Description of Artificial Sequence: Synthetic coding sequence
  source 1..696: mol_type = other DNA
atggccgagaacgacgtggacaacgagctgctggactacgaggacgacgaggtcgaaactgccgccggaggcgacggagccgaggcccctgctaaaaaagacgtgaagggcagctatgtgtctatccactccagcggcttccgtgatttcctgctgaagcccgaattgttaagagctatcgtagattgtggctttgagcacccttccgaggtgcagcatgagtgtatcccccaggcgatcctcggcatggatgtgctgtgtcaggccaagagtggcatgggaaagacagctgtgttcgtactggcgacactccagcagctcgagcctgtgactggacaggttagcgtactggtcatgtgtcacactcgcgagctcgcctttcagatctctaaagagtacgagcggttcagcaagtacatgcctaacgtcaaggtcgcagtcttttttgggggcctctcaatcaaaaaagacgaggaagtcctcaagaaaaactgcccccatatcgtggtcgggaccccaggaaggatcttggccctcgcaagaaacaagagtctcaacctgaaacatatcaagcatttcatcctggacgagtgtgataagatgttagagcagcttgacatgagacgagacgtgcaggaaatattccggatgacgccacacgaaaaacaggtaatgatgttttcagctacactgtag

SEQ ID NO: 184759 - DNA, 399 bp, synthetic construct
  misc_feature 1..399: note = Description of Artificial Sequence: Synthetic coding sequence
  source 1..399: mol_type = other DNA
atggccgagaacgacgtggacaacgagctgctggactacgaggacgatgaggtcgagactgcagccggcggcgacggcgcagaagccccagccaagaaggacgtgaaagggagctatgtctcaatccacagtagcgggttccgcgactttctgctgaaaccggagctgcttcgtgccatcgtggattgcggctttgagcaccccagcgaggttcaacatgaatgtataccgcaggccattctcgggatggacgtcctgtgtcaggcaaagtctggcatgggaaagacagccgtttttgtactggcaactctgcaacaactggaacctgtgaccggacaggtatgcttctgtgacagtcacttccctcgaggcgataatgaggagctgcacctcccctag

SEQ ID NO: 184760 - DNA, 1053 bp, synthetic construct
  misc_feature 1..1053: note = Description of Artificial Sequence: Synthetic coding sequence
  source 1..1053: mol_type = other DNA
atgtggaccatgagcagctggaccatgaagatgatgcggtggcggcagcagctgggcgagatgggactcagaccgctgccaagacgcatgtccagggcacccatgagcccctccactgcactggcatttgtgacatcctgtagctctcagtcttgctccggcccactgtccacagttgctcttagtattaggcagaaggtggcggttttcttcggaggactgagcatcaagaaggacgaggaagttttaaaaaagaactgtcctcacatcgtagtgggcaccccagggagaatccttgctttagcaaggaacaagagtctgaacctgaagcacatcaagcacttcatcctagatgagtgcgataaaatgttggagcagttagacatgaggcgcgacgtacaggagatctttaggatgactccccatgagaaacaggtgatgatgttctccgccaccctctcgaaagaaattcgccctgtgtgccggaaatttatgcaggaccccatggagatcttcgttgatgatgaaacaaagttgacactgcacggcctgcagcagtattacgtgaaactcaaagacaatgaaaagaatcgcaagctcttcgacttacttgatgtcctcgaatttaatcaggtcgttatatttgtaaaatcagtgcagaggtgcatcgctcttgcccagctattggtggagcaaaacttccccgcaatcgctattcataggggaatgccccaggaggagcgactatctcggtaccagcagtttaaagattttcagcgtagaatcctggttgccaccaacttgttcggcagagggatggacattgaacgggtgaatattgcctttaactatgacatgcccgaagatagtgatacctacctgcatcgggtcgccagagccggaaggtttggtacgaagggcctagccattacgttcgtatccgacgaaaatgacgcaaaaatcttaaacgacgttcaggacaggtttgaagtgaatatatccgaactacccgatgagattgacatttcctcatacattgaacagacccgatag

SEQ ID NO: 184761 - DNA, 738 bp, synthetic construct
  misc_feature 1..738: note = Description of Artificial Sequence: Synthetic coding sequence
  source 1..738: mol_type = other DNA
atgtggaccatgagcagctggaccatgaagatgatgcggtggcggcaacagctgggcgagatgggcctgcggcccctcccgcgtcgaatgtcccgcgctcctatgtcacccagtacagctttagcttttgtcacgtcctgttccagccagtcatgcagcggtcctttaagcaccgtggccctgtccattagacaaaaggtggctgtgttttttggcgggctgtctattaaaaaagacgaggaggttctcaagaagaattgtcctcacattgtggtcggcaccccggggaggattctggctttagcgcggaacaagtccctaaacctgaaacatattaagcatttcatcctagacgagtgcgataagatgctggaacaattggacatgagaagggacgtgcaagaaatttttcggatgacccctcatgaaaagcaggttatgatgttctcagcaaccttgtcaaaagagatcaggcctgtctgtagaaagttcatgcaggacccgatggaaatctttgtggacgatgagacaaagctgacactgcatggcctgcagcagtactatgtcaaactgaaggataatgaaaagaataggaagctatttgacctgcttgatgtgcttgagttcaatcaggtcgtgatctttgtaaaaagcgtgcagaggtgcatcgccctcgcccagttacttgttgaacagaatttccctgcaatcgctattcacagagggatgccacagtag

SEQ ID NO: 184762 - DNA, 411 bp, synthetic construct
  misc_feature 1..411: note = Description of Artificial Sequence: Synthetic coding sequence
  source 1..411: mol_type = other DNA
atgggcggcggccggcggccctacgacgtgttcttcagcaaggtgatggccgagaacgatgtcgacaatgaactcctggactacgaagacgatgaggtggagaccgccgctggaggcgatggtgccgaagcccccgcaaaaaaggatgtgaaggggagttacgtaagcatccactccagtggttttagagactttcttcttaagcctgaactgctccgggcaatagtggactgcggattcgagcacccaagcgaggtgcagcatgagtgtatacctcaggccattcttggaatggacgtgctgtgccaagccaaatctggaatggggaagaccgctgtgtttgtgctcgctaccctccagcagctcgaacccgtcaccggccaggtgagcgtactggtaatgtgccactag

SEQ ID NO: 184763 - DNA, 1287 bp, synthetic construct
  misc_feature 1..1287: note = Description of Artificial Sequence: Synthetic coding sequence
  source 1..1287: mol_type = other DNA
atggccgagaacgacgtggacaacgagctgctggactacgaggacgatgaagtcgaaactgcagctgggggtgatggcgctgaggctccggctaagaaggacgttaaggggtcatatgtttccatccactcttctggcttcagagacttcttgctcaaacccgagctactccgggcaattgtcgactgtgggttcgagcacccgtctgaagtccagcatgagtgcatcccgcaggccatcctggggatggatgtgctctgtcaggccaaaagtggcatggggaaaactgctgtgttcgtgctggcgaccctgcaacaactcgagcccgtgaccgggcaggtgtctgtcctcgtgatgtgtcacacccgtgagttggccttccaaatcagcaaggaatatgaacggttctcaaaatatatgccaaatgttaaggtggcagtgtttttcggcggcttgtccattaaaaaagacgaggaggtgctgaagaagaattgcccacacatcgttgtgggaactcctgggaggattctggccttggcccggaacaaatccttgaatctcaagcacatcaagcacttcatcctagacgagtgcgacaagatgttggaacaacttgatatgcgaagggatgtccaggagattttcagaatgactccacatgaaaagcaagtgatgatgtttagtgcaaccctctccaaagaaatcaggcccgtgtgccgaaaattcatgcaggatcccatggagatttttgtggatgacgagacaaagctcaccctgcatgggttacagcagtactacgtaaaactgaaagacaatgagaaaaatcggaagctattcgatctcctcgacgttctggaattcaaccaagttgtaatctttgtgaagagcgtgcaaaggtgtatagccttggcacagctcctcgtagagcagaacttcccggcaatcgctatccaccgaggcatgcctcaggaggagcgccttagtcggtaccaacaattcaaggactttcagcgcaggattctcgtcgcgaccaacctgttcggcagaggaatggatatcgaacgcgtcaacatcgcctttaactatgacatgcctgaagattccgacacttacctgcaccgggttgcacgcgccgggaggttcggcaccaaaggcctggccatcacatttgtgagtgatgagaacgacgccaaaatcctgaacgatgtgcaggaccgatttgaggttaatatctccgagttaccagatgaaattgacatcagcagctacattgaacaaaccagatag

SEQ ID NO: 184764 - DNA, 594 bp, synthetic construct
  misc_feature 1..594: note = Description of Artificial Sequence: Synthetic coding sequence
  source 1..594: mol_type = other DNA
atggccgagaacgacgtggacaacgagctgctggactacgaggacgatgaggtggaaaccgccgcaggcggggatggagctgaggccccagccaaaaaggatgtgaagggatcttacgtatctatccactcatccggcttccgagactttttgttgaagccagagctgttgagggctattgtcgattgtggttttgaacacccctccgaggtacagcacgagtgcatacctcaggccatactgggaatggatgtgctttgccaggccaagagtggtatgggaaagacagctgttttcgtgctggcaaccttacaacaactggaaccagtaactggacaagtctgcttctgtgatagccactttcccagaggggataatgaagaactacacttaccctacgttagcgtctatttcttgcctaaggtttccgtgctggtgatgtgtcatacacgggagctggcatttcagatttctaaggagtacgaacggttctcaaaatacatgcctaatgtgaaggtagcggtgttttttggcggtctgtctattaagaaggacgaggaagtcctgaaaaagaactgccctcacatcgtgtag

SEQ ID NO: 184765 - DNA, 570 bp, synthetic construct
  misc_feature 1..570: note = Description of Artificial Sequence: Synthetic coding sequence
  source 1..570: mol_type = other DNA
tgagccaccctgcagcagctggagcccgtgaccggccaggtgagcgttctggtgatgtgtcacacccgtgagctcgcattccagatttcgaaagaatatgaacggttttcgaaatacatgcccaacgtaaaggtagctgtgttctttggtggccttagcatcaaaaaggatgaggaggtgcttaagaaaaattgtccccacatagtcgtaggcacgccgggccggattcttgcgctcgctcggaacaaatctctgaacctcaagcatatcaagcatttcatcctggacgagtgcgataaaatgttggagcaactggacatgaggcgggatgttcaggagatcttcagaatgactccgcatgagaagcaggtaatgatgttcagtgcaactttgtccaaggaaattcgtccagtctgcaggaaattcatgcaggaccctatggagattttcgttgatgacgaaactaaattgaccctgcatggattacagcagtactacgtgaaactgaaggataacgagaagaataggaagctgttcgacctccttgatgtgctcgaattcaaccagtag

SEQ ID NO: 184766 - DNA, 1287 bp, synthetic construct
  misc_feature 1..1287: note = Description of Artificial Sequence: Synthetic coding sequence
  source 1..1287: mol_type = other DNA
atggccgagaacgacgtggacaacgagctgctggactacgaggacgacgaagtcgaaaccgccgcaggaggagatggggccgaagctcctgccaagaaagacgttaaaggctcttatgtgagcattcattcctccggtttccgggattttctgttgaaaccagaactgctgagagccattgtggattgcggttttgaacatccatccgaggtgcagcacgaatgcataccccaagccatcctaggcatggacgtgctgtgccaagctaaatccggtatgggtaagacagctgtttttgtgttagccacactccaacagctcgaacctgtgactggccaggtgagcgtcctggtcatgtgccacacacgtgagctggcctttcagatctccaaggagtatgagagattctctaagtacatgcctaacgtcaaagtggcagtgttctttggaggtctgtccatcaagaaagacgaagaggtactgaagaagaactgtccacacattgtcgtggggacgcctggccggattctagcgctggctcgaaataaaagcctgaatctaaagcacattaagcacttcatcctggatgaatgcgacaaaatgctggagcagttagacatgagacgcgatgtgcaggaaatctttagaatgacaccccatgagaagcaggtcatgatgtttagtgcgaccctgagtaaggaaatccgtccagtatgccgcaaatttatgcaggaccctatggagatcttcgttgatgatgaaacaaaactgaccctacatgggctccagcagtattatgtcaagttgaaggataacgaaaagaaccgaaaactcttcgatttattggatgttctcgaattcaatcaggttgtgatttttgttaaaagcgtgcagagatgcattgccctagcccagctcctcgttgaacagaattttcccgccatcgccattcaccgaggtatgccccaggaagagagactgagtcggtatcagcagtttaaagatttccagagacgtatcctggtcgctaccaacctgttcgggaggggaatggatatcgagagggtgaacatcgctttcaactacgatatgcctgaggatagcgacacctatttacacagggtcgccagagctggccgtttcggcaccaagggactggcgattaccttcgtctcagatgagaatgacgctaagatactgaatgatgtgcaggaccgcttcgaggtaaacatcagcgaacttccagacgaaattgacattagctcatatattgaacaaaccaggtag

SEQ ID NO: 184767 - DNA, 711 bp, synthetic construct
  misc_feature 1..711: note = Description of Artificial Sequence: Synthetic coding sequence
  source 1..711: mol_type = other DNA
atggccgagaacgacgtggacaacgagctgctggactacgaggacgatgaggtcgaaacggcagctggaggagacggagccgaagcacctgcaaaaaaggacgtgaagggatcctatgtcagcattcactctagtggcttccgggactttctccttaagcctgaactcctgcgcgccattgtcgactgcggcttcgaacaccccagcgaggtacagcacgagtgtatcccacaggccattcttgggatggacgtcctgtgtcaggcaaagagcgggatggggaagaccgctgtgtttgtgctagcaaccctccagcaactggagccagtgacagggcaggtgtctgtgctcgttatgtgtcacactagggagcttgcttttcagatcagtaaggagtacgaaagattcagcaagtacatgcctaacgtaaaagtggcagtgtttttcggcggactgtctatcaagaaggacgaagaggtgctcaagaagaattgccctcatattgtcgtcggcactcccggcaggattcttgccctggcccggaataaatcactgaacctgaaacacatcaagcattttatacttgatgagtgtgacaagatgctggaacaattagacatgcgcagagacgtacaggagatcttccggatgaccccacacgaaaaacaggtaatgatgttttctgccactctcagcaaggagattaggtag

SEQ ID NO: 184768 - DNA, 564 bp, synthetic construct
  misc_feature 1..564: note = Description of Artificial Sequence: Synthetic coding sequence
  source 1..564: mol_type = other DNA
atgggcagcagccacatcggcggcctgagcatcaacgagcggcggcgcagcgccagcctcggtctggttatggccgaaaacgatgtggacaatgaactccttgattacgaagacgatgaagtggagactgctgcaggaggggatggcgcagaggcacccgccaaaaaggacgtcaaagggagctacgttagtatccactctagcggattcagggatttcttactgaaacccgagttgctgcgcgctatcgtggactgtggattcgagcatcctagtgaggtccagcacgagtgtatcccccaggcgatactcgggatggatgtcttgtgccaggcaaagagtggaatgggtaaaactgccgtcttcgtgctggcaactctccagcagctggagcccgtcaccggccaggtttctgtgctggtgatgtgccacaccagagagttggcatttcagatcagcaaggagtacgagcggtttagcaaatatatgccgaatgttaaagttgcggtgttcttcggcggcctttcaatcaagaaggacgaggaagtgctcaaaaaaaattag

SEQ ID NO: 184769 - DNA, 399 bp, synthetic construct
  misc_feature 1..399: note = Description of Artificial Sequence: Synthetic coding sequence
  source 1..399: mol_type = other DNA
atggccgagaacgacgtggacaacgagctgctggactacgaggacgatgaggtggaaactgcggccgggggtgatggcgctgaggcacctgccaagaaagacgtgaagggctcttacgtctctattcacagttcaggcttccgggacttcctgttgaagccggaactcttgcgagcaatcgtcgactgcggtttcgagcaccccagcgaggttcaacacgaatgcattccccaagccattctggggatggatgttctatgtcaagccaaatctggaatgggaaaaactgcagtctttgtgcttgccacactgcagcagctagagccagtgaccggccaggtgtgtttttgtgattcccatttccctcgaggggataatgaagagttgcatctcccatag

SEQ ID NO: 184770 - DNA, 1332 bp, synthetic construct
  misc_feature 1..1332: note = Description of Artificial Sequence: Synthetic coding sequence
  source 1..1332: mol_type = other DNA
atggccgagaacgacgtggacaacgagctgctggactacgaggacgatgaggtggagacagctgcaggtggagatggcgcggaggccccggctaagaaggatgttaaaggttcttacgtttctatccattccagcgggttccgcgacttcctgctgaaacccgaacttcttcgcgctattgtggactgtggttttgagcacccatcggaggtgcaacacgaatgcattcctcaggctatactgggcatggatgtcctctgccaagccaagagtggcatgggcaaaaccgcggtctttgtgctggccaccctccaacagctcgagcctgtgactggacaggtgtacctgggcagagtcctgggccggggattttggtgcgtattcgtctctgtactggttatgtgtcatacacgggagctggcgttccagatcagtaaagagtatgagaggttctctaagtacatgcctaacgtgaaagtcgcggtgttcttcggtggcttgtctatcaagaaagatgaggaagtgctcaaaaagaattgtccacatatcgttgtcggtacacccgggcgaatactggctctcgcacgcaacaagagcttaaacctgaagcacatcaagcattttatactggatgaatgtgacaagatgctcgagcagctggatatgcgccgggatgtgcaggaaatttttaggatgaccccacacgagaagcaggttatgatgttctcagcaaccctcagcaaggagatacggccagtgtgtcgcaaatttatgcaggatccaatggagatcttcgtggacgatgaaacaaagttaaccctgcatggattgcagcagtattacgtgaagctaaaagataacgagaagaacaggaaactgtttgatctattggatgtgctggagttcaatcaagttgtgatcttcgtgaaatccgtacaaagatgcattgccttagcacaactgctagtcgagcagaacttcccagccatcgcaatccaccgcggcatgcctcaggaagaacgtctgagccggtaccagcagtttaaagatttccagaggaggatcctggtcgctaccaatctatttggccgagggatggacatcgaacgggtaaatattgcattcaactatgacatgcccgaggactctgacacttacctgcaccgggtagctagggcaggacgatttggaaccaaaggtctcgctatcacattcgtatctgacgaaaacgatgccaagattctcaatgatgtccaggaccgatttgaggtgaacataagtgagctccccgatgagatagacattagcagttacatagaacaaactcggtag

SEQ ID NO: 184771 - DNA, 870 bp, synthetic construct
  misc_feature 1..870: note = Description of Artificial Sequence: Synthetic coding sequence
  source 1..870: mol_type = other DNA
atggccgagaacgacgtggacaacgagctgctggactacgaggacgatgaggtagaaacggccgctggaggggatggcgcagaagctcccgcaaaaaaggacgtgaaagggagctacgtaagcattcacagtagcggcttccgggacttcctgctgaagcccgaattgcttcgggccatagtcgattgcggattcgagcatcctagcgaggtgcaacacgagtgcatcccacaggccatccttggaatggacgtgctgtgccaagctaaatcaggaatgggcaagaccgcagtctttgtcttggccaccttgcagcagcttgaacctgtgaccggtcaggtgagcgtgctggtgatgtgccacacacgggagcttgccttccagataagcaaggagtatgagaggttctctaaatacatgccaaatgtgaaggtggcagtgttcttcggcggacttagcattaaaaaagatgaagaggtccttaagaaaaattgtccccatatcgtggttgggaccccaggcagaatcctggcactggccaggaacaagagtctcaacctgaagcatatcaagcatttcatactggacgagtgcgacaaaatgctggaacaactggacatgagaagagatgtgcaagagatttttagaatgacccctcatgaaaaacaagtgatgatgttctcggcgaccctgtccaaggaaattcggccagtgtgtagaaagtttatgcaggatcccatggagatcttcgttgacgatgagactaagcttaccttgcacgggcttcagcaatactacgttaagcttaaggataacgaaaagaatcggaagttgtttgatctgctggacgtgttggagttcaatcagtag

SEQ ID NO: 184772 - DNA, 564 bp, synthetic construct
  misc_feature 1..564: note = Description of Artificial Sequence: Synthetic coding sequence
  source 1..564: mol_type = other DNA
tgaagcgaggagcgggacatcggcaagcccatggagatcttcgtggacgacgagaccaaactgactttgcacggcctccagcagtattacgtgaagcttaaggataacgaaaagaataggaaactgttcgatctgctcgatgtcctggagttcaaccaagtggtgatattcgtaaaatccgtccagaggtgcatcgcgttggcccagttactagtcgagcagaacttccctgctatagcaatccacaggggtatgcctcaggaagaaagattgtctcgctaccagcaatttaaggactttcagcgccgaattctggtcgcgaccaacctttttggtcgaggaatggacatcgaacgtgtaaacatcgctttcaattacgatatgcctgaggattcagacacgtacctgcatagagtggcccgagccgggcgcttcgggaccaaagggttagctatcacattcgtatctgacgagaatgacgccaaaatcctgaacgacgtacaggatagattcgaggttaacatctctgagctacccgatgagattgacatttcttcttactag

SEQ ID NO: 184773 - DNA, 411 bp, synthetic construct
  misc_feature 1..411: note = Description of Artificial Sequence: Synthetic coding sequence
  source 1..411: mol_type = other DNA
atgggcggcggccggcggccctacgacgtgttcttcagcaaggtgatggccgagaacgatgtggataacgagctactggattacgaggacgacgaggtagaaacagccgctgggggagacggggcggaggccccagcgaagaaggatgtcaaaggatcctatgttagtatccattcctctgggtttagagactttctcctcaagcctgagctcctccgggcgattgttgactgcggatttgagcatccgagcgaggtccagcacgagtgcatacctcaggcaatcttgggaatggacgtcctttgccaggccaaatctggcatggggaagactgccgtgttcgtgcttgcaactctccagcagttggagcctgtgacaggccaggtcagtgtccttgtcatgtgccattag

SEQ ID NO: 184774 - DNA, 411 bp, synthetic construct
  misc_feature 1..411: note = Description of Artificial Sequence: Synthetic coding sequence
  source 1..411: mol_type = other DNA
atgggcggcggccggcggccctacgacgtgttcttcagcaaggtgatggctgagaacgacgtggacaatgagttgctggactatgaggatgatgaggtcgagacagcagccggtggggacggtgcagaggccccagccaaaaaagatgtgaagggcagctacgtgagcattcattcttctggcttcagagatttcctgttgaagcctgagctgctgagggccatcgtggactgtggattcgaacacccaagtgaggtccagcatgagtgcatcccccaggccattctgggaatggacgtgctctgtcaagctaaaagtggcatgggtaaaacggctgtatttgtgcttgcgacgctccaacagctcgaacctgtcactgggcaggttagcgttctggtgatgtgccattag

SEQ ID NO: 184775 - DNA, 399 bp, synthetic construct
  misc_feature 1..399: note = Description of Artificial Sequence: Synthetic coding sequence
  source 1..399: mol_type = other DNA
atggccgagaacgacgtggacaacgagctgctggactacgaggacgatgaagtcgagacagctgccggcggagatggggctgaagctccagccaagaaggacgtgaagggcagctatgtgtctatccactcctcaggtttccgagatttcttgctgaagccggagctgctccgggccattgtggattgtggcttcgagcaccctagcgaggtgcagcacgagtgtatcccacaagctatcctgggtatggacgtgctgtgccaagcaaagagcgggatgggcaaaactgccgtttttgtgcttgccaccttacagcagttagagcccgttactggtcaggtgtgtttttgcgactcgcactttccgagaggggacaatgaggagctgcatcttccttag

SEQ ID NO: 184776 - DNA, 711 bp, synthetic construct
  misc_feature 1..711: note = Description of Artificial Sequence: Synthetic coding sequence
  source 1..711: mol_type = other DNA
atggccgagaacgacgtggacaacgagctgctggactacgaggacgacgaggtggagactgcagcgggaggggatggtgctgaggctcccgctaagaaggacgtgaagggctcttacgtaagtatccattctagtggctttcgcgactttctcttgaagcctgagctgctacgagccatcgtggattgcggcttcgaacatcctagcgaggtgcagcatgaatgtatacctcaggctattcttggcatggacgttctctgccaggctaaaagcggcatgggtaaaacagccgtgtttgtactggcaacactgcagcaactcgaacccgtgacaggacaagtatctgtgctggtgatgtgccatacgcgggagctggcgttccagatcagcaaggagtacgagcggtttagcaagtacatgccaaacgtgaaagtcgctgtttttttcgggggtctgagtataaagaaagacgaggaggtgcttaaaaagaactgtccacacatcgtggtcggaacgcccggtcgtattttagctcttgcccggaacaaatcactcaatttaaagcatatcaaacactttatactggacgagtgcgacaaaatgctagagcaactcgacatgcggagggatgtgcaggagatcttccggatgactccacatgaaaaacaggtgatgatgtttagcgctaccctctccaaagaaatccgatag

SEQ ID NO: 184777 - DNA, 378 bp, synthetic construct
  misc_feature 1..378: note = Description of Artificial Sequence: Synthetic coding sequence
  source 1..378: mol_type = other DNA
atggccgagaacgacgtggacaacgagctgctggactacgaggacgacgaggtagaaaccgcagccggcggtgatggcgcagaggcccccgccaaaaaagacgtaaagggcagctatgtgtctatacattcatctggtttcagggacttcttactcaaacctgaacttctgcgcgccatcgtggattgcggtttcgaacacccatctgaagtccagcatgagtgtatcccacaggcaatcctcggcatggacgtcctgtgccaggccaagagtggtatggggaaaaccgccgtgtttgttctcgctactttgcaacagctggagccagttactggccaggtttctgttttggtgatgtgtcacacaagggagctctag

SEQ ID NO: 184778 - DNA, 987 bp, synthetic construct
  misc_feature 1..987: note = Description of Artificial Sequence: Synthetic coding sequence
  source 1..987: mol_type = other DNA
tgagccaccctgcagcagctggagcccgtgaccggccaggtgagcgttctggtcatgtgccatactcgcgaacttgccttccagattagcaaagagtatgaaaggtttagtaagtacatgccgaatgtcaaggtcgccgtttttttcggaggtctgtctattaaaaaggatgaagaggtcctaaaaaagaattgtccccatattgtcgtagggacccctggaaggattctggccctggcccgcaataagagcctgaacctcaagcatatcaaacatttcatcttggatgagtgtgacaagatgttagagcagctagacatgaggcgtgatgtgcaggagattttcaggatgacaccgcatgaaaagcaagtgatgatgtttagcgcaaccttatctaaggagataagacccgtgtgtcgcaagtttatgcaagatccaatggagatatttgtggacgacgaaacaaagctcacgttacacggtctccagcagtattacgtgaagcttaaggacaacgaaaagaataggaaactgtttgatcttctcgacgtgctagaattcaatcaggtggtgatctttgtgaaatctgttcagagatgcatagcattggctcaactcctcgtggagcagaactttcccgccattgcgattcatagaggtatgccacaagaggaacgattgagcaggtaccagcaattcaaagactttcagcgaaggattcttgtagctacaaacctctttggtagagggatggacattgagagagtaaacattgcatttaattatgacatgccagaagactccgacacataccttcatcgagtggctcgcgccggccgattcggaacaaagggactcgccattacatttgtgtcagatgagaacgacgcaaagatcctaaatgacgttcaggatagatttgaagtgaatatctctgagttacctgacgaaatcgacatttcaagttacatagagcaaacgaggtag

SEQ ID NO: 184779 - DNA, 711 bp, synthetic construct
  misc_feature 1..711: note = Description of Artificial Sequence: Synthetic coding sequence
  source 1..711: mol_type = other DNA
atggccgagaacgacgtggacaacgagctgctggactacgaggacgacgaggtggaaacagcagccgggggagacggcgcggaagcgccggctaaaaaagatgtcaaagggtcctatgtgagtatccattcatccggttttagagatttcttactcaaacctgagcttctgagagccatcgtggattgcggctttgagcatccttccgaggtgcagcacgagtgcatcccgcaggccattctggggatggacgtgctgtgccaggctaaaagcgggatgggcaaaaccgctgttttcgtcttagccaccctgcagcagctcgagcccgttaccgggcaggttagtgtcctggtgatgtgtcacacaagagaactggcctttcagatctccaaagagtacgagaggttcagcaagtacatgccaaatgtgaaggtggctgtattttttggaggtctgtccatcaagaaggacgaggaagtactcaagaagaattgcccccatatcgtagtgggcacccctggacgtattctcgcattggccaggaataagtccctgaatctcaagcacattaagcacttcattttggacgagtgtgataaaatgttggaacagctcgacatgaggcgcgacgttcaggagatattccggatgacaccacacgaaaagcaagtgatgatgttcagtgcgacactttctaaggaaataagatag

SEQ ID NO: 184780 - DNA, 564 bp, synthetic construct
  misc_feature 1..564: note = Description of Artificial Sequence: Synthetic coding sequence
  source 1..564: mol_type = other DNA
tgaagcgaggagcgggacatcggcaagcccatggagatcttcgtggacgatgaaacgaaactgacattgcacggactgcaacaatactacgtgaagctgaaagacaatgaaaagaataggaagctcttcgacctgctggacgttttggagttcaatcaggtcgtgatttttgttaaaagtgtacaacgatgtatcgcccttgcacagctgcttgtggaacagaactttcctgccattgctatccaccgcggcatgcctcaggaggagcggctctccaggtatcagcaattcaaagatttccagcggaggatacttgtcgcaacaaacctgtttggcagaggcatggatattgaaagggtcaatattgcctttaattacgacatgccagaagattctgacacatacctgcatcgcgtggccagagctgggcggtttgggacgaaagggctcgccataacctttgtgagtgatgagaacgacgccaagatcctaaacgacgtgcaggatcggtttgaagtgaacataagcgaacttccggatgaaattgacatatcttcttattag

SEQ ID NO: 184781 - DNA, 378 bp, synthetic construct
  misc_feature 1..378: note = Description of Artificial Sequence: Synthetic coding sequence
  source 1..378: mol_type = other DNA
atggccgagaacgacgtggacaacgagctgctggactacgaggacgacgaggttgagacggctgctgggggcgacggtgccgaggcacccgctaagaaagacgtgaaagggtcttacgtgtccatacattcatctggatttcgggatttcttactgaagccggagttgctgcgagctattgttgactgtggcttcgagcatcccagcgaggttcagcatgagtgcataccccaggctatcctgggcatggatgtgctatgtcaggccaagtcagggatgggcaagacagcagttttcgtgcttgctacactgcagcaactggagccggtgacagggcaggtgagtgtcctcgtgatgtgccataccagagagctttag

SEQ ID NO: 184782 - DNA, 291 bp, synthetic construct
  misc_feature 1..291: note = Description of Artificial Sequence: Synthetic coding sequence
  source 1..291: mol_type = other DNA
atggccgagaacgacgtggacaacgagctgctggactacgaggacgacgaagtcgaaacggctgccggcggcgacggagcagaagccccagccaagaaggacgtcaaaggcagttatgtcagcatccatagcagcggctttagagactttctcctgaagcctgaactgcttagggctatagtggactgtggatttgaacacccttccgaagtgcagcatgagtgtattcctcaagctatcctggggatggacgtgctgtgtcaagcgaaaagtggaatgggaaagacatag

SEQ ID NO: 184783 - DNA, 378 bp, synthetic construct
  misc_feature 1..378: note = Description of Artificial Sequence: Synthetic coding sequence
  source 1..378: mol_type = other DNA
atggccgagaacgacgtggacaacgagctgctggactacgaggacgatgaggttgaaacagctgcgggtggagatggggctgaggcccctgccaagaaggacgtgaagggatcgtatgtgtctatccactcttcaggtttccgggattttctgcttaaacccgaactgctgagggccatcgtcgactgtggattcgagcatccgagtgaagtccagcacgaatgtattccccaggctatcctggggatggatgtgctctgtcaagctaagtccggcatgggcaaaactgctgtgtttgtgctggctactctgcaacagctcgagcccgttaccgggcaggttagcgtactggtgatgtgccacacgcgcgaactgtag

SEQ ID NO: 184784 - DNA, 987 bp, synthetic construct
  misc_feature 1..987: note = Description of Artificial Sequence: Synthetic coding sequence
  source 1..987: mol_type = other DNA
tgagccaccctgcagcagctggagcccgtgaccggccaggtgagcgtactggttatgtgccacacacgcgaacttgcttttcaaatctctaaggagtatgagaggttcagtaagtacatgcccaatgtgaaggtggccgtctttttcggcggtttgtctatcaaaaaggatgaagaggtgctcaagaaaaattgtccgcacatcgtagtggggaccccgggccgcatcctggccttggcacgcaacaaaagcctaaatctcaaacacataaagcactttattctcgatgagtgtgataaaatgctggaacaattggatatgaggagagacgtgcaggagatctttcgcatgactccacacgagaagcaagtaatgatgttcagcgccaccttgagcaaggagattagacccgtgtgccggaagtttatgcaagacccgatggagatctttgttgacgacgagacaaagctaacactacacggtctgcagcagtactacgtgaaacttaaggataatgaaaagaatagaaaattgttcgacctgttagacgtgctcgagtttaaccaagtagttatcttcgttaaatcagtgcagcgatgcatcgcactagctcaattgcttgtcgagcagaattttccggctattgcaatccaccgtgggatgccccaggaggagcgattgtctcgataccaacagttcaaggatttccagcggcggattttggtcgcaacaaacctcttcggaaggggcatggacatcgagcgtgtgaacatcgctttcaactatgacatgcccgaggactcagatacctatttgcaccgtgtcgctagggcaggcaggtttggcacgaaaggcttagctatcacattcgtctctgatgaaaacgatgcaaagattctgaatgatgtgcaggatagattcgaagtgaatataagcgagttaccagatgaaatcgacatcagtagctatatagaacagaccaggtag

SEQ ID NO: 184785 - DNA, 870 bp, synthetic construct
  misc_feature 1..870: note = Description of Artificial Sequence: Synthetic coding sequence
  source 1..870: mol_type = other DNA
atggccgagaacgacgtggacaacgagctgctggactacgaggacgatgaggttgagaccgccgcaggcggggatggggctgaagcccctgccaagaaggacgtgaaggggagctacgtatctatccactccagcgggttcagggatttcctcctgaaacccgagttgctccgagccatcgtggattgcggcttcgagcatcctagtgaagtgcagcatgagtgcatcccgcaggctatcctggggatggacgtactatgtcaggccaagtctgggatgggaaaaacagccgttttcgtactggcaacactgcagcaacttgagcccgtaaccggtcaggtcagtgtgttagtgatgtgccacacgagggaattggctttccagatcagtaaagaatacgagagattcagcaaatatatgcctaacgtgaaagtggccgtgtttttcggagggctgtctattaagaaagacgaggaagttttgaaaaagaactgtccacacatcgtggtgggcacaccagggcggatcctggccctggcacgcaataaatccctgaacctgaaacacattaagcattttattctcgatgaatgcgataaaatgctggagcagctcgatatgcgtcgagatgtgcaagaaatatttcgcatgaccccacacgaaaaacaggtcatgatgttctccgctactctctcaaaggaaattcgcccagtttgtagaaaatttatgcaggatcctatggagattttcgttgatgatgagaccaaactcactctacatggactgcagcagtattatgtaaagctaaaagataacgaaaaaaaccggaagctgtttgatctcctggacgtgctagagtttaaccagtag

SEQ ID NO: 184786 - DNA, 738 bp, synthetic construct
  misc_feature 1..738: note = Description of Artificial Sequence: Synthetic coding sequence
  source 1..738: mol_type = other DNA
atgtggaccatgagcagctggaccatgaagatgatgcggtggcggcagcaacttggggagatgggtctgcggcccctccctcgacgcatgtcccgtgctcctatgtcaccatccactgccctagccttcgtaacgagctgctcatcccaatcgtgttccggtcccctgtcaactgtagccctgagcattcgccagaaggttgcggtttttttcgggggccttagcatcaaaaaggatgaagaagtcttaaaaaagaattgtccccacattgtcgtaggcactccaggacggatacttgcactggcacgcaataagtctctgaacctgaagcacattaaacactttatcctggacgaatgcgataaaatgcttgagcagctcgatatgagacgggacgtgcaggaaatctttaggatgacaccccacgaaaaacaggtaatgatgtttagtgcaacactgagcaaagagatcaggccagtctgccgcaaattcatgcaggatccaatggaaatcttcgtggacgacgaaaccaagctaacacttcatggcttgcagcagtactatgtaaaacttaaggataacgagaagaaccgaaagttatttgacctgctagatgtcttggagttcaaccaggttgttatctttgtgaagagcgtccaacgttgtatagccttagctcagttattggtggaacagaacttcccggcaattgctatacacaggggcatgcctcagtag

SEQ ID NO: 184787 - DNA, 738 bp, synthetic construct
  misc_feature 1..738: note = Description of Artificial Sequence: Synthetic coding sequence
  source 1..738: mol_type = other DNA
atgtggaccatgagcagctggaccatgaagatgatgcggtggcggcaacaactcggagaaatgggcctgcggccacttccccgccgcatgagccgggccccaatgagcccaagcaccgctctagcattcgtgacttcttgtagctctcaaagctgctctggacccctgagcacggttgctctgagcatccggcagaaagttgctgttttcttcggagggctgtccattaagaaagacgaagaggtgctgaagaagaactgtccacatattgttgtcgggacgccaggcagaatattggccctagccagaaacaaatctctgaatctgaaacatattaaacactttatcctggacgagtgcgataagatgctagagcaactcgatatgcgccgcgatgtgcaggaaatttttaggatgaccccccacgaaaagcaggtaatgatgttttctgctacactgtccaaggagatacggcctgtgtgccggaagttcatgcaagacccaatggagatatttgttgatgatgagacaaaactgacattgcacggcctccagcagtattatgtgaagcttaaggataacgaaaaaaatcgcaagctgtttgatctgctagacgttttagagttcaaccaggtcgtcatcttcgtcaagtctgtgcagcgctgtatcgccttagcacagctcctggttgaacagaatttcccagccattgctatacacagggggatgcctcaatag

SEQ ID NO: 184788 - DNA, 396 bp, synthetic construct
  misc_feature 1..396: note = Description of Artificial Sequence: Synthetic coding sequence
  source 1..396: mol_type = other DNA
tgagccaccctgcagcagctggagcccgtgaccggccaggtgagcgtgctggtgatgtgccacacccgggaactggcatttcaaatctctaaagagtacgagcggttctcaaagtatatgcctaatgtaaaagtggcggtgtttttcgggggtctgagcatcaagaaggacgaagaagtattgaaaaagaattgtcctcacattgtggtgggcacacccggacgaattcttgcgctcgcgcgcaataagagtctcaacttgaagcatataaaacatttcatactggatgaatgcgacaaaatgctggaacagctggacatgagaagggacgtgcaggaaatctttcggatgacccctcacgagaaacaagttatgatgtttagtgccactctttag

SEQ ID NO: 184789 - DNA, 411 bp, synthetic construct
  misc_feature 1..411: note = Description of Artificial Sequence: Synthetic coding sequence
  source 1..411: mol_type = other DNA
tgagccaccctgcagcagctggagcccgtgaccggccaggtgagcgttctggtgatgtgtcatacaagggagttagcttttcagatttccaaggaatatgagaggttttcgaagtacatgcccaatgttaaggtggcagtgttcttcggtgggctgtccatcaaaaaggacgaagaggttcttaaaaaaaactgcccacatattgttgtaggaacccccgggagaatcttggcactggcacgtaacaagtccctaaatctgaagcatattaaacacttcatcttggatgaatgcgacaaaatgctggaacaactggacatgaggcgcgatgtccaagagatctttagaatgaccccgcacgaaaagcaagttatgatgttctcagcgactctgagcaaggaaattagatag

SEQ ID NO: 184790 - DNA, 717 bp, synthetic construct
  misc_feature 1..717: note = Description of Artificial Sequence: Synthetic coding sequence
  source 1..717: mol_type = other DNA
atggccgagaacgacgtggacaacgagctgctggactacgaggacgatgaggttgaaaccgccgccggtggagacggcgcagaggcacccgctaagaaagacgtgaaaggaagctatgtgtcaatccactcttcaggtttcagagacttcctcctgaaacctgaactgctccgtgccatcgtagattgcggctttgagcaccccagcgaagtccagcatgagtgcattcctcaggcgatcttagggatggatgtcctatgccaggcaaagagcgggatggggaaaacagccgtatttgttttagcaaccctccagcaacttgagccggtcaccgggcaggtctctgtgcttgtaatgtgtcacactcgagaattggctttccagatcagtaaagagtatgagcgattctctaaatatatgcctaacgttaaggttgccgtcttttttgggggactgagcatcaaaaaggacgaagaagtcctgaagaaaaactgtcctcacatcgtggttggcactcccggtcgaattttggccctggctcgcaacaagtcgcttaacctcaaacatataaagcatttcattttagacgagtgtgataagatgttggaacagcttgatatgcgcagggatgtgcaggaaatctttcgcatgacacctcacgaaaaacaggtcatgatgttttccgccactctcagtaaagagataaggccagtgtag

SEQ ID NO: 184791 - DNA, 564 bp, synthetic construct
  misc_feature 1..564: note = Description of Artificial Sequence: Synthetic coding sequence
  source 1..564: mol_type = other DNA
tgaagcgaggagcgggacatcggcaagcccatggagatcttcgtggatgatgaaaccaagttaacccttcatggattacaacaatactatgttaagctcaaggacaacgagaaaaaccgaaagctgttcgatctgctggacgtcctggaatttaaccaggttgtgattttcgtaaaaagcgtgcagcgctgtatcgctctcgcccagcttctcgtcgaacagaattttcctgccatcgccatccatagaggtatgccacaagaggaaagactgagtagatatcaacagttcaaagacttccagagacgcatcctcgtggccaccaacctttttggtaggggcatggatatcgagcgcgtcaacatcgcctttaattacgacatgcctgaagactctgacacatacctccatcgtgtggcaagagccgggcgctttggtactaaagggctggcaattacattcgtgtccgatgagaatgacgcgaagatcctgaatgacgtacaagaccgctttgaggttaacatttcagaactgcccgacgagattgatatcagctcctattag

SEQ ID NO: 184792 - DNA, 594 bp, synthetic construct
  misc_feature 1..594: note = Description of Artificial Sequence: Synthetic coding sequence
  source 1..594: mol_type = other DNA
atggccgagaacgacgtggacaacgagctgctggactacgaggacgacgaggtggagaccgctgccggcggagacggagcggaggcccctgccaagaaggacgtcaaaggaagctatgtctccatccatagctctggatttcgtgatttcctgctgaaacccgaattgctacgggccatcgttgattgtggcttcgagcaccccagtgaggttcagcacgagtgcataccccaggcaattcttggcatggacgtgctgtgtcaggccaaatccggcatgggcaaaacagccgttttcgtgctggccaccttgcagcagctggagccggtcacggggcaggtgtgcttttgtgactcacatttccctagaggagacaatgaggagctccatctcccctacgtgtcagtctatttccttccaaaagtgtccgtgctggtgatgtgtcacacgcgcgaactcgccttccagatcagtaaagagtacgagcgcttctcaaaatatatgcctaatgtgaaagtagctgtcttcttcgggggcctctccataaagaaggacgaggaagtgctcaaaaaaaattgcccccatattgtttag

SEQ ID NO: 184793 - DNA, 594 bp, synthetic construct
  misc_feature 1..594: note = Description of Artificial Sequence: Synthetic coding sequence
  source 1..594: mol_type = other DNA
atggccgagaacgacgtggacaacgagctgctggactacgaggacgacgaggtagaaacggccgccggcggcgatggtgccgaggccccagcaaagaaagacgtaaaaggaagctatgtcagtatccacagctctgggtttagggattttctgctgaagccggaactgctacgagctattgtggattgtggtttcgaacatccgagcgaagttcagcatgagtgcatcccgcaggctatcctgggcatggatgtgctgtgccaagctaaatccgggatgggcaagacagcagtctttgtgttggccactctgcagcaactcgagccagtgactggccaagtgtgtttctgtgactcccatttcccacgaggcgataacgaagagcttcacttgccatatgtgtcagtttacttcctccctaaggtgagcgtcctggtgatgtgccatactcgtgagttggcatttcagatcagtaaggaatatgagcgcttctccaaatatatgccaaatgtcaaagtggccgtcttcttcggcgggctgtccatcaaaaaagacgaagaagtgctcaagaagaattgcccccacatagtgtag

SEQ ID NO: 184794 - DNA, 411 bp, synthetic construct
  misc_feature 1..411: note = Description of Artificial Sequence: Synthetic coding sequence
  source 1..411: mol_type = other DNA
atgggcggcggccggcggccctacgacgtgttcttcagcaaggtgatggccgaaaatgacgttgataatgagttattggactacgaggacgacgaagttgaaaccgctgcagggggggacggcgccgaggccccagccaagaaggatgttaaaggctcatatgtctccattcattcaagcgggtttagggacttcctgctgaagcccgagctgttgcgggccatcgttgattgcggatttgagcatccaagcgaggtgcagcacgagtgtatcccccaggccatcctgggaatggacgttctatgccaggcgaagtccggtatggggaagacagcggtgttcgtgcttgccacactccagcagctcgagcccgtgacgggacaggtaagcgtcttggtgatgtgccactag

SEQ ID NO: 184795 - DNA, 1278 bp, synthetic construct
  misc_feature 1..1278: note = Description of Artificial Sequence: Synthetic coding sequence
  source 1..1278: mol_type = other DNA
atggccgagaacgacgtggacaacgagctgctggactacgaggacgatgaggtggagacggcggcaggaggggatggggccgaagcgcctgcaaaaaaggacgtcaaaggaagttatgtctctatccacagtagcgggttcagggactttttactcaaacccgaacttctgagggccatagtcgactgcgggtttgagcacccaagcgaggtacaacacgagtgtatcccccaggccatcttgggtatggacgtgctgtgccaggccaaatccggcatggggaagacagcggtcttcgtgctcgccactctgcaacagctggagcctgtaactgggcaggtatctgtactggtgatgtgtcacactcgggagttggcgttccagattagcaaagaatatgaacgattttctaaatacatgcctaatgtaaaagtggccgtgttcttcggtggattgagtatcaagaaggacgaggaagtgctgaaaaaaaattgcccgcacattgtggtgggcactcctggaagaatcctcgccctggcccggaacaaatccctgaacttaaagcacattaaacatttcattctggatgagtgcgacaaaatgctggaacagcttgatatgaggcgggacgtccaggagatcttcaggatgactccccatgaaaagcaggttatgatgttttcagctacactgtctaaagaaatccgtcccgtgtgccggaaattcatgcaggaccccatggagatcttcgtcgatgatgagacaaaactaactctgcacgggttacagcagtactacgtgaagctaaaagacaatgagaaaaatagaaaattatttgacctgcttgacgttcttgagtttaatcaagttgtaatattcgttaaatctgtgcagaggtgcattgcattggcacagctgctcgtggaacagaactttccagctatcgccatccacaggggcatgccccaggaggagaggctgtctcgttaccagcagttcaaagactttcagaggagaatcctggtggccacaaaccttttcggaagggggatggacatcgaaagagtaaatatcgcctttaattatgatatgcctgaagacagcgacacttatctccataggtgttacccgctttcaccctcaaggtggcccgaacaggccggactcgccccacgagcttggctctcacacctgtgtccaatgcgaatgatgcctcggtcatcaatgatgtgtaggatcgcgctgcgctcgatcctcgtgagttgcttgatgaggtag

SEQ ID NO: 184796 - DNA, 1287 bp, synthetic construct
  misc_feature 1..1287: note = Description of Artificial Sequence: Synthetic coding sequence
  source 1..1287: mol_type = other DNA
atggccgagaacgacgtggacaacgagctgctggactacgaggacgacgaggtcgagaccgcagccggcggagacggcgccgaggcccccgccaagaaggatgttaagggctcctatgtaagtatccactcctctggctttcgtgatttcttactcaaacctgagctccttagggcgattgtagattgtggtttcgaacacccctctgaggtgcaacacgagtgcataccacaagcgatattaggcatggacgtgctctgtcaggcaaaaagcggaatggggaagactgccgtgtttgttctcgctacactgcaacagctcgaacccgttacgggacaggtgagcgtactcgtgatgtgccacacacgagagcttgcttttcagatctctaaagagtatgaaaggttcagcaagtacatgcccaacgtgaaagtcgccgtgttcttcggaggcctaagcatcaagaaggacgaagaggttctcaaaaaaaattgtccacacattgtggtggggactcctggaaggatcctggcattggcccggaacaagagcctgaacctgaaacacataaaacacttcatcctggatgaatgtgataagatgctggaacagctggatatgagacgcgacgtgcaggagatcttccgcatgaccccccacgaaaaacaggtgatgatgttctcagcgaccctgagcaaggagatcaggccagtctgtcgcaagttcatgcaggaccccatggaaatttttgtagatgatgagacaaaattgaccctccacggtttgcaacaatattacgtcaaactgaaggataacgaaaaaaaccgcaaattgttcgacctgttagacgtgctggagttcaaccaagtggttatcttcgtaaaatctgtgcagcgctgcattgccctggctcagctcctggtggaacaaaacttcccggccattgccatacaccgcgggatgcctcaggaggagaggctatccagataccagcagttcaaagacttccaacgacgcatcctagtcgctactaatcttttcggaaggggtatggatattgaacgggtcaacattgcttttaactatgacatgccagaagattccgatacttacctgcatcgtgtggccagggccgggagattcgggactaagggtctggctattacgttcgtctctgatgaaaatgatgctaaaattttgaacgatgtgcaggaccgatttgaggttaatatctcggaactgccagatgaaattgacatttcttcctacatagaacaaacaagatag

SEQ ID NO: 184797 - DNA, 1287 bp, synthetic construct
  misc_feature 1..1287: note = Description of Artificial Sequence: Synthetic coding sequence
  source 1..1287: mol_type = other DNA
atggccgagaacgacgtggacaacgagctgctggactacgaggacgacgaagttgagaccgccgctgggggagatggcgcagaagcacccgccaaaaaggatgtcaaaggcagctacgtgtccatacacagcagtgggtttagggatttccttctcaagccagaactgcttagggccattgtggactgtgggttcgagcatccctccgaggtccagcacgagtgtattccccaggccatccttgggatggacgtgctctgccaagccaaatcggggatgggtaagaccgccgtgttcgtactggccacacttcaacagctcgaacccgttacagggcaggtaagtgtgttggtcatgtgccacacacgagaattagcgttccagatcagtaaggaatacgagcggttcagtaagtacatgccgaacgtcaaagtcgcagttttttttggggggctctcaattaagaaggacgaggaggtgttgaagaagaactgccctcatattgtggtgggtaccccaggtagaatcctggcactcgcacggaataagtctctcaacctgaaacacataaaacacttcattctcgacgagtgcgacaagatgctggagcaacttgacatgaggcgtgacgttcaggagattttcaggatgacaccgcacgaaaaacaagtgatgatgttcagtgcaacattatctaaggagataagaccagtgtgtcgtaagtttatgcaggaccctatggagatcttcgttgatgatgagaccaagctgacgctccatggtcttcagcagtactatgtgaaactgaaagataatgaaaagaatcgtaaactattcgatctattggacgtcctagaattcaaccaggttgtaatctttgtcaaaagcgtgcagagatgcatcgcccttgcccagctgctagttgagcagaattttccagctattgccatacatcgcggtatgccacaggaagaaaggcttagcagatatcagcagtttaaggatttccagcgccgaattttggtggcaacaaatctgttcggaaggggtatggacatcgagagagtcaacatcgcctttaactatgacatgccagaggactctgatacgtaccttcatcgagtggcccgggcaggccggttcggtacaaaagggcttgctatcacctttgtgtccgacgagaacgatgccaagatccttaacgacgtgcaggataggttcgaggttaacatcagcgaactgcccgatgagatcgatatttcatcctatattgaacaaactagatag

SEQ ID NO: 184798 - DNA, 738 bp, synthetic construct
  misc_feature 1..738: note = Description of Artificial Sequence: Synthetic coding sequence
  source 1..738: mol_type = other DNA
atgtggaccatgagcagctggaccatgaagatgatgcggtggcggcagcaactgggagaaatggggctccggcctctcccgcggcggatgtctcgagccccaatgagtccctctactgccctagccttcgtgaccagttgctcctcacagtcatgcagtggaccactgtcaacagtcgccctgtcaatccgccagaaggtggcggtattttttggaggattgtcaattaagaaggacgaggaagtgttaaaaaaaaattgtccccatattgttgtgggcacacccggtcggatcctggccctggctcggaacaaatctctcaacctgaaacatatcaagcatttcatcctcgacgaatgcgacaagatgctggagcagctggacatgaggagggacgtgcaagaaatctttcggatgaccccgcatgagaagcaggtaatgatgtttagtgccacgctgtctaaagagatccgccccgtgtgccgaaagtttatgcaggatccaatggagatttttgtggacgacgagaccaagctcactctgcatggactgcagcagtactatgtgaaactgaaagacaatgaaaaaaataggaagctcttcgatctgctcgacgtcttggaatttaatcaggtggtgattttcgtgaaatctgttcaaagatgcattgctttggcacagcttctcgtcgagcagaatttccccgcaattgcaatacaccgcggaatgccccagtag

SEQ ID NO: 184799 - DNA, 696 bp, synthetic construct
  misc_feature 1..696: note = Description of Artificial Sequence: Synthetic coding sequence
  source 1..696: mol_type = other DNA
atggccgagaacgacgtggacaacgagctgctggactacgaggacgacgaggtggaaactgccgcaggaggagacggcgcggaggcaccagccaagaaggacgtgaaaggatcgtatgtgtccatacactcaagtgggttccgggatttcctgctgaaacccgagttactccgagcaatcgtcgattgcggcttcgagcaccccagcgaggtccaacatgagtgcattcctcaggccatccttgggatggatgtcctatgccaggcgaagtccggcatgggcaagaccgcggtcttcgtgttggccacactccagcagctggaacccgtaacggggcaggtgtccgtactcgtgatgtgccacactcgggagctggccttccagatcagtaaggagtatgaacggttcagcaaatatatgccaaatgtgaaggttgcagttttttttggcggcctatcaattaaaaaggatgaagaggtactgaaaaaaaactgcccacacattgttgtcggcacccccggccggatccttgcgctcgccaggaacaagtccctgaacctgaagcacattaagcacttcatactggatgagtgtgataagatgttggagcagctggacatgcgccgcgacgtccaggagatctttcggatgactccgcatgagaaacaggtcatgatgttcagcgccacattgtag

SEQ ID NO: 184800 - DNA, 594 bp, synthetic construct
  misc_feature 1..594: note = Description of Artificial Sequence: Synthetic coding sequence
  source 1..594: mol_type = other DNA
atggccgagaacgacgtggacaacgagctgctggactacgaggacgacgaggtagaaacggctgccgggggagatggtgcagaggctccagcaaagaaggatgtgaagggaagttatgtcagcattcattcatcggggttcagggacttcttactaaagcccgaattgttgcgggccatagttgactgcggattcgaacatccttctgaagtgcagcatgagtgtatcccccaggccatcctaggcatggacgtcctctgccaagccaaaagtgggatgggtaagacagccgtattcgtgttggccactctgcagcagcttgaaccagtgacaggccaggtgtgcttttgcgactcacatttcccaagaggggacaatgaggaactgcatttgccctatgttagtgtgtacttcctaccaaaagtgagcgtgctggttatgtgccatactagagagttggccttccagatctcgaaggagtatgagcgattttctaagtacatgccgaacgtgaaggttgcggtattcttcggggggctctctattaaaaaggatgaagaggttttgaagaagaactgcccacacatcgtttag

SEQ ID NO: 184801 - DNA, 594 bp, synthetic construct
  misc_feature 1..594: note = Description of Artificial Sequence: Synthetic coding sequence
  source 1..594: mol_type = other DNA
atggccgagaacgacgtggacaacgagctgctggactacgaggacgatgaggtggagaccgcagctggcggtgatggagccgaagccccagccaaaaaggatgtgaaagggagctatgtatccatccactcctcaggcttccgcgactttctcttgaagcccgaattgctgcgcgcaatagtggactgtgggtttgagcacccttcagaagtacaacacgagtgtatcccacaggccattctggggatggatgtcctgtgccaggctaagagcggcatgggaaaaacagctgtattcgttctcgcaaccctgcagcagctggagcccgttactggccaggtctgtttctgcgactcacacttcccgcggggggacaatgaagagctgcaccttccctacgtatctgtgtactttctgcccaaagtgtcggtcttggtaatgtgccatacgcgtgagctggcattccagatttctaaggaatacgagcgattctcgaagtatatgccaaatgttaaggtggccgtcttctttggtggcctgagcatcaaaaaggatgaggaggttctgaaaaagaattgcccgcatatcgtctag

SEQ ID NO: 184802 - DNA, 540 bp, synthetic construct
  misc_feature 1..540: note = Description of Artificial Sequence: Synthetic coding sequence
  source 1..540: mol_type = other DNA
gtggccgtgttcttcggcggcctgagcatcaagaaggacgaggaggtgcttaaaaagaattgtccccatatcgttgtggggactcctggtagaatcctggctttggcacgcaataagtcacttaacctgaaacacatcaaacacttcatccttgatgaatgcgataaaatgctggaacaacttgacatgagacgcgacgtgcaggaaatcttccggatgacgcctcacgagaaacaagtaatgatgttcagcgccacgctgtccaaggaaatccgccccgtctgccgcaagttcatgcaggatcccatggagatatttgttgacgacgaaactaaactgacgttgcacggtctacaacagtattatgtaaagctgaaggacaacgaaaaaaatcgaaagctgttcgacctgttagacgtgctcgaattcaaccaagtggtaattttcgtgaagagcgtccagcgctgtattgccttggcacagctgttggttgaacagaactttccggcgatagcaatacatcgcgggatgccacagtag

SEQ ID NO: 184803 - DNA, 594 bp, synthetic construct
  misc_feature 1..594: note = Description of Artificial Sequence: Synthetic coding sequence
  source 1..594: mol_type = other DNA
atggccgagaacgacgtggacaacgagctgctggactacgaggacgacgaggttgagacagctgctggcggggatggcgccgaggcaccagccaaaaaggatgtgaaggggtcgtatgtctccatccactccagtggattccgagacttccttctgaaacccgaactccttagagctattgtggattgcggttttgaacatccatcggaagtacagcatgaatgcatcccccaggccatccttgggatggacgtattatgccaagctaagtcgggaatggggaaaacagccgtatttgtgctcgctactcttcaacagctcgaaccagtcacgggacaggtgtgtttctgcgacagtcatttccctcgcggtgacaacgaggagctgcacctgccctatgtgtcagtttacttcttacccaaagtgtccgtgctggtgatgtgccacactcgtgaactggcttttcagatttcgaaggagtacgagcgattctcgaaatatatgcctaatgtgaaagtagctgtgtttttcggaggtctctctataaaaaaggatgaggaggtgttgaagaagaattgcccccacatagtgtag

SEQ ID NO: 184804 - DNA, 564 bp, synthetic construct
  misc_feature 1..564: note = Description of Artificial Sequence: Synthetic coding sequence
  source 1..564: mol_type = other DNA
tgaagcgaggagcgggacatcggcaagcccatggagatcttcgtggatgacgaaaccaagctcaccctgcacggactacagcagtattatgtcaagctcaaggataacgagaagaatcgaaagttatttgatctgctggatgtgctggagttcaatcaggtggtgatttttgtgaagtccgtgcaacggtgcattgcgctggcacaattattggttgagcagaactttccggctatcgcaattcacagaggaatgccgcaggaggaacgcctgagcagatatcagcaatttaaggactttcagagacgcatactggtagcaaccaatctgttcggccgcggaatggatatagagagagtgaatatagctttcaattacgatatgcctgaggacagcgacacctacctgcacagagtcgcaagagctggacgattcggtaccaaaggcttagctatcacgtttgtgtcggacgaaaatgacgcaaagatccttaacgacgtgcaggacagattcgaagttaacataagtgagctgcctgatgaaatcgacataagttcatactag

SEQ ID NO: 184805 - DNA, 195 bp, synthetic construct
  misc_feature 1..195: note = Description of Artificial Sequence: Synthetic coding sequence
  source 1..195: mol_type = other DNA
tgagccaccctgcagcagctggagcccgtgaccggccaggtgagcgtgcttgtcatgtgtcacacacgtgagctggccttccagataagcaaggagtacgagcgtttcagcaagtatatgcctaacgtaaaagtcgctgttttcttcggcggccttagcataaagaaggatgaggaagttctgaagaaaaactag

SEQ ID NO: 184806 - DNA, 78 bp, synthetic construct
  misc_feature 1..78: note = Description of Artificial Sequence: Synthetic coding sequence
  source 1..78: mol_type = other DNA
tgagccaccctgcagcagctggagcccgtgaccggccaggtgagcgtgctggtcatgtgccataccagagagctatag

SEQ ID NO: 184807 - DNA, 66 bp, synthetic construct
  misc_feature 1..66: note = Description of Artificial Sequence: Synthetic coding sequence
  source 1..66: mol_type = other DNA
tgagccaccctgcagcagctggagcccgtgaccggccaggtgagcgtgctggttatgtgccactag

SEQ ID NO: 184808 - DNA, 870 bp, synthetic construct
  misc_feature 1..870: note = Description of Artificial Sequence: Synthetic coding sequence
  source 1..870: mol_type = other DNA
atggccgagaacgacgtggacaacgagctgctggactacgaggacgatgaggttgaaacagccgctggcggagacggggcagaagccccggctaaaaaggatgtgaaggggtcctatgtcagtatacattccagtgggttccgcgattttttgctgaagcccgagctccttcgagctatcgtggactgcggatttgagcacccatctgaggttcaacacgaatgtatcccccaggctatactgggcatggatgtgctttgtcaggctaaatccggcatgggtaaaacagcagtgttcgtgctagctaccctgcagcagttggaacctgttacagggcaggtgtctgtgctggtgatgtgccacactcgggaattggcgttccaaattagcaaagagtacgaacgcttctcaaaatacatgcccaatgtgaaggtggctgtgtttttcggcggtctgagcattaagaaagatgaagaggttctcaaaaagaattgccctcacatcgtggtaggcaccccaggcaggatcctggctctcgcccggaataagtcacttaaccttaaacacatcaagcactttatcttggatgaatgcgataagatgctcgagcagctggatatgaggagagatgtccaggaaatcttcaggatgaccccccatgagaaacaggtgatgatgttctctgcaactctgtctaaggagatcagaccagtgtgcaggaaattcatgcaggatcctatggagattttcgtggacgatgaaacgaaattgactctgcatggcctccagcaatattacgtcaagttaaaagacaatgagaagaaccgaaaactgttcgatctgctggatgtcctggagttcaaccagtag

SEQ ID NO: 184809 - DNA, 711 bp, synthetic construct
  misc_feature 1..711: note = Description of Artificial Sequence: Synthetic coding sequence
  source 1..711: mol_type = other DNA
atggccgagaacgacgtggacaacgagctgctggactacgaggacgatgaggtggaaacagccgccggcggtgacggagccgaagctcctgcaaagaaggatgtgaaagggagctacgtgtcaatacacagttcaggcttccgagactttctgctgaaaccggagctgttgcgtgcaatcgtggattgcgggtttgagcacccgtccgaggtccagcacgagtgtatcccccaggccatcttaggaatggatgtcttgtgccaagctaaatcaggaatgggcaagaccgctgtctttgtgttggccactctacagcagctcgagccggtcaccgggcaagtcagcgtgctggtgatgtgccacacaagagaactggcttttcagatcagcaaggagtacgaaagattctctaaatatatgcccaatgtgaaggtggccgtgttcttcggaggcttatctatcaaaaaggacgaggaagtgctgaaaaaaaactgtcctcacatcgtggtcgggacgcctgggagaatccttgccttggccaggaataaaagcttgaatttgaagcacattaaacattttattttggacgagtgtgacaaaatgttggaacagctcgatatgagacgggatgtacaggagatctttagaatgacccctcatgagaagcaggtgatgatgttcagtgccaccctttcaaaagaaatacggtag

SEQ ID NO: 184810 - DNA, 711 bp, synthetic construct
  misc_feature 1..711: note = Description of Artificial Sequence: Synthetic coding sequence
  source 1..711: mol_type = other DNA
atggccgagaacgacgtggacaacgagctgctggactacgaggacgacgaggtggagacagccgctggcggcgatggtgctgaagcccccgccaagaaagatgttaaaggtagttacgtgtccattcacagcagtggctttagggatttcctgctgaaaccggagctcctgcgggctatcgtggactgtgggtttgagcatcctagtgaagtgcagcacgaatgcattccgcaggctatcctaggcatggatgtcctttgtcaggctaaatcgggaatgggtaagaccgcagtcttcgtgctggctacattacagcaactggagccagtgaccggacaagtaagcgtactggtgatgtgccacactagagaactagctttccagatctcaaaggagtatgagcgttttagtaagtatatgcccaacgtgaaggtggctgttttttttggcgggctctccatcaagaaggacgaggaagtacttaagaagaattgtccacacattgttgttggaactccaggtcgcatactcgcccttgccaggaacaagtctctgaacctgaaacacatcaagcatttcattctggacgaatgtgacaagatgcttgagcagctcgacatgcgacgagacgtgcaggaaatcttccggatgacacctcatgaaaagcaagtcatgatgttctccgccaccttgagtaaagaaattcgctag

SEQ ID NO: 184811 - DNA, 978 bp, synthetic construct
  misc_feature 1..978: note = Description of Artificial Sequence: Synthetic coding sequence
  source 1..978: mol_type = other DNA
tgagccaccctgcagcagctggagcccgtgaccggccaggtgagcgtgttggtaatgtgccatactagggagctggcgtttcagatctctaaggaatacgaacggttctccaaatacatgcccaatgtaaaggttgcagtgttctttggaggactatccattaagaaggatgaggaggtgctgaaaaaaaattgtcctcacatcgtggtcgggacacctgggcgtatcctggctctggctcgcaacaaatctctcaacctgaagcacatcaaacacttcatattagacgaatgcgataagatgttagaacagctggacatgagaagagatgttcaagagattttccgcatgactcctcatgagaaacaggtgatgatgttttccgcaacacttagtaaggaaatccgcccggtttgcagaaagttcatgcaggaccctatggaaatttttgtggatgacgagactaagctgacacttcacgggctgcaacaatattatgtcaagttgaaagacaatgaaaagaaccggaaattgttcgacctgctcgacgtgctggaatttaatcaagtcgttatttttgttaaaagcgtgcagcgctgcatagccctggctcaattactggtggagcagaactttcccgcaatcgctatccatcggggcatgccccaggaggagcgactctctagataccagcagttcaaggacttccagcggcggatactggtggccaccaatttgttcggtcgcggaatggatattgagagggtcaacatcgccttcaactacgacatgcccgaagattccgacacttacctgcatcgatgttaccctctgagcccatctagatggccagagcaagccgggctcgccccaagggcttggctctcccacttgtgtcccatgcgtatgatgcctaggtccagcatgatgtgcagaatcgcacttaggagcattttagtgagttgtctgatgcggtag

SEQ ID NO: 184812 - DNA, 717 bp, synthetic construct
  misc_feature 1..717: note = Description of Artificial Sequence: Synthetic coding sequence
  source 1..717: mol_type = other DNA
atggccgagaacgacgtggacaacgagctgctggactacgaggacgacgaggtggagacagcagccggaggcgatggagccgaggcacccgcaaaaaaagacgtcaaaggatcctacgtgagcatccattcctcaggctttagagacttcctgttaaaacctgaactactgcgggctatcgtcgactgcggctttgaacaccctagcgaagtgcagcacgaatgcataccacaggctatcctggggatggatgtgctgtgccaggctaaatctggtatgggcaagacagccgtttttgtcctggcaaccctgcaacagctcgaacctgttacgggccaggtgtccgttctggtcatgtgccatactcgagagctcgcatttcagatttccaaagaatatgagagattcagcaagtacatgcccaatgtgaaggtggcagttttctttggcggactcagcataaagaaggatgaggaggttctgaaaaaaaattgtccgcacatagtagtgggaactcctgggcgcattctggcgctggcacggaataagtcgttgaatctaaagcacattaaacactttattctggatgagtgcgataagatgctggaacagctcgacatgagaagagatgtccaagagatatttagaatgacgccgcatgagaagcaggttatgatgttttccgcaaccctttcgaaggaaatccgccctgtttag

SEQ ID NO: 184813 - DNA, 717 bp, synthetic construct
  misc_feature 1..717: note = Description of Artificial Sequence: Synthetic coding sequence
  source 1..717: mol_type = other DNA
atggccgagaacgacgtggacaacgagctgctggactacgaggacgacgaggtggaaacggcggctggcggagatggagcagaagcgccggccaagaaagacgtgaagggctcttatgtgtccatacacagctctggcttccgggattttctgctgaaacccgaactgctgcgcgctatcgtcgattgtggattcgaacacccttctgaagtacaacatgagtgtatcccccaggctatcttaggtatggatgtgctctgtcaggcaaaatccggaatgggaaagacggccgtgtttgtgcttgcaactcttcaacaattagagcctgtgacaggtcaggtgtctgtgttggtcatgtgtcatacccgggaattagcattccagattagtaaagagtacgaacggttttcaaaatacatgcccaatgtgaaggtggccgtgttcttcggtggacttagcataaagaaggatgaggaagtgctgaagaagaactgtccacacatcgtcgttgggactcctggacggattctggcactagcacgaaacaaatcattaaacctaaagcacatcaaacactttatattagatgagtgtgataaaatgcttgagcagctcgatatgaggcgggatgtgcaggaaattttccgaatgacaccgcatgaaaagcaggtgatgatgttctccgctaccctgtctaaagagatcagacccgtctag

SEQ ID NO: 184814 - DNA, 870 bp, synthetic construct
  misc_feature 1..870: note = Description of Artificial Sequence: Synthetic coding sequence
  source 1..870: mol_type = other DNA
atggccgagaacgacgtggacaacgagctgctggactacgaggacgatgaggtcgaaactgcagccggcggcgacggtgcggaagcgccagccaaaaaggacgtgaaagggagttatgtcagtatccatagctcaggattccgcgactttctgttgaagcccgagctgctgagggcaattgtcgactgtggctttgagcatccatccgaagtccagcacgagtgcataccgcaggcaattttgggaatggacgtgctatgccaggcgaagagcggaatgggcaaaaccgctgtgtttgtgctagctactttgcagcagcttgagcccgtgactgggcaggtgagtgttttagttatgtgccatactcgggagctagcatttcagatatccaaggaatatgaacgcttttcaaagtacatgcccaacgtgaaagttgccgtgttctttgggggcctgtccatcaaaaaagacgaggaggtgctgaaaaaaaactgtcctcacatcgtagttggaaccccagggcggatcttggccctcgcgcggaacaagtccttgaatctgaagcacattaagcacttcatcctggacgagtgcgacaagatgttggagcagctcgatatgaggcgagacgtgcaggaaatcttcaggatgaccccccatgagaagcaggtcatgatgttttcagctacgctgagcaaggaaattcgccccgtgtgcagaaaattcatgcaggatccaatggaaattttcgttgacgatgagacaaagctcacattacatggtctgcagcaatattacgtgaaactgaaagataacgaaaagaacaggaaattgttcgatttactggacgtactggaattcaaccagtag

SEQ ID NO: 184815 - DNA, 1278 bp, synthetic construct
  misc_feature 1..1278: note = Description of Artificial Sequence: Synthetic coding sequence
  source 1..1278: mol_type = other DNA
atggccgagaacgacgtggacaacgagctgctggactacgaggacgacgaggtggagactgctgccggaggagacggcgccgaagctcccgctaagaaggatgtgaagggatcttacgtgtctatccactcctccggattccgggattttctgctcaagccggaattgctcagggccatcgtggactgcgggttcgaacacccttccgaggttcaacacgagtgcatcccgcaggcgatccttggtatggacgtcttgtgccaggccaagagcgggatgggcaaaacggcagtgttcgtgctggccaccctccagcagctggagcctgtgacaggccaggtcagtgtccttgtgatgtgccatacccgcgagttggcatttcagataagtaaggagtacgagcgattttctaagtatatgcccaacgtcaaggtggcagtctttttcggcggtttgagcattaagaaagacgaggaggtgctcaaaaagaattgtccacacatcgttgtggggacacccggacggatcctagccctcgctagaaataagtccctgaatctgaagcatattaagcactttatcctagacgagtgtgacaagatgcttgagcagctggacatgagaagggacgtccaggaaatcttccgcatgacacctcacgagaaacaggtcatgatgttttcagccacactgtccaaggagatcagacctgtatgtcgtaagtttatgcaggatcctatggagatcttcgtcgatgatgaaaccaaactgaccctacacgggctgcagcaatactatgtgaagttaaaggataatgaaaagaatagaaaactattcgacctcctggacgtcctggagttcaaccaggtagtaatttttgtcaagtccgtgcagagatgtatagcactggcacaactgctagtggagcaaaatttccccgctattgccatccaccggggcatgccccaggaggagcgcttaagcaggtatcagcaattcaaggactttcagagaagaatcctggttgctactaacctgttcgggagaggaatggacatcgagcgggtgaacatagccttcaactatgacatgccggaggacagtgatacctatctccaccggtgctacccgctgtctccttccaggtggccagaacaggccggcctggccccacgggcttggctgagtcacctctgccccatgcgcatgatgccgcgtagctccatgatgtgtcggatcgctttgcgcagcattttggtgtcctgtttaatgcgctag

SEQ ID NO: 184816 - DNA, 411 bp, synthetic construct
  misc_feature 1..411: note = Description of Artificial Sequence: Synthetic coding sequence
  source 1..411: mol_type = other DNA
atgggcggcggccggcggccctacgacgtgttcttcagcaaggtgatggccgaaaacgatgtggacaacgaattgctggactacgaggatgacgaggtggagaccgccgctgggggcgacggagcagaggcacctgccaagaaggacgtgaaggggagttacgtgtctatacacagcagcggctttagggacttccttctcaagcctgaactgctgcgtgccatcgtggattgcggattcgagcatcccagtgaggtgcaacacgaatgtatcccccaggcaatcctcggaatggacgttctatgccaggctaagtctgggatgggaaagacagcggtttttgttctcgctacccttcagcagctggaacccgtgactggacaggtgtcggttctggtcatgtgccactag

SEQ ID NO: 184817 - DNA, 564 bp, synthetic construct
  misc_feature 1..564: note = Description of Artificial Sequence: Synthetic coding sequence
  source 1..564: mol_type = other DNA
atgggcagcagccacatcggcggcctgagcatcaacgagcggcggtgttcagcttcactcggacttgttatggccgaaaacgacgttgataacgagctccttgactatgaggatgacgaggtagagacagctgcaggtggggatggcgctgaggcgccagcaaagaaagacgttaagggctcttatgtgtctatccacagctccggcttcagggatttcctgcttaaaccagagcttctcagagcaatcgtggattgcggattcgagcacccctctgaggtgcaacatgagtgcattccacaagctatcctgggcatggacgtcctgtgtcaggccaaatccggtatgggaaagaccgccgtatttgtcctagctacactccagcagctcgagcccgtgactgggcaggtgagtgtactcgtcatgtgccatactagggaactggcctttcagataagcaaagagtatgaaagatttagcaaatacatgcccaacgtgaaggtggccgtgtttttcggcggtctgagtattaaaaaagacgaggaggtccttaaaaagaattag

SEQ ID NO: 184818 - DNA, 399 bp, synthetic construct
  misc_feature 1..399: note = Description of Artificial Sequence: Synthetic coding sequence
  source 1..399: mol_type = other DNA
atggccgagaacgacgtggacaacgagctgctggactacgaggacgatgaagttgagactgccgcagggggggacggggcagaagcccccgcaaaaaaagatgtgaagggctcatatgtgagcatacactcctccggattccgcgattttctactgaagcctgagcttttacgtgctatcgtggactgtggattcgagcacccctcggaggtccagcatgaatgcatcccccaggccattctggggatggatgtgctctgtcaggctaagtctggtatgggcaagacagctgtttttgtcctggccaccctgcagcaacttgaacccgtgactggacaagtctgtttctgcgacagccattttccacggggcgataacgaggaacttcatctaccctag

SEQ ID NO: 184819 - DNA, 870 bp, synthetic construct
  misc_feature 1..870: note = Description of Artificial Sequence: Synthetic coding sequence
  source 1..870: mol_type = other DNA
atggccgagaacgacgtggacaacgagctgctggactacgaggacgatgaagtggaaacagccgctgggggagacggggcagaagctcctgctaaaaaggacgtgaagggatcatatgtgagcatacattcatctgggtttcgcgatttcctacttaaacctgaattgttgagggccatcgtcgactgcgggttcgagcacccttcagaagtgcagcacgaatgtataccccaagcaatcctgggaatggacgtgctctgtcaggccaaatccggaatggggaagacggccgtgttcgttctggccactctccaacagctagagccagtgacaggtcaggtgagcgttctggtgatgtgtcatacgcgtgagctggccttccagatctccaaggagtatgagcggttttccaaatacatgcccaatgtgaaggtggcagtattcttcggaggactgagtataaagaaggacgaggaagtcttaaagaaaaactgcccacacatcgtggttggaactcccggccgcattctggctcttgcacggaataagagtctcaacctgaagcatataaagcatttcattttggatgagtgtgacaaaatgctggagcagcttgacatgcgtcgggatgtgcaggaaatatttcggatgactccccacgagaaacaggttatgatgtttagcgctaccctttcgaaagagatacggccagtgtgcaggaagttcatgcaggatccaatggagatttttgtcgatgatgaaacaaaactgactctgcacggactccagcagtactatgtgaaactaaaagacaacgagaagaatagaaagttgtttgacctgttagacgtgctggaattcaaccagtag

SEQ ID NO: 184820 - DNA, 1287 bp, synthetic construct
  misc_feature 1..1287: note = Description of Artificial Sequence: Synthetic coding sequence
  source 1..1287: mol_type = other DNA
atggccgagaacgacgtggacaacgagctgctggactacgaggacgacgaggtcgagaccgcagctgggggcgacggcgccgaggctcccgccaaaaaagacgttaagggtagctatgtgagcatccactccagcggcttcagggatttcctgctgaagccagaactgttgcgcgcaatcgtggattgcggatttgaacatcctagtgaagtgcagcacgagtgcataccccaggctatactcggaatggacgttctctgtcaggctaagagcggtatggggaagacggcagtctttgtgctggcgaccctgcaacagttagagccagtcacaggccaagtgtctgtgctggtgatgtgccacacaagagaactggccttccagatcagcaaagagtatgagaggttttccaaatacatgcccaatgttaaagtcgccgtgtttttcgggggactgagcattaagaaggatgaggaagtgctgaagaaaaactgtccacacatagtggtcggaacacctggaagaatattagcattggcaaggaataagagtctgaacctcaagcacataaaacactttatacttgacgaatgcgacaaaatgttagaacagcttgacatgcggcgcgatgtacaagagatattccggatgaccccccacgaaaagcaggtcatgatgttttcggctacactctctaaagagattcggccagtgtgtaggaagtttatgcaggaccctatggagatttttgttgatgacgagaccaagttgacactgcacggattgcagcaatactatgtgaagctgaaggataacgaaaagaaccggaagcttttcgaccttttggatgtcctggagttcaatcaggtggtcatcttcgtcaagtcagtgcaaagatgtatcgctcttgcacagctgttggtggagcagaatttcccagctatcgccatacatagggggatgccccaggaagagagactctccaggtatcaacagttcaaagacttccaaaggaggattctggtcgctaccaacctgttcggcagaggtatggacattgagagggttaatatcgcttttaattacgacatgccagaagacagcgacacgtaccttcatagagtggcacgggctggacgcttcggcactaaggggcttgctattactttcgttagtgatgaaaacgacgcaaagatcttaaacgatgtgcaagatcggttcgaggttaacatatccgagctgccagacgaaatcgatattagttcatacatagagcagaccagatag

SEQ ID NO: 184821 - DNA, 564 bp, synthetic construct
  misc_feature 1..564: note = Description of Artificial Sequence: Synthetic coding sequence
  source 1..564: mol_type = other DNA
atgggcagcagccacatcggcggcctgagcatcaacgagcggcggtgcagcgcgtcgctgggtttggttatggcggagaatgatgtggacaacgaactgctggactacgaggacgacgaggttgagacagccgccggaggcgatggcgctgaggctccagcgaagaaagatgtcaagggctcgtacgtgtcaattcacagctccggattccgagacttcctgttgaagcctgaacttctcagggccatcgtggactgtggattcgagcacccttcggaagtgcagcacgaatgcattcctcaggctattctcggcatggatgtcctttgtcaggctaaatctgggatgggtaaaaccgcagtgtttgttctcgccacgcttcagcagctcgagccagtgactgggcaagtgtccgtgctagtcatgtgccatacaagggaactggcctttcagatatctaaggaatacgagcgcttctccaagtatatgcccaatgtcaaggtggccgtattcttcggtggcctctccattaaaaaggacgaggaagtcttgaaaaagaattag

SEQ ID NO: 184822 - DNA, 291 bp, synthetic construct
  misc_feature 1..291: note = Description of Artificial Sequence: Synthetic coding sequence
  source 1..291: mol_type = other DNA
atggccgagaacgacgtggacaacgagctgctggactacgaggacgacgaagtggaaactgccgccgggggggacggtgctgaagctccagcaaaaaaggatgtaaagggttcttatgtgtctattcactcatccggatttagagatttccttctgaagccagagctactccgcgccatagtggattgcggcttcgaacatccaagcgaggtccagcatgagtgcatcccgcaggccattttaggaatggatgtactctgccaagctaaatcagggatgggaaaaacgtag

SEQ ID NO: 184823 - DNA, 564 bp, synthetic construct
  misc_feature 1..564: note = Description of Artificial Sequence: Synthetic coding sequence
  source 1..564: mol_type = other DNA
atgggcagcagccacatcggcggcctgagcatcaacgagcggcggtgcagtgcctcactcggtctggtcatggccgagaacgacgtggataatgagctcttggattatgaggacgacgaggtcgaaactgcggcgggaggcgacggcgctgaggcgcccgcaaagaaagatgttaaaggctcctatgtttctatccattcgtcagggttccgtgacttcttgctaaagccagagctgttacgagcaattgtcgactgtgggttcgagcaccccagtgaagtgcagcacgaatgcattcctcaggccattctaggcatggatgtgttgtgtcaggcaaagtccggcatggggaaaaccgcagtatttgtcctcgccacgctccagcagttagagcctgttactggacaagttagtgtgctggtgatgtgccacacacgtgagctggctttccagatttcaaaggaatacgagcggttctcaaagtatatgcccaatgtgaaggttgccgttttcttcggtggactttctatcaagaaggatgaggaagtgcttaaaaaaaattag

SEQ ID NO: 184824 - DNA, 594 bp, synthetic construct
  misc_feature 1..594: note = Description of Artificial Sequence: Synthetic coding sequence
  source 1..594: mol_type = other DNA
atggccgagaacgacgtggacaacgagctgctggactacgaggacgacgaagttgaaaccgccgcaggcggcgatggagctgaggcccctgcaaagaaggacgtgaaaggtagctatgtgtccatccacagtagcggctttcgggacttcctgcttaagcctgaactgctaagagccatcgtcgattgtggtttcgagcatccaagcgaagtccaacatgaatgcatcccccaggcaattctcgggatggacgtgctgtgccaggcgaaatccggaatgggtaagaccgctgtgtttgtgttggccactcttcaacaactcgaaccagttaccggccaggtatgtttttgtgattctcacttcccccggggagacaacgaggagctccacctgccatacgtttctgtttactttctgccaaaagtatctgttcttgtaatgtgtcacacacgcgagctcgcctttcagatctctaaagagtatgagcgattctccaagtatatgccaaacgtcaaggtggcagtgttctttggaggcttaagcatcaagaaggacgaggaagtattgaaaaagaattgtccacatatagtttag

SEQ ID NO: 184825 - DNA, 291 bp, synthetic construct
  misc_feature 1..291: note = Description of Artificial Sequence: Synthetic coding sequence
  source 1..291: mol_type = other DNA
atggccgagaacgacgtggacaacgagctgctggactacgaggacgatgaagttgagacagccgccggaggagacggcgctgaagccccggcaaaaaaagacgtcaagggtagctatgtgtcgattcattctagtggttttagagatttcctgctgaaacccgagctcttacgcgccatagtcgactgtggcttcgagcatccgagcgaggtccaacatgagtgcattccacaagcaattcttggaatggacgtgctgtgccaagccaagtcagggatgggtaagacctag

SEQ ID NO: 184826 - DNA, 696 bp, synthetic construct
  misc_feature 1..696: note = Description of Artificial Sequence: Synthetic coding sequence
  source 1..696: mol_type = other DNA
atggccgagaacgacgtggacaacgagctgctggactacgaggacgatgaggtggagaccgcagcaggcggggacggggcggaggctccagccaagaaagacgtaaaggggtcctatgtgtctattcactcctctggattccgcgacttcctcctgaagccagagctcctcagagctattgtcgactgcggttttgagcacccaagcgaagttcagcatgagtgtatcccacaggcaatcctggggatggacgtcctttgccaagccaaatcaggtatggggaagacagcggtgttcgtactcgctaccctccaacagcttgagcccgtaacaggacaggtaagcgttctcgtgatgtgccacacgagagaactcgcgtttcaaatttcaaaagagtacgaacgattctcaaaatacatgcccaacgtgaaggtagcggtttttttcgggggcttgtccattaaaaaagatgaagaggtgctgaagaaaaactgtccccacattgtagtaggcaccccagggagaatactcgccctggcgaggaacaagagcctcaatctcaaacacattaaacacttcatcttagacgagtgcgataagatgctggagcagttggacatgcggcgtgatgtacaggaaatttttcgtatgacccctcacgaaaagcaggtgatgatgttttccgccaccctgtag

SEQ ID NO: 184827 - DNA, 696 bp, synthetic construct
  misc_feature 1..696: note = Description of Artificial Sequence: Synthetic coding sequence
  source 1..696: mol_type = other DNA
atggccgagaacgacgtggacaacgagctgctggactacgaggacgatgaggtggagacagccgcgggcggggatggagccgaagctcccgccaagaaggatgtgaaaggcagctacgtgagcatacactccagcggtttccgagattttctcctcaagcccgagctgttgagagccatcgtggattgtggattcgagcatccctcagaggttcaacacgagtgcatccctcaggcaatccttggaatggatgtgctgtgccaggcgaagagcggcatgggcaagacagcggttttcgtgctggccacgctacaacaactagagccagttacgggccaagtgtcagttcttgttatgtgccacacacgcgaacttgctttccagataagcaaggagtatgagcgcttcagtaagtacatgccaaacgtgaaggtggcagtgttcttcgggggactgagcatcaaaaaggatgaagaggtattgaagaaaaactgtccgcacattgtcgtgggcacaccagggcgcatcctggccctggcacgcaacaagtcgctcaacctgaaacacataaaacattttatcctggatgaatgcgataaaatgctggagcagctggatatgcgtagagatgtccaggagattttccggatgacaccacacgagaagcaagtgatgatgttttccgcgaccttgtag

SEQ ID NO: 184828 - DNA, 717 bp, synthetic construct
  misc_feature 1..717: note = Description of Artificial Sequence: Synthetic coding sequence
  source 1..717: mol_type = other DNA
atggccgagaacgacgtggacaacgagctgctggactacgaggacgacgaagttgaaacagccgccgggggggatggcgccgaagcgcctgcaaagaaagacgtaaagggaagctacgtcagcattcatagttccggctttagagactttttactgaagccagagctgctcagagctatcgtagattgtggattcgagcacccctccgaggtgcagcacgagtgtatccctcaggccatactaggcatggatgtgctgtgtcaagcaaaaagcggaatgggaaagacagccgttttcgtccttgctaccctccagcagctggaacctgtcactggccaggtctctgtgctggtaatgtgtcatacgcgggaactcgcttttcagatcagcaaggaatacgaacgtttttccaaatacatgcctaacgtgaaggtggccgtgttttttggcggactgagtattaagaaggacgaagaggtgctgaagaagaattgcccgcacatcgtggtcggaactcccgggagaatactcgcacttgcaaggaacaaatctctcaatctgaagcacattaagcattttatactagacgagtgtgacaaaatgctcgaacaactagacatgcgcagggatgtgcaagaaattttcaggatgacaccgcacgagaaacaggtgatgatgttcagcgctacgctgtcaaaggaaataaggccagtctag

SEQ ID NO: 184829 - DNA, 1287 bp, synthetic construct
  misc_feature 1..1287: note = Description of Artificial Sequence: Synthetic coding sequence
  source 1..1287: mol_type = other DNA
atggccgagaacgacgtggacaacgagctgctggactacgaggacgacgaggtggaaactgccgctggcggcgacggggccgaagcgccggctaagaaggatgtgaaaggctcctacgtttctattcattcttctggtttccgggacttcttgctcaaacccgagctcctccgagcaatagttgattgtggttttgaacacccctccgaggtccagcacgagtgtatcccacaggctattctcgggatggacgtgctctgccaggctaaaagcgggatgggtaagactgctgtctttgtcctggccacactgcagcagcttgagcccgtgacaggtcaggtgtccgtgcttgttatgtgtcacactagggagctggcgttccaaattagcaaagagtatgagaggtttagcaaatacatgcctaatgttaaagtcgccgttttcttcggaggcctgagtataaaaaaggacgaagaagtgttgaagaaaaattgtccccacatcgttgtggggactcccggcaggatactggctctcgccaggaataagtctctcaaccttaaacacatcaagcacttcatcctggatgaatgtgataagatgctggagcagttagacatgcgcagagacgtccaggagatcttccgaatgacaccccatgaaaaacaagtaatgatgttcagtgctaccctctccaaagaaattaggcctgtgtgtaggaagttcatgcaggatcccatggaaatctttgtcgatgacgaaacgaagttaacactgcatgggctgcaacagtattacgtgaaacttaaagacaacgagaaaaacagaaagctttttgatctcctggatgtactggagtttaaccaagtggtgatctttgttaagtcagttcagaggtgcattgccctcgcccagctgctagtcgagcaaaactttcccgctattgcaatccacagagggatgccccaggaggagaggctgtccagatatcagcagttcaaggacttccaaagacgcattctagtggccacaaatttattcgggagaggcatggatatcgagagggtaaacattgcctttaactacgacatgcccgaggattccgacacttacctccaccgtgtcgcccgtgccggacgattcggaaccaaaggcctcgcaattacattcgtgtccgacgaaaatgatgccaagattctgaacgacgtgcaggaccgcttcgaggtcaacatcagcgagcttcccgacgagattgacataagttcatatatcgagcagactaggtag

SEQ ID NO: 184830 - DNA, 564 bp, synthetic construct
  misc_feature 1..564: note = Description of Artificial Sequence: Synthetic coding sequence
  source 1..564: mol_type = other DNA
tgaagcgaggagcgggacatcggcaagcccatggagatcttcgtggacgacgagacaaagcttaccttacacggtctccagcagtattatgtgaaacttaaagacaacgaaaaaaaccggaaactctttgatctcttggatgttctggagtttaatcaggtggtgattttcgtgaaatcagttcaaaggtgcatcgctttagcacagctgttggtggagcaaaatttccccgcaatcgccatccacagggggatgccccaggaggagaggctcagccggtatcagcagttcaaagatttccagaggcggatacttgtagctaccaacctctttgggcgaggcatggacatcgagcgggtcaatattgcctttaattatgacatgccagaggactcagacacctacctgcatagagtagcaagagctgggagatttggcacgaagggcctggctattacttttgtgtctgacgaaaacgacgccaagattctgaacgatgttcaggatcggttcgaggttaacatatcggaattacctgatgaaatagacattagttcctattag

SEQ ID NO: 184831 - DNA, 564 bp, synthetic construct
  misc_feature 1..564: note = Description of Artificial Sequence: Synthetic coding sequence
  source 1..564: mol_type = other DNA
atgggcagcagccacatcggcggcctgagcatcaacgagcggcggtgctccgcttctctgggactggtaatggccgaaaatgatgtagataacgaacttttggattatgaagacgatgaagtggaaacagccgctggaggagatggggcagaggctccagccaaaaaagacgtcaagggaagctacgtgtccattcactctagtggtttcagagactttctgctcaaaccagaactactgcgggccattgtcgattgcggtttcgaacaccctagcgaagtccagcacgagtgtatcccacaggctattctaggtatggacgtactctgccaggcgaagtcggggatggggaagactgccgtgttcgtgcttgctaccctgcagcagctggagcctgtcaccggacaggtgagtgtgctcgtcatgtgccacacaagagaacttgcctttcagatctcaaaagagtacgagaggttttcgaagtatatgcctaacgtgaaagtggccgtcttttttgggggcctctccataaaaaaggatgaagaagtgcttaaaaagaactag

SEQ ID NO: 184832 - DNA, 717 bp, synthetic construct
  misc_feature 1..717: note = Description of Artificial Sequence: Synthetic coding sequence
  source 1..717: mol_type = other DNA
atggccgagaacgacgtggacaacgagctgctggactacgaggacgacgaggttgagaccgccgcagggggtgacggcgcagaggcaccagcaaagaaggacgtgaagggctcatatgtgtccatacattcatctggtttccgggatttcctgctcaagcccgaactcctaagagccatagtcgactgtgggtttgaacacccttcggaggttcagcacgagtgcatcccacaggccatcctggggatggacgttctgtgccaggccaagtctggtatggggaagacagctgtttttgtcctcgctacactccagcaactcgaaccagtgaccggccaggtttctgtccttgtgatgtgccacacccgcgaactggcttttcagattagcaaagagtacgaaaggttctccaaatacatgccgaacgtcaaggtagcagttttttttgggggcctgagcattaaaaaggacgaagaagtgctaaagaagaactgcccccatatcgtggttggaactccaggcagaattctcgcccttgccagaaataagtccctgaatctgaaacacatcaaacacttcattttggatgaatgtgacaaaatgctggagcagctcgacatgcgaagagatgtgcaggaaattttccgcatgaccccacacgaaaaacaggtgatgatgtttagtgcaacactcagtaaggagattagaccagtttag

SEQ ID NO: 184833 - DNA, 738 bp, synthetic construct
  misc_feature 1..738: note = Description of Artificial Sequence: Synthetic coding sequence
  source 1..738: mol_type = other DNA
atgtggaccatgagcagctggaccatgaagatgatgcggtggcggcagcagctaggcgagatgggcctcagaccgttgccacgaaggatgtccagggccccaatgagcccgagcaccgctctcgcttttgttacttcttgctcctcccaatcgtgctccggaccgctctccacagtagccctgtccattaggcaaaaagtggccgtattcttcggcggtctgagtatcaagaaagatgaggaggtgctgaagaaaaattgtccccacatcgtggtgggcactccagggcgaattttagccctggccaggaacaagagcttgaatcttaaacacattaaacactttattctggacgagtgtgataagatgctggagcagctagacatgcggagggatgtgcaggagatctttcggatgacccctcacgagaagcaagtgatgatgttcagcgctactctgtcaaaggaaatcaggccagtctgccggaagttcatgcaagatccaatggaaatctttgtagatgatgaaacaaagctcacccttcacggcttacagcagtattatgttaagctgaaggacaacgagaaaaatagaaagctgttcgacctgctcgacgtactcgagtttaaccaggttgttattttcgtcaagtctgtccagcggtgtatagcactagcccagctactagtggaacagaacttccctgcgatagccattcatcggggaatgccccaatag

SEQ ID NO: 184834 - DNA, 1278 bp, synthetic construct
  misc_feature 1..1278: note = Description of Artificial Sequence: Synthetic coding sequence
  source 1..1278: mol_type = other DNA
atggccgagaacgacgtggacaacgagctgctggactacgaggacgatgaggtggagactgctgcgggcggtgacggcgctgaggcacccgcaaagaaagatgtcaaggggtcctacgtgtccattcatagctccggtttcagagacttcttgcttaagccagaactgctgagggccatagtcgattgcggttttgagcatccatccgaggttcaacatgagtgcataccccaggctatcctcgggatggacgtattgtgccaagcaaagtccgggatgggtaaaactgctgtattcgttctggcaacactgcagcagttggagcccgtcaccggacaggtatccgtcctagttatgtgtcacaccagagaactagccttccagataagtaaggagtatgagcggttctccaagtatatgcctaatgtgaaggtggcagtgttttttgggggtcttagcatcaagaaggatgaggaagtgctgaagaagaactgtccccacatagtggtggggacaccgggtagaatcctggcactagccagaaacaaatctctgaacctgaaacatatcaaacatttcatccttgatgaatgtgacaagatgttagagcagcttgatatgagaagagatgttcaggaaattttcaggatgacaccccatgagaagcaggtgatgatgttctccgctacactgagcaaggagattcggccagtgtgtcgaaagtttatgcaggaccctatggagatctttgtagatgacgaaacaaagctgactctgcacgggctgcaacaatattacgttaagctcaaggacaacgaaaagaatagaaagctgtttgacctgctcgatgtcctggaattcaatcaggttgtgatattcgtcaaatcggtacagcgctgcatagcactcgctcaacttcttgtcgaacagaatttccctgccatagcaatccatagagggatgcctcaggaggagcggctttcccgataccaacagtttaaagacttccagcgcagaatcttagtggccaccaacctctttgggaggggcatggacatcgagagagtgaacatcgccttcaattacgacatgcccgaggatagcgacacttacctgcataggtgttacccgctctcaccctcgcggtggcctgagcaggccggtcttgcccccagagcatggctctctcacctgtgtcctatgcgaatgatgccccgttccagtatgatgtgccgcatcgcactgcgctcgattctggttagctgcttaatgaggtag

SEQ ID NO: 184835 - DNA, 711 bp, synthetic construct
  misc_feature 1..711: note = Description of Artificial Sequence: Synthetic coding sequence
  source 1..711: mol_type = other DNA
atggccgagaacgacgtggacaacgagctgctggactacgaggacgatgaggtcgaaacagccgctggcggagacggtgccgaggcccctgccaagaaggatgtgaaggggtcctacgtctcaatacattcctctggctttagagacttccttttgaaaccggaacttctgagggccatcgtggactgcggattcgagcaccccagtgaggtgcagcacgagtgcataccacaagcaatactcgggatggacgtgctgtgccaggcgaaatcaggcatgggtaaaacggcagtctttgtgttggctaccctgcaacagttggagcccgtaactggccaggtctctgtgctcgtgatgtgtcacactagggaactagctttccagatatccaaggaatatgagagattttctaagtacatgcccaatgtgaaagtggcagtcttcttcggcggtctaagcatcaagaaagacgaggaagtactgaaaaagaactgtccccatatcgttgtcggcactccgggaagaattttggccctggcccgaaacaagtccttgaacctgaaacacatcaaacactttatcctggacgaatgtgacaaaatgctggagcagcttgacatgcggcgtgatgtacaggagatctttcggatgactccacatgagaagcaagtgatgatgtttagcgcgacactgagtaaagagattcgctag

SEQ ID NO: 184836 - DNA, 738 bp, synthetic construct
  misc_feature 1..738: note = Description of Artificial Sequence: Synthetic coding sequence
  source 1..738: mol_type = other DNA
atgtggaccatgagcagctggaccatgaagatgatgcggtggcggcagcagcttggtgaaatggggctgcggccgctaccaagacgaatgtctcgggccccgatgagtcccagcacagccctcgcatttgtcacctcatgctcttctcagagttgctctggcccactgtcgactgtagccttaagcattcgccagaaagttgccgtgtttttcgggggcctctccatcaagaaagacgaggaagtcctcaagaagaattgcccccatatagtcgttggaactccaggccggatcctcgcactggcaaggaacaagtctctgaatttaaaacatataaaacactttatactggacgagtgcgataaaatgcttgaacagctggatatgaggcgcgacgtgcaagagatatttcgaatgaccccgcacgagaagcaagtgatgatgtttagcgctaccctatctaaagaaatccggcccgtctgccggaagttcatgcaggacccgatggaaatcttcgtcgacgatgagaccaagctcacattgcacgggttacagcagtattatgtgaagcttaaggacaacgagaaaaacaggaagttgttcgacttgttagacgtgctggaattcaaccaggtggtgatatttgtcaagtcggttcagaggtgtattgccctcgcccaacttcttgtggagcagaacttccctgctattgccattcatcggggcatgccacagtag

SEQ ID NO: 184837 - DNA, 1287 bp, synthetic construct
  misc_feature 1..1287: note = Description of Artificial Sequence: Synthetic coding sequence
  source 1..1287: mol_type = other DNA
atggccgagaacgacgtggacaacgagctgctggactacgaggacgacgaggtggaaactgccgccggcggagatggtgcagaagctcctgccaagaaggatgtcaagggaagctatgttagtatccattcaagcggcttcagagactttctgctaaaacctgagttacttcgggcaatcgtagattgcggctttgaacatcctagcgaagttcaacacgagtgcatcccccaggcaattttaggaatggatgtgctctgtcaggctaaaagcgggatggggaagactgcggtttttgtgctggcgaccctccaacaactggagccagtgacagggcaagtttctgtcctggtaatgtgtcacacacgagaactggcatttcagattagcaaagagtacgagcgcttcagcaagtacatgcctaatgtaaaggtggctgtgtttttcggtggcttatcaatcaagaaggatgaagaagtgctcaagaaaaattgcccacacattgtcgtgggtacgcccggcagaattctcgctctggcccgcaataagtccctgaatttgaagcatatcaaacatttcatattggacgaatgtgataaaatgctggaacaactggatatgagacgtgatgtgcaggaaatattccgaatgacacctcacgagaaacaggtcatgatgtttagcgctacgctcagcaaagaaataagacctgtgtgcaggaaatttatgcaggatccaatggagatctttgtggacgatgagacgaagcttaccctgcacggacttcagcaatactacgtaaagttgaaggacaatgaaaagaaccgcaagctattcgatctcctggatgtcctggagttcaatcaggtggtcatattcgtgaagtcagtgcaacgctgcatcgcactggcccagttgctagtcgaacagaattttcctgcaatcgctattcatagaggaatgccccaggaagaacggttgtcaagataccagcagtttaaagactttcagagacgcatcctcgtcgctacgaatctctttggtaggggcatggacatagagagggttaatatagcctttaattatgacatgcctgaggattccgatacttacctccatagggttgctcgcgcaggtaggtttggtacgaaggggctcgctataacattcgtttccgatgagaatgacgccaaaattctgaatgacgtacaggaccgctttgaggtaaacatcagtgaactccccgatgaaattgacatttcctcttatatcgaacagacaaggtag

SEQ ID NO: 184838 - DNA, 411 bp, synthetic construct
  misc_feature 1..411: note = Description of Artificial Sequence: Synthetic coding sequence
  source 1..411: mol_type = other DNA
atgggcggcggccggcggccctacgacgtgttcttcagcaaggtgatggccgagaatgacgtcgacaacgaactgctggactatgaggacgacgaggtcgagaccgcggcaggcggcgacggcgccgaagctccggccaaaaaggatgtgaaggggtcatacgtcagcattcactccagtggctttagggacttcttactgaagcccgagctgctgcgcgcgatcgtggattgtggttttgaacatccaagtgaggtccaacacgaatgtatccctcaggcaatcctgggcatggatgtcctgtgccaggctaaatccggaatgggcaagactgccgtgtttgtcctggccaccctgcagcagttggaacccgttacaggtcaggtgtccgtgctggtaatgtgccattag

SEQ ID NO: 184839 - DNA, 987 bp, synthetic construct
  misc_feature 1..987: note = Description of Artificial Sequence: Synthetic coding sequence
  source 1..987: mol_type = other DNA
tgagccaccctgcagcagctggagcccgtgaccggccaggtgagcgtactggtgatgtgtcacactagggaactggcattccagatctctaaggaatatgagcgcttctctaagtacatgcctaatgtcaaggtagctgttttttttggaggtctgtctattaaaaaagatgaagaagtactgaagaagaactgcccgcacattgttgtcgggacccccggaaggatcctcgcactggccaggaacaaaagcctcaatctgaaacacattaagcatttcatcttggatgagtgtgacaagatgttggagcaactggatatgaggcgggatgtgcaggagatttttcgcatgacccctcacgagaaacaggttatgatgttcagcgctaccctctctaaggaaatcaggccggtttgcaggaagttcatgcaggatccaatggagatttttgtggacgacgagaccaagctaacacttcatggactccagcagtactacgtgaagctcaaggataatgagaaaaatcggaagctcttcgacttgttggatgtgctagagtttaaccaggtggttatcttcgtgaagagcgtacaacggtgcatcgcattggctcagcttctggtcgagcagaattttcctgctattgctatccaccgaggaatgcctcaggaagaacgtctgagtcggtaccagcaatttaaggacttccagcggcgtattttagttgcgaccaatctgtttggtagaggaatggatatcgaaagagtgaatatcgccttcaattacgatatgcctgaagactcagacacttacctccacagagtggcaagggcaggacggttcgggaccaaagggctggcgatcacttttgtctcggacgaaaatgatgctaaaattttgaacgatgttcaggacagattcgaggtgaatatttcggagctcccagacgagatcgacatctcatcctatatagagcagacccgctag

SEQ ID NO: 184840 - DNA, 399 bp, synthetic construct
  misc_feature 1..399: note = Description of Artificial Sequence: Synthetic coding sequence
  source 1..399: mol_type = other DNA
atggccgagaacgacgtggacaacgagctgctggactacgaggacgacgaggtagaaactgcagctggcggcgacggagcggaagcccctgccaaaaaagatgtcaaaggtagttatgtaagtattcactctagcggctttcgcgactttctcctcaagcctgaattactgagagccatagttgactgcggcttcgagcaccccagtgaagtccagcatgaatgcatcccgcaagccattttgggcatggatgtgctatgtcaggcaaagagcggtatgggaaagaccgctgtatttgtcctggcgacactgcagcagctggagcccgtgaccggccaagtctgcttttgcgatagtcatttccctcggggtgataacgaagagttacacctaccatag

SEQ ID NO: 184841 - DNA, 420 bp, synthetic construct
  misc_feature 1..420: note = Description of Artificial Sequence: Synthetic coding sequence
  source 1..420: mol_type = other DNA
atggccgagaacgacgtggacaacgagctgctggactacgaggacgatgaagtggagactgctgccggtggggatggcgcagaagctccggccaaaaaggacgtgaaggggtcatacgtctcaattcacagttctggcttccgggacttcctgctaaagccggagcttttaagggctattgtggattgcggatttgagcaccccagtgaggtgcagcatgaatgtattcctcaggccatcttaggcatggacgttttatgtcaggccaagagcggcatgggaaagactgctgtatttgttctggcgactctccagcagttggagcccgtgacaggacagtcgcacgagcacatgacaagcgttacattagacaacttgaccgctgtgggcgatgtgctgtcccaagcatgggggagctag

SEQ ID NO: 184842 - DNA, 717 bp, synthetic construct
  misc_feature 1..717: note = Description of Artificial Sequence: Synthetic coding sequence
  source 1..717: mol_type = other DNA
atggccgagaacgacgtggacaacgagctgctggactacgaggacgatgaggttgagaccgccgctggtggggacggagccgaagcccccgcgaagaaggatgtgaaaggaagttacgtttccatccactcatccggcttccgtgatttcctactgaagcctgagctgcttagggcgatagtggactgcggttttgagcacccatccgaggtccagcacgagtgcataccccaagctatccttggcatggatgtactctgtcaggccaagtcggggatgggaaagactgccgtgtttgtgctagcaacacttcaacagttagagccagtgactggtcaggtgagcgtgctagttatgtgccatacgcgcgaactggcattccagatatccaaagaatatgaacgatttagcaaatacatgccaaatgtcaaagtagctgtattcttcggaggcctcagcatcaagaaggatgaggaagtgctcaaaaaaaactgcccccacattgtcgtgggaacccctggcaggattctggcactcgctaggaacaagtcactgaacctgaaacacatcaaacacttcatactcgacgagtgtgataaaatgttggaacagttggacatgcgaagggatgtgcaggagatttttagaatgactccgcatgagaagcaagtgatgatgttctctgctaccctatccaaagagatccgccctgtgtag

SEQ ID NO: 184843 - DNA, 564 bp, synthetic construct
  misc_feature 1..564: note = Description of Artificial Sequence: Synthetic coding sequence
  source 1..564: mol_type = other DNA
atgggcagcagccacatcggcggcctgagcatcaacgagcggcggcgatcagcttcactgggccttgtgatggcagagaacgacgtcgataacgagctgctggactacgaagatgacgaggtagagacggcagcgggtggcgacggggctgaagcacccgctaagaaagatgtgaagggatcttacgtatcaatccatagcagcggtttcagagacttccttcttaagcccgaactgctgcgggcaattgtggactgcggttttgaacacccttccgaagttcaacatgagtgtataccacaagctattctgggcatggacgttttgtgccaagccaagtcgggaatggggaaaacggctgtctttgtgctggctacgctgcagcaacttgaacccgtgactggccaagtgtccgtcctggtgatgtgccacactcgggagctggcattccaaatttcaaaggagtatgaacgctttagcaaatatatgccaaatgtcaaggtagccgtatttttcggtggtctgagcataaagaaagatgaggaagttctcaagaaaaattag

SEQ ID NO: 184844 - DNA, 711 bp, synthetic construct
  misc_feature 1..711: note = Description of Artificial Sequence: Synthetic coding sequence
  source 1..711: mol_type = other DNA
atggccgagaacgacgtggacaacgagctgctggactacgaggacgacgaggtcgagaccgccgcgggcggagatggggccgaggctcctgcaaaaaaggacgtaaaagggtcatacgtaagcattcatagctctggctttagggacttcctattgaaaccggagctgctgagggctatagttgactgcgggtttgagcatccctccgaggtgcagcacgagtgtattccacaggcgatcttaggtatggatgtgttgtgtcaggcgaagagcggcatgggaaagaccgccgtcttcgtgctggcgacacttcaacaacttgagccagtgacaggccaggtctcggtcctcgtcatgtgtcacacgcgcgagttggcttttcagatttcaaaagaatacgagcgtttctccaagtatatgccaaacgtgaaagtggccgtattttttgggggactgtcgattaaaaaggatgaagaagtgctcaaaaagaactgcccccatatcgtggtcggtacccccgggaggatactggcgctggcgcgcaacaagagtcttaatcttaagcatatcaaacatttcatactggacgaatgcgacaaaatgctggaacagctcgatatgcggcgggacgtccaagagatctttcgcatgacacctcatgagaagcaggtaatgatgttctccgctactctgtctaaggagatcaggtag

SEQ ID NO: 184845 - DNA, 1278 bp, synthetic construct
  misc_feature 1..1278: note = Description of Artificial Sequence: Synthetic coding sequence
  source 1..1278: mol_type = other DNA
atggccgagaacgacgtggacaacgagctgctggactacgaggacgacgaagtggagactgcagctggcggtgatggtgcagaagcccccgccaagaaagatgtcaaagggtcatatgtgtccatccactccagcggtttccgggactttctgctgaagccagagctgctccgcgccatcgtggactgcggcttcgagcatccaagtgaagtccagcacgaatgcatcccacaggccatcctgggtatggacgtgctctgtcaggcgaaatcaggtatgggaaaaacagccgtgttcgtgctggccacattgcagcagctggagcccgtgaccggccaggtgtctgttcttgtcatgtgtcatacacgagaacttgctttccaaattagcaaagaatacgaacgtttctccaagtatatgcccaatgttaaggtcgcggtgttctttggcggcctctctattaagaaggatgaggaggtgctcaaaaagaactgtccacatatcgtggtcggcacccctggcaggatactggccttagccagaaacaaatccctgaacctgaagcacatcaagcacttcattctagatgagtgcgacaagatgctggaacaactcgatatgagaagagacgtgcaggagattttcagaatgaccccccacgaaaagcaggtgatgatgttctccgccactctgagcaaggagatccgccccgtttgccgcaaattcatgcaagatcctatggagatttttgttgatgatgaaacaaagctgaccctccatggattgcagcaatattatgttaagctgaaagataatgaaaaaaatcgcaaactgttcgacctcctcgacgtcctggaatttaaccaggttgtaattttcgtgaagagcgtgcagaggtgcatcgctttagcccaactgctcgtcgaacagaacttccctgctattgcaatacacaggggaatgccacaggaggagcggctcagtcgctaccagcagttcaaagattttcagcgtcgaatccttgttgccacaaatcttttcggcagaggcatggatatagaaagggtgaacatcgcgttcaactatgacatgccagaggattcggacacgtacttacataggtgctatccactgtctccttctcggtggcctgaacaggctggactggctcccagagcctggctcagccatctgtgtcccatgaggatgatgcctaggtccagcatgatgtgcaggatagctttgagaagcatcctcgtgagctgccttatgcggtag

SEQ ID NO: 184846 - DNA, 696 bp, synthetic construct
  misc_feature 1..696: note = Description of Artificial Sequence: Synthetic coding sequence
  source 1..696: mol_type = other DNA
atggccgagaacgacgtggacaacgagctgctggactacgaggacgatgaggttgagaccgctgccggcggtgacggggctgaggcccccgcaaagaaggatgtgaaaggttcttatgtatcgatccactcttcaggttttagagatttccttctaaaacctgaactgctccgtgctatcgtggactgtggattcgagcatccgtcggaagtacagcacgagtgtattccacaggcaatactgggaatggacgttctttgtcaggccaagagcggcatgggcaaaacagccgttttcgtgttagccaccttacagcaattagagccagtcaccggccaagtgtcagtactcgtgatgtgccacacccgagaacttgccttccagatttccaaggaatacgagaggttttctaaatacatgcctaacgtgaaagtggccgtattttttggtggactgagtatcaaaaaggatgaggaagtactcaagaagaactgcccacacatcgttgtcggtacgcccggcagaattcttgccctggcgagaaataaaagcctaaatctgaaacacataaagcattttatcctcgacgaatgtgataagatgctcgaacagctcgacatgcggcgggatgttcaggaaatctttagaatgactccccacgagaagcaggtaatgatgttctctgcaactctgtag

SEQ ID NO: 184847 - DNA, 99 bp, synthetic construct
  misc_feature 1..99: note = Description of Artificial Sequence: Synthetic coding sequence
  source 1..99: mol_type = other DNA
tgagccaccctgcagcagctggagcccgtgaccggccaggtgtgcttctgcgactctcacttcccgaggggggacaatgaggagctgcatcttccctag

SEQ ID NO: 184848 - DNA, 399 bp, synthetic construct
  misc_feature 1..399: note = Description of Artificial Sequence: Synthetic coding sequence
  source 1..399: mol_type = other DNA
atggccgagaacgacgtggacaacgagctgctggactacgaggacgacgaagtggaaaccgctgccggaggggatggagcagaggctcctgctaagaaggacgttaaggggtcctacgttagtatccactcctccggcttccgcgacttcctgttaaagcctgagctgctgagagctatcgtggattgcggatttgagcacccctcagaggtccaacatgaatgcatcccgcaggcaatcttaggcatggatgtcctttgtcaggcgaaatctgggatgggtaagactgccgtgttcgtgctggctaccctgcagcagctggaacctgtgacaggccaggtctgcttctgcgattctcatttcccacgtggcgacaatgaagaattgcatcttccctag

SEQ ID NO: 184849 - DNA, 399 bp, synthetic construct
  misc_feature 1..399: note = Description of Artificial Sequence: Synthetic coding sequence
  source 1..399: mol_type = other DNA
atggccgagaacgacgtggacaacgagctgctggactacgaggacgatgaagtagagaccgccgcggggggagacggtgccgaggccccggctaaaaaagacgtgaagggaagttacgtgtccatccattcgtcaggattcagggacttcctgctcaaaccagaactgttgagggctatcgtggattgtggtttcgaacacccctcggaagtgcagcatgaatgcatcccccaggccattctgggcatggatgtcctatgtcaggctaagtcaggaatgggcaaaacggcagtatttgtgcttgctacacttcagcaactcgagccagttactgggcaggtgtgcttctgcgattcccatttccctcgcggcgataacgaagagcttcacttgccatag

SEQ ID NO: 184850 - DNA, 738 bp, synthetic construct
  misc_feature 1..738: note = Description of Artificial Sequence: Synthetic coding sequence
  source 1..738: mol_type = other DNA
atgtggaccatgagcagctggaccatgaagatgatgcggtggcggcagcagctgggtgagatgggattgagacctctccctaggcggatgtcacgtgcaccaatgtctccctcaacagctctggcgttcgtgacttcatgttcatctcagagctgcagtgggccccttagcacggtggctctctccattcgccagaaggtggccgtgttcttcggcggcctcagcatcaagaaggatgaggaggtgctgaagaagaactgccctcacattgtggtgggcacccccggcagaatcctcgccctggcacgaaacaaaagcttgaatttaaaacacattaaacacttcatcctcgatgagtgcgacaaaatgctcgaacaattagacatgcggagagacgtgcaggagatctttcgcatgactccacacgagaagcaggtgatgatgtttagcgcgactcttagcaaggagattcgacctgtgtgcagaaagttcatgcaagatcctatggaaatttttgtggacgacgaaacgaagctgacgctccacgggctccagcaatattacgtaaagttgaaggacaacgaaaagaaccggaaactcttcgacctgctggacgtcctcgaatttaaccaggtcgtcatttttgtcaaaagcgttcagcgctgtatcgccctggcacaactccttgtcgagcaaaattttcctgccatcgccattcataggggaatgccacagtag

SEQ ID NO: 184851 - DNA, 696 bp, synthetic construct
  misc_feature 1..696: note = Description of Artificial Sequence: Synthetic coding sequence
  source 1..696: mol_type = other DNA
atggccgagaacgacgtggacaacgagctgctggactacgaggacgacgaggtggaaaccgcagccggaggggacggggcagaagcaccagccaaaaaagatgtgaagggaagctatgtttctatacattcctcaggtttcagagacttcctcctcaagcccgagctgctgcgggccatcgtggattgcggattcgaacatccaagtgaagtgcaacacgaatgtatcccacaggctatcctcggcatggacgtgctgtgccaggccaaaagtggcatgggcaaaaccgcagtgttcgtgctggcaacactccagcaactcgaaccagtgacgggacaggtctcggttttagtgatgtgccacactagggagttagcatttcagatcagtaaagagtacgagaggttttctaagtacatgcccaacgtcaaggtggcagtctttttcggcggactatccatcaagaaggacgaggaagtattaaagaaaaactgcccacatattgttgtggggacccctggccgcatcctggctcttgcccgaaacaagtctctgaatctgaaacacattaaacatttcatcctggacgaatgtgataaaatgttagagcagctggatatgagacgcgatgtccaggagatcttccgcatgaccccccatgaaaagcaggttatgatgttttcggctacactgtag

SEQ ID NO: 184852 - DNA, 732 bp, synthetic construct
  misc_feature 1..732: note = Description of Artificial Sequence: Synthetic coding sequence
  source 1..732: mol_type = other DNA
atgtggaccatgagcagctggaccatgaagatgatgcggtggcggcagcagctcggcgagatgggcctaagacctctgcctaggaggatgtcgcgcgctcccatgtcaccaagcacggctctggccttcgttacatcttgttcctcacagagctgttctggaccactgagcactgtagccctgtctatccgacagaaggtctcagttctcgtgatgtgccacaccagagaacttgcattccaaatatccaaggagtacgaacggttttcaaaatacatgcccaacgttaaggtggcggtcttttttggtgggctcagtattaaaaaagatgaggaagtcctgaaaaaaaattgcccccacatagtggtcggcacacccggccgcattctggcgttggccaggaacaaaagcttgaatctgaagcacataaagcactttattcttgacgagtgcgacaagatgctggaacagctcgacatgagacgggatgtgcaggagatcttccgaatgacaccccacgaaaagcaggttatgatgttttccgctactctgtcaaaggagatacggcctgtctgtcgcaagttcatgcaggatgtgaacaccctgctcccctctctgcctcctctcccagccaggtgccttctacctttcctagcgctcttcttacggcttccctgtcactccagcgctaagaaagccgcatgcgctcaactaggagtcatgactccgtag

SEQ ID NO: 184853 - DNA, 1287 bp, synthetic construct
  misc_feature 1..1287: note = Description of Artificial Sequence: Synthetic coding sequence
  source 1..1287: mol_type = other DNA
atggccgagaacgacgtggacaacgagctgctggactacgaggacgatgaagtggaaactgcagctggaggagatggcgccgaggcccccgcaaagaaagacgtgaagggtagctacgtttcaatccatagcagcggttttagggactttctgctgaaaccggaactactacgagccattgttgattgcgggttcgaacatccctctgaagtgcagcacgagtgcataccgcaggcgattctcggaatggatgttctgtgtcaggccaagagtgggatggggaagacagctgtcttcgtgctggccacgctgcagcagctcgagccggttacaggtcaggtgtcagttttggttatgtgtcataccagggagctggccttccagatctccaaagagtacgaaagattctcaaagtacatgcctaacgtaaaagttgctgtttttttcggcggcctctcaatcaagaaggatgaggaagtcttgaagaagaattgtcctcacatcgtcgtcggcaccccaggccggattctggcactagcacgcaataagtcactaaacctgaagcatatcaagcactttatcctcgacgagtgcgataaaatgctcgagcagttagacatgcggagagacgtccaggagatctttcgtatgacaccccacgaaaagcaggtgatgatgttttccgcaaccctcagtaaggagataagacccgtgtgtagaaagtttatgcaggatcccatggaaatcttcgtagatgatgaaactaaattgaccctacacgggctgcagcaatattatgtcaagttgaaagataatgagaagaatagaaagctcttcgacctccttgacgtcctcgaatttaatcaggtcgttattttcgtgaaatccgtacagagatgcattgcgctggcacagttactcgtggagcagaattttcctgcaatcgcaatccaccgaggtatgccacaggaggaacggcttagtaggtaccaacagtttaaggacttccagcgccgaatcctggtcgccacgaatctctttggccgcggcatggatatcgagcgcgtgaacatagcatttaactacgacatgcccgaagatagtgatacttatctccatcgcgtggcccgggccggacgcttcgggaccaagggacttgctatcacatttgtgagtgacgagaacgatgccaagattctgaacgatgtccaggataggtttgaggtcaatatttctgaacttccagacgagattgacatcagctcgtacatcgagcaaactaggtag

SEQ ID NO: 184854 - DNA, 1278 bp, synthetic construct
  misc_feature 1..1278: note = Description of Artificial Sequence: Synthetic coding sequence
  source 1..1278: mol_type = other DNA
atggccgagaacgacgtggacaacgagctgctggactacgaggacgacgaagtggaaaccgccgctggtggggatggggccgaggccccggcaaaaaaagacgtgaagggcagttacgtgagcattcactctagcgggttcagggactttctccttaagccagaattactgcgtgcaatcgtggactgcgggtttgaacatccttccgaagtacagcacgagtgcattccacaagccatactgggtatggacgtcttgtgtcaggccaagtctgggatggggaagacagccgtgttcgtgttggcaactctgcaacagctggagccagtgacgggtcaggtgagtgtactcgtcatgtgccacacccgcgaactggcgttccaaataagcaaggaatacgagaggtttagtaaatacatgcctaacgtgaaggtcgccgtctttttcgggggtctttccatcaaaaaggacgaagaagtgcttaaaaagaactgtccccatatcgtggtggggacaccagggcggattctagcgctcgctcgaaataagagccttaatcttaaacatattaagcactttattttagatgaatgtgacaagatgttggaacagctggacatgaggcgagatgttcaagagatttttagaatgactcctcacgaaaagcaagtgatgatgttctccgcaaccctcagcaaggaaattagacctgtttgtaggaagtttatgcaagacccaatggaaattttcgtggacgatgaaactaagctgaccctgcatgggctacagcaatattatgtcaagttgaaggacaacgaaaagaataggaaactcttcgacctcctggacgtgctcgaattcaatcaagtcgtgatctttgttaaaagcgtgcagcggtgcatcgccctagcccaattactggttgagcagaacttcccagccattgccattcatcgtgggatgccacaggaggagagattaagccgataccaacagttcaaggatttccagcggcgcatcctcgtcgctacaaacctgttcggtagggggatggatattgagcgggtcaacatcgccttcaattacgatatgccagaagattcggatacatacttgcataggtgttaccccctttcaccttcccggtggccggagcaggccgggcttgcgccacgcgcctggctgagccatctgtgtcccatgaggatgatgccaagatcttctatgatgtgccggattgctctgagaagtatcctcgtctcctgtttaatgaggtag

SEQ ID NO: 184855 - DNA, 291 bp, synthetic construct
  misc_feature 1..291: note = Description of Artificial Sequence: Synthetic coding sequence
  source 1..291: mol_type = other DNA
atggccgagaacgacgtggacaacgagctgctggactacgaggacgacgaagtggagaccgcagcagggggggatggggccgaagctcctgctaagaaagatgttaaggggagctatgtgagcattcattcaagtggtttcagggactttctgttgaaacccgagttactgcgtgctattgtagactgtggattcgaacacccttctgaagtccagcacgagtgcattccacaggccattctgggaatggatgttctatgccaggccaagtctgggatgggtaagacttag

SEQ ID NO: 184856 - DNA, 411 bp, synthetic construct
  misc_feature 1..411: note = Description of Artificial Sequence: Synthetic coding sequence
  source 1..411: mol_type = other DNA
atgggcggcggccggcggccctacgacgtgttcttcagcaaggtgatggctgagaatgatgtcgacaacgaacttctcgattatgaagatgatgaggtggagaccgctgcaggcggcgatggcgctgaggctcccgccaaaaaagatgtgaagggcagttacgtctcaatccattccagtggcttccgggatttcttactaaagcctgaacttctcagggccatcgtggactgcggatttgagcatcccagcgaagtgcagcacgaatgtataccacaagccatactgggtatggatgtcttgtgccaggcaaagagtggtatggggaagaccgccgtgttcgtgctagctaccttacagcaactcgaacccgtcacaggccaagtgtccgtattagtgatgtgccattag

SEQ ID NO: 184857 - DNA, 564 bp, synthetic construct
  misc_feature 1..564: note = Description of Artificial Sequence: Synthetic coding sequence
  source 1..564: mol_type = other DNA
tgaagcgaggagcgggacatcggcaagcccatggagatcttcgtggatgacgaaaccaagcttaccctgcatggcctccagcagtactacgttaaactcaaggacaatgagaaaaacaggaaactattcgacctgttagatgtcctggagttcaatcaggttgtgatcttcgttaagagtgtccagagatgcattgcactggctcaactgctggtggaacagaatttccccgccatcgctatccataggggcatgccgcaggaggagcgattatctcgttatcagcagttcaaggatttccagcggcgaattctggtggcaactaacctgttcggtcggggcatggacatcgagagggtcaatatcgcttttaactacgatatgcctgaggattcagatacatatcttcaccgggtggcgcgcgctggcaggttcggcactaagggcttggccatcacctttgtgtcagacgagaacgacgcgaaaatcctgaatgacgtgcaggacagattcgaagttaacatcagcgagctaccagacgagatcgacatcagctcttactag

SEQ ID NO: 184858 - DNA, 717 bp, synthetic construct
  misc_feature 1..717: note = Description of Artificial Sequence: Synthetic coding sequence
  source 1..717: mol_type = other DNA
atggccgagaacgacgtggacaacgagctgctggactacgaggacgacgaagtggagactgccgccggaggcgacggagctgaagctccagcaaagaaggatgtgaagggatcctatgtttccatacattcatctggttttagagatttcctgctgaagcccgaattgctccgggcgattgtggattgtggcttcgaacaccccagcgaagtgcagcacgagtgtatcccacaggccattctcggaatggatgtgctttgccaggcaaagtccggtatggggaaaacggccgtttttgtgcttgcgacactccagcagcttgagcccgtgacgggacaagtgtccgtgctggtgatgtgccacacacgtgagctggcctttcagataagtaaggagtacgaaagattttcgaagtacatgcccaatgtgaaggtcgctgtcttcttcggcgggttgtccattaagaaagacgaggaagttcttaagaagaattgcccccacatagtagtaggcaccccaggaagaatcctggctttagcccggaacaaaagtcttaatctaaagcatattaagcactttatcttggatgaatgcgacaaaatgctggaacagttggatatgcgaagagatgtgcaggagatctttaggatgacaccacacgagaaacaggttatgatgtttagtgccaccctgtccaaggagataagacctgtgtag

SEQ ID NO: 184859 - DNA, 417 bp, synthetic construct
  misc_feature 1..417: note = Description of Artificial Sequence: Synthetic coding sequence
  source 1..417: mol_type = other DNA
tgagccaccctgcagcagctggagcccgtgaccggccaggtgagcgtcctcgtgatgtgtcacactcgagaactggcctttcaaatctctaaggaatacgaacgtttctctaagtacatgccaaatgtaaaggtggctgttttctttgggggactgagtataaaaaaggatgaggaagtgttgaagaagaattgtccacatattgtggtggggactcccggccggatcctggccttggctaggaacaagtcgttgaacctgaaacacataaaacactttatcctggatgagtgcgacaagatgctcgaacagctggacatgcgacgggatgtccaggaaatctttcggatgacaccccatgagaagcaagtcatgatgtttagcgctacgttgtcaaaggagattaggccggtctag

SEQ ID NO: 184860 - DNA, 870 bp, synthetic construct
  misc_feature 1..870: note = Description of Artificial Sequence: Synthetic coding sequence
  source 1..870: mol_type = other DNA
atggccgagaacgacgtggacaacgagctgctggactacgaggacgacgaggtggaaactgctgccggaggcgatggcgccgaagctcctgcgaaaaaggacgtgaaaggcagctacgtatctatccacagttctggctttagggacttccttcttaaacccgagctgctgcgggccatcgtggattgtgggtttgagcatcccagtgaggttcagcatgagtgcataccacaggccatactgggaatggatgtgctgtgccaagcaaagtctgggatgggcaagaccgccgtttttgtcctggcgaccctccagcagctggagcctgtgacgggacaagtatccgttctggtcatgtgtcatacccgagaactcgctttccagatttctaaggaatatgagcgatttagcaagtacatgcctaatgttaaggtagctgtcttttttggagggctttcaatcaagaaggatgaggaagtcctgaaaaagaattgcccacacattgtagttggaacacctggccggatcttagcactagcgcggaacaagagtcttaacctaaagcatatcaaacatttcatactggacgagtgcgataagatgttggagcagcttgatatgagaagagatgtccaagaaatctttagaatgacaccgcatgaaaagcaggtcatgatgttctcggcaaccctctctaaggaaatcagacccgtctgcagaaaattcatgcaggaccccatggagattttcgtcgacgatgaaacgaaactcactctgcacggtctccagcagtattatgtgaaactgaaagataacgaaaaaaaccgaaagttgttcgacctgctggacgtcctggagttcaaccaatag

SEQ ID NO: 184861 - DNA, 1287 bp, synthetic construct
  misc_feature 1..1287: note = Description of Artificial Sequence: Synthetic coding sequence
  source 1..1287: mol_type = other DNA
atggccgagaacgacgtggacaacgagctgctggactacgaggacgatgaagtcgagacagccgctggaggggatggggcggaggcgccagccaagaaggacgttaaaggttcgtacgtgtctatccacagcagtggatttcgtgatttcctccttaaaccagagctgctgagggcaatcgtggactgcggtttcgagcacccttctgaagtgcagcatgaatgtatcccgcaggccatcctcggtatggatgtcctttgccaagcgaaaagcggtatgggcaagaccgccgtgtttgtccttgccacactccaacagctcgagcctgttacaggacaggtaagtgttctcgttatgtgtcacacgcgggagttggcattccagatcagcaaggagtatgaaagattttccaaatacatgcccaacgttaaggtggccgtgttcttcggaggcctgagtattaagaaggatgaagaagtgctgaaaaagaattgtccacacatcgtcgtcggcactcctgggcgaatcctggcactggctcgcaacaaaagcctgaatctgaagcatatcaaacatttcatcttggatgagtgcgacaagatgctggagcagttagacatgcgaagggacgtgcaggagatctttagaatgaccccacacgaaaagcaggttatgatgttttccgccacgctctccaaggagattcggcccgtgtgtaggaaattcatgcaggatccaatggagattttcgtggatgacgaaacaaagttaacccttcacggacttcaacagtactacgttaaactcaaagataacgaaaagaaccgcaagttattcgatctcctggacgttctagaattcaatcaagtggtgatcttcgtgaagtccgtgcaacgctgtattgcccttgcacagctgcttgtcgaacaaaacttccctgctattgccatccataggggcatgcctcaggaggagcggctttctagataccagcagtttaaagatttccagcggcgcatcctggtagccacaaatctattcgggcgcggaatggatatcgaacgcgtcaacatagccttcaactatgacatgcctgaagactcggatacctacctgcacagggtggcccgcgcaggaagatttgggacgaagggcctcgcaattacattcgtgtccgatgaaaatgacgccaagattctaaacgatgtacaagataggtttgaagtgaatatctcagaactgccagacgaaatcgacatctccagttacatcgagcagacccggtag

SEQ ID NO: 184862 - DNA, 696 bp, synthetic construct
  misc_feature 1..696: note = Description of Artificial Sequence: Synthetic coding sequence
  source 1..696: mol_type = other DNA
atggccgagaacgacgtggacaacgagctgctggactacgaggacgacgaagtggagactgcggctggaggggatggcgccgaggcaccagcgaaaaaggatgtgaaaggtagctacgtgtcgattcattcatctgggttccgggatttcctgctgaaacctgagctcttgcgcgcaatcgttgactgtgggttcgagcacccatctgaagtgcagcatgaatgtataccacaggctatactgggaatggacgttctctgtcaagccaagtctgggatggggaaaacagccgttttcgtgctcgctaccttgcagcagctggagcccgtgactgggcaggtgagtgtcctggttatgtgccacacccgagaactcgcatttcagatctccaaggagtatgagcgctttagcaagtacatgccaaacgttaaggtggctgtttttttcggaggcctcagtattaagaaggatgaagaagtactgaaaaagaattgtccccatattgtcgtgggcacgcccggacggattttggcgctggccagaaataaaagtcttaacctgaagcacattaagcacttcatcctcgacgaatgcgacaagatgctggaacaacttgacatgaggagagatgtgcaggagatcttccgaatgacccctcacgaaaaacaagtgatgatgttctcggccaccttatag

SEQ ID NO: 184863 - DNA, 1287 bp, synthetic construct
  misc_feature 1..1287: note = Description of Artificial Sequence: Synthetic coding sequence
  source 1..1287: mol_type = other DNA
atggccgagaacgacgtggacaacgagctgctggactacgaggacgacgaggtagagaccgctgcaggcggggatggagctgaggctcctgccaaaaaggacgtgaagggaagttatgtgtcaatccactcctctggcttcagagattttctgctgaaaccggagctattaagagcaattgttgactgcggttttgagcacccaagtgaggtgcagcacgagtgtatacctcaggccattctcggaatggatgtgttgtgtcaagccaaaagtggaatgggcaagaccgcggtgtttgtgctggcaaccttacagcagcttgagccagttactggacaggtatctgtgctagtgatgtgtcacacacgggagctggcatttcagattagtaaggagtatgagcggttctctaaatatatgccaaatgtgaaagtagctgtcttcttcggaggcttatcaatcaaaaaggacgaggaagtcctgaaaaaaaactgccctcatatcgtcgtaggcactccaggtagaattctggctctggcacgcaacaaaagtttaaacctgaagcacataaaacatttcatcctcgacgagtgcgacaagatgctcgagcagcttgatatgcgaagagatgtgcaagaaatattcagaatgactccccatgaaaagcaggtgatgatgttcagtgccactctaagtaaggagattcgccccgtgtgccgaaagttcatgcaggatcctatggagattttcgtggatgacgaaactaagctaacactgcatgggctccagcagtattacgttaaactgaaggataatgagaaaaacagaaagttatttgatctcctggacgtcctggagttcaatcaagtggtgatttttgtgaaaagcgtccagcgctgcattgccctggcccaactgctggttgagcagaactttcctgctatcgcaattcaccgtggaatgccacaggaagaacgcctctctagataccaacagttcaaggatttccaacgccggattctagtggctacgaacctgttcggacggggtatggacatagagcgggtaaacattgctttcaattatgatatgcccgaggattctgatacttacttacacagagtggcccgagctggaagatttggtaccaagggtctagccataacgtttgtatccgatgagaacgacgctaagatcctaaatgatgtccaagaccgctttgaggtgaatatcagtgaactgccagacgagatcgacatatcgtcttacatcgagcaaacacggtag

SEQ ID NO: 184864 - DNA, 378 bp, synthetic construct
  misc_feature 1..378: note = Description of Artificial Sequence: Synthetic coding sequence
  source 1..378: mol_type = other DNA
atggccgagaacgacgtggacaacgagctgctggactacgaggacgacgaagtggagactgccgctgggggagacggtgcagaggctcccgctaaaaaggatgttaaaggaagctatgtatcaattcattcaagtggcttccgagattttttactgaagccagagcttctgagggccatcgtcgactgcggtttcgagcatccatccgaagttcagcatgaatgcattccccaggccatcctcgggatggacgttctgtgccaggccaagagcggcatgggcaagaccgccgtgtttgtccttgccaccctgcaacagctggagccagtaaccggccaggtgtcagttctggtcatgtgtcacacgagagagttgtag

SEQ ID NO: 184865 - DNA, 294 bp, synthetic construct
  misc_feature 1..294: note = Description of Artificial Sequence: Synthetic coding sequence
  source 1..294: mol_type = other DNA
tgagccaccctgcagcagctggagcccgtgaccggccaggtgtgcttctgcgactctcacttcccacggggggataatgaggagcttcacctcccatacgtctctgtttactttctcccaaaggtctctgttttagtaatgtgccatactcgggagctggccttccagattagcaaagagtacgaacgattctctaagtacatgcctaacgttaaggtggcagtttttttcggtggcctgtcgataaaaaaggacgaggaggtgttgaaaaagaattgcccccacatcgtgtag

SEQ ID NO: 184866 - DNA, 291 bp, synthetic construct
  misc_feature 1..291: note = Description of Artificial Sequence: Synthetic coding sequence
  source 1..291: mol_type = other DNA
atggccgagaacgacgtggacaacgagctgctggactacgaggacgacgaggttgaaactgctgcaggcggcgacggtgccgaggcacctgctaagaaagatgtcaagggatcatatgtgtcaatccattcgtccggatttcgagatttcctactaaaacctgaacttttgcgtgctatagtcgactgcgggttcgagcatccttctgaggtccagcatgaatgtatccctcaggctatcttgggaatggacgtgttgtgccaagccaaaagcggtatgggcaaaacttag

SEQ ID NO: 184867 - DNA, 291 bp, synthetic construct
  misc_feature 1..291: note = Description of Artificial Sequence: Synthetic coding sequence
  source 1..291: mol_type = other DNA
atggccgagaacgacgtggacaacgagctgctggactacgaggacgacgaagttgaaaccgcagcaggcggcgatggcgcagaggcccccgcaaaaaaagacgtgaagggctcatacgtctctatccacagctccggctttagagactttctactgaagcctgagctcttaagggctatagtcgattgcggattcgagcacccctcggaagttcagcacgagtgtatccctcaagccatccttggaatggatgtcctctgtcaggctaagtctggcatggggaaaacctag

SEQ ID NO: 184868 - DNA, 1287 bp, synthetic construct
  misc_feature 1..1287: note = Description of Artificial Sequence: Synthetic coding sequence
  source 1..1287: mol_type = other DNA
atggccgagaacgacgtggacaacgagctgctggactacgaggacgacgaagtggagactgctgctggtggagacggtgctgaagcccccgccaagaaagacgttaaggggagttacgtctcaattcacagtagcggattcagggactttctgctgaaacctgagctgctgagggccatagtggattgcggttttgaacatcccagcgaggtgcagcatgagtgtattccccaggcaatcctaggtatggatgtgctatgtcaggctaaatcaggtatgggtaagaccgctgtttttgtgctggccacccttcagcagctcgaacccgtaaccggccaggtttctgtcctggttatgtgccacacacgggagctagcctttcagataagtaaggagtatgagcggttttcgaaatatatgccaaatgtaaaagttgcagtcttctttggcgggctgagtataaagaaggatgaggaagtgctgaagaagaattgtccacacatcgtggtgggcacaccaggaaggattttggccctggcacgaaacaaaagcttaaatttaaagcatataaagcatttcatcttagacgaatgtgataaaatgctggaacagctcgatatgagacgtgacgttcaggaaatctttcgcatgacccctcacgaaaagcaggttatgatgttttctgcaacgctgtctaaggagatcaggcctgtgtgtaggaaattcatgcaagatccaatggaaatctttgtagatgatgagactaaactgactctgcatggcctgcagcagtactacgtgaagctaaaagataatgagaagaataggaagctttttgacttacttgacgtgctggagtttaatcaggtggtaatcttcgttaaatccgtgcagaggtgtattgccctggctcagttactggtcgagcagaatttcccagcaattgccatccaccgaggaatgccccaggaggaaagactcagcagataccaacagtttaaggattttcagcgtcgcatactcgttgccaccaacctgttcggccgcggaatggacatagaacgcgtgaacatcgctttcaattacgatatgcctgaggattctgacacatacctgcacagggtggcacgagccggccgcttcggcactaaagggctggcaatcaccttcgtgtcagatgaaaacgacgccaagattctgaacgatgtgcaggatcggttcgaggtgaacatttcagagcttccagatgagattgatatatcatcctacatcgagcagactcgatag

SEQ ID NO: 184869 - DNA, 732 bp, synthetic construct
  misc_feature 1..732: note = Description of Artificial Sequence: Synthetic coding sequence
  source 1..732: mol_type = other DNA
atgtggaccatgagcagctggaccatgaagatgatgcggtggcggcaacagctcggtgagatgggcctgcggccattgccaagacggatgtctcgggcgccaatgtcacccagtaccgccctggcttttgtgacatcctgctcatcgcaatcatgcagcggaccactttctaccgttgccctgtctatcagacaaaaggtgtctgttcttgtcatgtgccatacacgagaactggcttttcagatttcaaaagaatacgaaagattctccaagtatatgccaaatgtgaaggtagctgtgttctttgggggcctgtctattaaaaaggatgaggaggtgctcaaaaagaactgtcctcacattgttgtcggaacacccgggagaattttggctctggcacggaataagagcctgaatcttaaacacataaagcactttatactggacgaatgcgacaaaatgctggaacagttggatatgagaagggacgtgcaggagatattcagaatgacacctcatgagaaacaggtaatgatgttttcggccaccttgagcaaagagattcgcccagtatgccggaagtttatgcaggatgtcaatactctgctcccatcactccctcctctccctgccaggtgtttgcttccatttttggcactgttcttaaggctgccctgccacagttccgcaaaaaaggccgcttgcgcccagttgggcgtgatgaccccctag

SEQ ID NO: 184870 - DNA, 972 bp, synthetic construct
  misc_feature 1..972: note = Description of Artificial Sequence: Synthetic coding sequence
  source 1..972: mol_type = other DNA
atggccgagaacgacgtggacaacgagctgctggactacgaggacgatgaggtggagacagccgcaggtggagacggagctgaggctcctgctaagaaagacgtgaaaggcagctatgtgtccatccactccagcggattcagggacttcctgttaaagcccgagctcttacgagccatcgtcgactgtgggttcgagcaccctagcgaggtgcagcacgagtgtatcccacaggcaattctcggaatggacgttctttgtcaggcaaaatctggcatggggaaaaccgccgtcttcgttctagcgactctgcagcagctcgagcctgtgacaggacaggtgtcagtgctagtgatgtgtcatacccgtgagcttgcatttcagatcagcaaggagtatgaacggttctctaagtacatgccaaacgtcaaggtcgcagtgttctttggcggcctgagcattaaaaaagatgaagaggtcctcaaaaagaactgccctcatatagttgtgggcacacctggtaggattctggctcttgctcggaacaagagtctcaatttgaaacacattaagcattttatcctggatgaatgcgacaagatgctcgagcagttagatatgcgtagggatgtgcaggagattttccggatgaccccacacgaaaaacaagtgatgatgttctcagctacattatccaaggaaatccgacccgtgtgcagaaagttcatgcaggacccaatggagatctttgttgacgacgagaccaagctgacactccatggcctgcagcagtattatgtgaaattgaaggacaatgagaagaaccggaaattgtttgacctgctggacgtgctagagttcaatcaggagatcacctgcaaatccgtgcagcggttctctacgaccaacagctgtggctaccagcctatctggccgaggcacggccatcgcgcgggagaacactgcttctag

SEQ ID NO: 184871 - DNA, 972 bp, synthetic construct
  misc_feature 1..972: note = Description of Artificial Sequence: Synthetic coding sequence
  source 1..972: mol_type = other DNA
atggccgagaacgacgtggacaacgagctgctggactacgaggacgacgaggtggaaaccgcagctggcggagatggcgccgaagcccctgcaaagaaggacgtaaagggatcatacgtcagcattcactctagtggatttagagacttcttactcaagcccgagctcctgcgagccatcgtggactgcggattcgagcaccctagcgaggtgcaacacgagtgcattccacaggccatcttgggcatggatgtcttgtgccaggccaagtcagggatggggaaaacagccgtgtttgtgcttgcaactttgcagcagctggagcccgtcaccggacaagtgtcggtcctggtaatgtgccacacaagagagctggctttccaaatcagcaaagaatatgagcggttttcaaaatatatgcccaatgtcaaggtcgccgttttttttggtggcctgtctatcaagaaggacgaagaggttctaaagaagaactgccctcacatcgtggtaggaacgccggggaggattttggcactggcccggaataaaagtctaaacctgaaacacatcaagcatttcatcttagatgagtgcgataaaatgctggaacaactggacatgagacgcgacgtgcaggaaatcttccgtatgactccacacgagaaacaggtaatgatgtttagtgccacactcagtaaagagattcggcctgtgtgtcgaaagtttatgcaggatccaatggagattttcgtcgacgatgaaactaagctgaccctacatggcttgcagcagtattatgtgaaactaaaagataatgagaaaaatcgcaagctgttcgacctcctagacgtgttagaattcaatcaggaaataacctgtaaaagcgtgcagaggttttctaccaccaattcatgcgggtaccagccaatttggccccgacacggacatcgggcaggggaacattgcttctag

SEQ ID NO: 184872 - DNA, 1332 bp, synthetic construct
  misc_feature 1..1332: note = Description of Artificial Sequence: Synthetic coding sequence
  source 1..1332: mol_type = other DNA
atggccgagaacgacgtggacaacgagctgctggactacgaggacgatgaggtcgagactgcagctggaggcgacggggccgaagcacccgccaagaaggatgtaaagggctcctacgtgagtatccatagcagcggatttagggatttcctcctcaagccggagcttctcagggcgatagtggactgcgggttcgaacatcctagcgaggtacagcatgaatgcattccccaagcaatcctaggaatggatgtcttgtgccaggccaagagcggcatggggaagactgcagtgttcgtgctcgccacactgcaacagctagaaccagtcaccggacaagtttatctgggtagggtcctcggccgtggattttggtgcgtgttcgtgagcgtgctggtgatgtgccatacacgcgagcttgcattccaaatatccaaggagtatgaaagattcagtaagtacatgccaaacgtcaaagtagcagtgtttttcggtggcctttccataaagaaagacgaagaggttcttaaaaagaattgtccgcacatcgtggttgggaccccaggacgcatcctggccttagcacgcaataagagccttaatctcaaacacatcaaacacttcatattggatgaatgtgacaaaatgctagagcagctggacatgcggcgcgatgttcaggagatttttcgcatgacaccccatgaaaagcaagtaatgatgttcagtgcaaccttatccaaggaaataagacccgtatgtagaaaatttatgcaggatcccatggagattttcgtggacgatgaaacgaagctcacactgcacggcctgcaacagtactacgttaagctaaaggataatgaaaaaaatcgtaagctttttgatctgctcgacgtgttagagtttaatcaggtggtgatttttgtgaagtccgtccaacgctgcattgccttagcccagctgctggtcgaacaaaattttccagcaatagcaattcaccgcggcatgcctcaggaggaaaggctctcccggtatcagcagttcaaagactttcaacgaaggattttggtggccacaaatctgtttggtagaggaatggacatagaacgtgttaacatcgcattcaactacgatatgccggaggacagtgatacttaccttcaccgggtggccagggccggcaggttcgggactaaggggctggctatcacctttgtttcggatgagaacgacgcgaagattttgaacgatgtccaagaccggttcgaagtgaacatcagtgagctgcccgacgagatagacattagctcctacatcgagcagacccgctag

SEQ ID NO: 184873 - DNA, 732 bp, synthetic construct
  misc_feature 1..732: note = Description of Artificial Sequence: Synthetic coding sequence
  source 1..732: mol_type = other DNA
atgtggaccatgagcagctggaccatgaagatgatgcggtggcggcaacagctgggcgaaatgggactcagaccactcccacgccgcatgtcacgcgctcctatgagtccctccacggccctcgcctttgtgacgagctgttcttcacagtcatgcagcggccctcttagcactgttgctctaagcatccgtcagaaagtatctgtgctagtgatgtgccacacacgcgaacttgcttttcaaatctccaaggaatatgaaaggtttagtaagtacatgcccaatgtgaaagtcgccgtcttcttcggtggcctgagtatcaagaaggatgaagaggtcctgaagaaaaactgtccccacatcgtggtcggtacaccgggacgcatcctcgccctggcccgaaataagagcctaaacctgaaacatattaagcatttcatcttagacgaatgcgacaagatgctggaacagctcgacatgaggagggacgtccaggaaatctttaggatgaccccccacgaaaagcaagtaatgatgttttccgctacattgagcaaagagatccgacccgtttgccgaaagtttatgcaggatgtgaatactctactgcccagccttccgccccttccagcgcggtgccttttacctttcttagctctgttcctgcggctgccctgtcactcatccgctaagaaagcagcctgcgcccagttgggtgtgatgacaccctag

SEQ ID NO: 184874 - DNA, 1332 bp, synthetic construct
  misc_feature 1..1332: note = Description of Artificial Sequence: Synthetic coding sequence
  source 1..1332: mol_type = other DNA
atggccgagaacgacgtggacaacgagctgctggactacgaggacgatgaggtcgagaccgctgctggtggagatggggctgaagcccccgctaagaaggatgtgaaggggtcttacgtttcaattcacagcagcggcttcagagactttttgctgaagccggagcttcttagggctatcgtagactgcggatttgaacatccatctgaggtccagcatgagtgcatcccacaggctatcctgggcatggacgtactgtgccaggctaagtccggcatgggcaagacagctgtcttcgttctcgctacccttcagcagctcgagcccgtcactggtcaggtctatctgggcagggtgctgggtagagggttctggtgcgtgttcgttagcgtgcttgtaatgtgtcatacccgggaactggcttttcagatctccaaagagtatgaacgtttctccaaatatatgcccaacgtgaaggtggcggtgttctttggcggactgagcataaaaaaggatgaggaagtgttgaaaaaaaactgtccacacatcgtcgtgggaacgcccggcagaatcctggccctggctcgtaacaagtcacttaacctcaagcatattaaacacttcattcttgatgaatgcgacaagatgctggaacagctcgacatgaggagagatgtccaagagatatttcggatgactcctcacgaaaaacaggttatgatgttttccgctacactctcaaaggagatcaggcccgtgtgccgcaagttcatgcaagatccaatggagatctttgttgatgacgagactaagttaactctgcacgggctccagcaatactacgtgaagttaaaggacaacgagaagaatagaaagctgttcgacttattggacgtactcgagttcaaccaggtagttatttttgttaagtccgtgcagagatgcattgctctggctcagctgctggtggaacaaaatttcccggcaatcgcaatccataggggaatgcctcaggaggaacgcctttctcgatatcagcagtttaaagactttcagcggagaatcctcgtggctactaacctgttcggccggggaatggacatcgaaagggtgaacatcgccttcaattacgatatgcctgaagactctgatacttacttgcacagagtggcccgagcaggcaggtttggaaccaaagggctggcaatcacttttgtgagcgatgaaaacgacgccaaaatccttaacgacgtgcaggacaggttcgaagttaacatcagcgagcttcctgatgaaattgatatctcaagttacatagaacagactcgatag

SEQ ID NO: 184875 - DNA, 420 bp, synthetic construct
  misc_feature 1..420: note = Description of Artificial Sequence: Synthetic coding sequence
  source 1..420: mol_type = other DNA
atggccgagaacgacgtggacaacgagctgctggactacgaggacgatgaggtggagaccgccgcaggaggagatggagcggaagccccagctaagaaggacgtcaagggatcatacgtctctatccattcaagcggttttcgcgactttctacttaaacccgaattgttaagagccatcgtggattgcgggtttgagcacccatcagaggtccagcacgagtgtatccctcaagcaatcctggggatggatgtcctatgtcaggcaaaatctgggatgggaaaaaccgctgtgtttgtacttgcaaccttgcaacagctcgagcccgtgacaggacagagccatgagcatatgacatctgtcactctggacaacttaaccgccgttggggacgtattgtcccaagcttggggttcctag

SEQ ID NO: 184876 - DNA, 732 bp, synthetic construct
  misc_feature 1..732: note = Description of Artificial Sequence: Synthetic coding sequence
  source 1..732: mol_type = other DNA
atgtggaccatgagcagctggaccatgaagatgatgcggtggcggcaacaactgggggagatgggcctgaggcccctgccccgcaggatgtctcgggctcccatgagcccgagcactgccttggcctttgtcacatcctgtagcagccagtcgtgctccggccctctttcaaccgtcgccctctcaattcgacagaaggtctcagtactagtgatgtgccatacaagagaactggcctttcagatttccaaagagtacgaacggttctccaaatacatgcccaacgtgaaagtagctgtgttcttcggagggctgagcattaagaaggatgaggaggtcctaaagaagaattgtccacacatcgtggtggggacaccaggaagaatcttggctcttgcccgaaataaaagccttaacctcaagcacataaaacacttcatactagatgaatgtgacaaaatgctggaacagctggacatgagacgggatgtgcaggaaatatttcggatgacaccccatgagaaacaggtgatgatgtttagtgccactctgtctaaggagatcaggccagtgtgcaggaagttcatgcaggacgttaacactctattgccaagcttgcctccccttcctgctaggtgcctacttcccttcctagccttgttccttcggctcccatgtcacagctccgcgaaaaaagcagcttgcgcgcaacttggagttatgactccgtag

SEQ ID NO: 184877 - DNA, 732 bp, synthetic construct
  misc_feature 1..732: note = Description of Artificial Sequence: Synthetic coding sequence
  source 1..732: mol_type = other DNA
atgtggaccatgagcagctggaccatgaagatgatgcggtggcggcaacagttgggggaaatgggattaaggcccctcccaagacgcatgtctcgtgctcctatgtccccctccaccgccctggcttttgtaacctcttgcagtagccagtcttgcagcgggccccttagtaccgttgcactcagcatcagacagaaagtcagcgttttggtgatgtgtcacacccgggagcttgcgtttcagatttccaaggaatatgaaaggttctccaaatatatgccaaatgtcaaagtcgccgtcttctttggaggactcagcatcaaaaaggacgaggaggtcttaaaaaaaaactgtccgcatatcgtagtgggcacacccggtagaatcctggctctcgcccgaaataagtcccttaatctgaaacatattaaacatttcatattggacgagtgtgacaagatgcttgagcaactggatatgcggcgggacgttcaggagatattccgtatgactccccatgagaaacaggtgatgatgttttccgctacactgtccaaggagatcagacccgtctgccgaaaatttatgcaggacgttaatactttactgccatccttgccccctctgccggcacggtgcctgctgcccttcctggcacttttccttcgactgccctgccattcgagtgcaaagaaggcagcgtgcgcccagttaggtgtcatgacaccttag

SEQ ID NO: 184878 - DNA, 420 bp, synthetic construct
  misc_feature 1..420: note = Description of Artificial Sequence: Synthetic coding sequence
  source 1..420: mol_type = other DNA
atggccgagaacgacgtggacaacgagctgctggactacgaggacgatgaagtggaaactgccgcaggcggtgatggggcagaagcccccgcaaaaaaagacgttaaaggaagctacgtgtcaattcacagtagcggatttcgtgatttcctgctgaaacccgaactgctgcgcgctattgtagattgcggatttgaacacccctcggaagttcaacacgaatgtattccacaggccatactggggatggatgtactttgccaagcaaagtctggaatgggtaagactgctgtcttcgttctggcaactcttcagcaactcgaaccggtaactgggcagtcacacgagcacatgacatccgtcactctcgacaatttaacagccgtcggggacgtcctctctcaggcatggggctcttag

SEQ ID NO: 184879 - DNA, 972 bp, synthetic construct
  misc_feature 1..972: note = Description of Artificial Sequence: Synthetic coding sequence
  source 1..972: mol_type = other DNA
atggccgagaacgacgtggacaacgagctgctggactacgaggacgatgaggtcgagactgctgcgggaggtgatggggccgaagcacccgcaaagaaagatgtcaaggggtcttacgtgagcatccattcctcggggtttagagattttcttctgaaacctgaactgctgcgcgcaattgtggactgcggatttgagcacccctcagaagtccagcacgaatgcattccccaggcaatcctggggatggatgtcctgtgccaagctaagagtggtatgggtaaaactgctgtgtttgtgcttgccacactgcagcagctagagcctgtcactgggcaagtgagcgttcttgtaatgtgccacacaagagaactggctttccagatttccaaagagtatgagagatttagcaagtacatgcctaacgtgaaagtagcagtgttcttcgggggactgagcatcaaaaaggatgaggaggtactgaagaagaactgtccccacatagtggtgggtaccccaggacggattctggctctggctaggaacaagagcctgaacctaaagcacatcaaacactttatcctcgatgaatgtgataagatgctcgagcagctcgacatgaggagagacgtgcaggaaatcttcagaatgactcctcatgagaagcaagtgatgatgtttagtgccaccctttctaaagagattcggccagtgtgccgaaagttcatgcaggatcctatggaaatctttgtggatgacgagaccaaactgacactgcatggcctccagcagtactatgtgaagttgaaggacaacgagaaaaacaggaaactgtttgatctgctggatgttctggagttcaaccaagaaattacctgcaaatctgttcagcgattttctaccaccaactcctgcggctaccagcccatctggccccggcacggccaccgagccggcgagcattgcttttag

SEQ ID NO: 184880 - DNA, 1332 bp, synthetic construct
  misc_feature 1..1332: note = Description of Artificial Sequence: Synthetic coding sequence
  source 1..1332: mol_type = other DNA
atggccgagaacgacgtggacaacgagctgctggactacgaggacgatgaggtcgaaaccgcggccggcggggatggtgccgaggccccagcaaagaaggatgtgaaaggctcctatgtctctattcactccagcgggttccgggactttctacttaagccagagctccttcgagctatcgttgactgtggattcgagcatccaagcgaagtgcagcatgagtgtatcccacaagccatcctggggatggacgtgctgtgccaggccaagagcggaatggggaaaactgcagtgttcgtgcttgcgacacttcagcagttggaacctgtcaccggccaggtctatctgggaagagttttgggacgggggttctggtgcgtgtttgtttcagtccttgtgatgtgccatacccgagaactggcatttcaaatatccaaagagtatgagcgtttcagcaagtacatgcccaacgtaaaagttgcagtctttttcggtggcctcagtatcaaaaaagatgaagaagttttgaaaaaaaattgtcctcacatcgtggtggggacacctggtaggatcttggctcttgcgcgtaacaagtcattaaatcttaaacacatcaaacactttatcttagacgagtgtgacaaaatgctggaacaactggacatgcgaagagacgtccaggagatatttaggatgacaccccacgagaagcaggttatgatgttttctgccacgctgagtaaggaaattagacccgtgtgccgcaaattcatgcaggatcccatggagatctttgtggacgacgagaccaagttaactcttcacggtcttcaacaatattatgtgaagctcaaagataatgagaaaaaccgcaaactctttgacctgctggatgtgctggaatttaatcaggtggtcattttcgtgaaaagtgtacagagatgcatcgcactggctcagctcttggtcgaacagaacttcccggcaattgctatacatagaggtatgccccaggaggaaaggctctctcgctatcagcaattcaaggactttcaaagacggatcttagttgcaacgaacctgtttggtcgaggcatggacatcgaaagagtgaacatcgcctttaactacgatatgcccgaggattctgatacctatctgcacagggtcgctcgcgccggtaggtttggaactaaaggcctagcaatcacgttcgtatcagacgagaacgatgctaaaatcttaaacgatgtgcaggatcgattcgaggttaatatctccgaactccccgatgagatcgatattagctcttatatcgaacagacacgatag

SEQ ID NO: 184881 - DNA, 732 bp, synthetic construct
  misc_feature 1..732: note = Description of Artificial Sequence: Synthetic coding sequence
  source 1..732: mol_type = other DNA
atgtggaccatgagcagctggaccatgaagatgatgcggtggcggcaacagttaggagagatgggacttaggccattgccacgaagaatgtccagggcccccatgagtccctctacagcactcgcttttgtcacgagttgcagctcgcagtcctgttctggacctctgagtactgtggcactatcaattcgccagaaggtgtctgtcttagtcatgtgtcacacccgcgaactcgccttccaaataagtaaagagtatgagagattctcaaaatatatgcccaatgttaaagtggccgtatttttcgggggactttccattaagaaagacgaggaggttcttaaaaagaattgccctcatattgtggtcgggacccccggccgaatcttggcactcgcccgaaacaaatctctgaatctcaagcacatcaaacactttattcttgatgaatgcgacaagatgctcgaacagttggacatgcgacgcgatgtgcaagagatattccgcatgaccccacatgaaaagcaggtgatgatgttctccgcgaccctttccaaggagattaggcccgtgtgtaggaagttcatgcaggacgtaaacaccttactgccgtcactgccacctttgcccgcccgatgtctgctcccattcttggctctgttcctacgcttgccctgccattctagcgcaaagaaggcagcgtgcgcccagctcggagtgatgacaccttag

SEQ ID NO: 184882 - DNA, 1053 bp, synthetic construct
  misc_feature 1..1053: note = Description of Artificial Sequence: Synthetic coding sequence
  source 1..1053: mol_type = other DNA
atgtggaccatgagcagctggaccatgaagatgatgcggtggcggcagcaactcggcgaaatgggcctccgaccactgcctcgccggatgagccgcgcgcccatgagtccttcaacagcgctggcctttgttacaagttgcagcagtcagtcatgttcaggaccgctgagcaccgttgcgctgtccattcgccagaaggtcgctgtgttctttggaggcttgtcaatcaagaaagatgaagaggttttgaaaaaaaactgtccacacatcgttgtgggcacccccggtcgaatacttgccctggcacgaaacaagtcactgaacctgaaacacattaaacactttattctggacgagtgtgacaaaatgctggaacagctggacatgcgaagggacgttcaggagatattcagaatgacaccacacgagaaacaggtcatgatgtttagcgccactctatcgaaggagattcggccggtttgtcgcaaatttatgcaggacccaatggagatatttgtcgacgacgagaccaagctgaccctgcatgggctgcagcagtactatgtcaagttgaaggataacgaaaagaatcgtaagctcttcgaccttttggacgtgctggagttcaatcaagtggtgatcttcgttaagtctgttcaaagatgtatcgctctcgctcagctgctagtggagcagaatttcccagctatcgcaatccatcggggcatgccccaggaggagcggctgagtcgctatcagcagttcaaggacttccaacgtcgtatattagtcgccaccaatctgtttgggcgagggatggatatagaaagggtgaacatcgcttttaattacgacatgccggaggattctgacacatacttgcaccgagtcgccagagccgggaggttcggaaccaaaggcctcgcaatcactttcgtgtccgatgagaatgacgcaaagattttaaatgatgtgcaagacaggttcgaagtgaacatctccgagctgcctgacgagattgacatctcctcctatattgagcagactcgctag

SEQ ID NO: 184883 - DNA, 1332 bp, synthetic construct
  misc_feature 1..1332: note = Description of Artificial Sequence: Synthetic coding sequence
  source 1..1332: mol_type = other DNA
atggccgagaacgacgtggacaacgagctgctggactacgaggacgatgaggtagaaacggcagctggaggcgacggggccgaggctcccgccaagaaggacgtcaagggaagctatgtgagtattcattcttccgggtttagggactttctgttgaaaccagaactgctgcgtgccatcgtggattgcggattcgaacaccccagcgaggttcagcatgagtgcatacctcaagctatcttggggatggacgtcctatgtcaggccaaatctggcatggggaagaccgccgtctttgtgttagccacgctgcagcagctggaacccgtaaccggtcaggtgtatttgggaagggttctcgggcggggattctggtgtgtgttcgtttccgtgctggttatgtgccacactagagaactcgccttccaaatcagcaaagagtatgaaaggttttccaagtatatgccgaacgtaaaagtggcagtcttcttcggagggttgtccatcaaaaaggatgaggaggtactaaaaaagaattgccctcatatcgtggtggggactccaggtcggatccttgccctagccaggaataagtctcttaacttgaaacatatcaagcattttatactggacgaatgtgataaaatgctagagcagctcgacatgaggcgcgatgtgcaggagatattccggatgaccccccacgagaaacaggtgatgatgttctctgccactcttagcaaggagattaggcctgtgtgccgtaagtttatgcaagatcctatggaaattttcgtcgatgatgagacaaagttgaccttacacggtctgcaacaatattacgtaaagctcaaagataatgagaagaaccgcaagcttttcgacttattggatgtcttagagttcaatcaagtggtgattttcgtgaagtccgtacagcgctgtattgcccttgcccaactgctcgtggaacagaacttccccgccattgccatccacaggggcatgccccaagaggagcgtctgtccagataccagcaatttaaggattttcaacgtcgtattctggtagccactaacctgttcggacgagggatggacattgagcgcgtgaacattgccttcaattacgatatgcctgaagatagcgacacctacctccatagagtcgccagagccggacggttcggcacgaagggcctcgccatcacctttgtgtcagatgaaaacgacgctaagatcctcaatgatgtccaggatcgcttcgaggtgaacatcagcgagctgccagatgaaatcgacatctctagttacatagaacagaccaggtag

SEQ ID NO: 184884 - DNA, 1053 bp, synthetic construct
  misc_feature 1..1053: note = Description of Artificial Sequence: Synthetic coding sequence
  source 1..1053: mol_type = other DNA
atgtggaccatgagcagctggaccatgaagatgatgcggtggcggcagcaactgggagagatgggcttaaggcctctgccaagacgtatgtctagggcacctatgagcccgagtaccgccctcgcctttgttacgtcctgctcttcacagtcatgttccggccccctgagtactgtggccctcagcatcaggcagaaggttgccgttttcttcggagggttgagtattaaaaaggatgaagaggtgcttaaaaagaattgtccgcatatcgtggtggggactcctggtcgaattctggccctggcccgcaacaagtcactcaatctaaaacatatcaagcatttcattctcgacgagtgtgataaaatgttggagcagctagatatgcggagggatgtgcaggaaattttccgaatgaccccccacgaaaaacaggtgatgatgttctctgctaccctgtctaaggagatcaggcccgtttgtagaaagtttatgcaggaccctatggaaatcttcgtggacgacgagaccaaattgactcttcacggcctccagcagtattatgtaaagctcaaggataacgagaagaaccggaagctgttcgacctcctcgacgttctcgagttcaaccaggtggtcatttttgtgaagtccgtgcagcggtgtatcgcgctcgcccaactcctagtagagcagaacttccctgccatcgccatccacagggggatgccccaggaggaacgactatcccgctaccagcagtttaaagattttcaacggcggatacttgttgccaccaacctattcggcaggggtatggatatagagagagtgaacattgccttcaattacgacatgcctgaggactctgacacctacttgcatcgtgtagccagagctggccgcttcggtacaaagggattggcaattacctttgtgtcagacgagaatgacgctaagatactgaatgatgtgcaggatcgcttcgaggtgaacatcagtgagcttcccgacgagattgatatcagttcttacatcgagcagacacgttag

SEQ ID NO: 184885 - DNA, 732 bp, synthetic construct
  misc_feature 1..732: note = Description of Artificial Sequence: Synthetic coding sequence
  source 1..732: mol_type = other DNA
atgtggaccatgagcagctggaccatgaagatgatgcggtggcggcaacaattaggggagatgggattgagaccattaccgcggcgcatgtcacgagcgccaatgtcgccatccaccgctctggcattcgtcactagctgtagcagccagagctgtagcggaccgctatctactgtggccctttcaattcgccagaaggtgagcgtactggtgatgtgtcataccagagagctcgctttccagattagcaaggagtatgagcgattctcgaagtacatgccgaacgtgaaagtagcagtcttcttcggtggattatctattaaaaaggatgaagaggtgcttaaaaagaactgcccacatatcgtcgtgggaacccctggcaggattctggcgctggccaggaataaaagtctaaacctgaaacacatcaagcatttcatcctggatgaatgcgacaagatgctggagcagctggacatgcgccgggatgttcaggaaatttttagaatgaccccccatgagaagcaggtgatgatgttttccgcaacgctcagcaaggagattagaccagtgtgtcgtaaatttatgcaagatgtgaacactttgctgccctcattaccacccctgccggcccgctgtctgctgccattcctggcccttttcctgcggctcccctgtcattcctctgcaaaaaaagccgcctgtgcccaactaggggtgatgactccatag

SEQ ID NO: 184886 - DNA, 420 bp, synthetic construct
  misc_feature 1..420: note = Description of Artificial Sequence: Synthetic coding sequence
  source 1..420: mol_type = other DNA
atggccgagaacgacgtggacaacgagctgctggactacgaggacgacgaagtggagactgcagcagggggcgacggcgccgaagcgcccgcaaagaaggacgtgaagggcagttatgtcagtatccactcaagtgggttccgtgactttttgctcaagcccgagctcctgcgcgccattgtcgactgcggcttcgaacacccttctgaggtccagcatgaatgcatcccacaggcgattctcgggatggacgtcctatgccaagccaagtccggtatgggtaagacagccgtttttgtgctggcgaccctccaacagctggaacctgtgacggggcaatctcacgaacatatgactagcgtgactctggacaacctgactgccgtgggagacgtgctgagtcaggcgtgggggtcctag

SEQ ID NO: 184887 - DNA, 1053 bp, synthetic construct
  misc_feature 1..1053: note = Description of Artificial Sequence: Synthetic coding sequence
  source 1..1053: mol_type = other DNA
atgtggaccatgagcagctggaccatgaagatgatgcggtggcggcagcagctgggggagatggggctgcggccccttcccaggcgcatgtccagggcaccaatgtcaccctctacggccctcgcctttgtgacttcttgcagctcccagagctgctctgggccactctctacagtggccttgtcaattcgccagaaagtagcagtcttttttggggggctgtcaattaagaaagacgaggaggtattaaaaaagaattgtccacacatcgtcgtgggaacccccggcaggatactggctttagccaggaacaagtcattgaatctgaaacatattaagcacttcatcctcgatgagtgtgacaaaatgcttgagcaactggacatgcggagggacgtccaggagatctttaggatgactccgcatgagaaacaggtcatgatgttctctgcaaccctctcgaaggagatccgtccggtctgtcgcaaatttatgcaggatccgatggaaatcttcgtagacgacgagactaagctgacactccacggactgcagcagtactacgtaaaactgaaagacaacgagaaaaacagaaagctgttcgacctgctggatgtgctggagtttaaccaggtggtgatattcgtcaaatcggtccagcgatgcatagctctcgcccaactgctggtcgaacagaattttccagcgatagccatccacagaggaatgcctcaagaggagagactgagtcggtatcagcagttcaaggacttccagagacgaatcttggtcgcaactaatttattcggacggggcatggatattgagcgggtgaatattgctttcaactatgacatgcctgaagattcagacacctacctgcaccgcgtggctcgagccggccggtttggcaccaaaggactggcaattactttcgtgagtgatgaaaatgatgctaagatccttaacgacgtccaagatcgtttcgaggtcaatatttccgagctcccggatgagattgacatcagcagttatatcgagcagacacgctag

SEQ ID NO: 184888 - DNA, 972 bp, synthetic construct
  misc_feature 1..972: note = Description of Artificial Sequence: Synthetic coding sequence
  source 1..972: mol_type = other DNA
atggccgagaacgacgtggacaacgagctgctggactacgaggacgacgaggtggaaacagccgccggaggggatggggcagaggcacccgcgaagaaagatgtgaaaggatcctatgttagcatccattcatcagggttcagagactttctgctcaaaccagaactactgcgcgcaattgtcgactgtgggtttgaacatccgtctgaagtgcagcatgagtgcatcccacaagctatcctggggatggatgtgctctgccaggccaagtccgggatgggcaagacagcagtttttgtactggccaccttgcagcagttggagccagttactggtcaggtgtccgtcctggtcatgtgtcataccagggagctggcattccagatctcaaaggagtacgagaggttctcaaagtacatgccaaatgtgaaggtcgccgtcttttttggtggcctgagcattaaaaaggacgaggaggtgcttaagaaaaactgcccacacatcgtggtggggacaccaggccggattctcgccctggccagaaacaagtccttgaatctgaagcatattaaacactttatcctggacgaatgtgataaaatgctggaacaattagatatgcgacgggatgtgcaggagatttttcggatgacgccccacgaaaagcaagtaatgatgttttcagctactctctccaaagagataagaccggtctgcagaaaattcatgcaggatcccatggagatttttgtagacgacgagactaaactgaccctccatgggctccagcagtattatgtcaagcttaaggacaatgagaaaaatagaaagctttttgacctactcgacgttttagagttcaaccaggagattacatgcaaaagcgtgcagcgattctccacaaccaacagttgcgggtatcagccaatttggccgcgacacgggcacagggctggcgagcactgtttttag

SEQ ID NO: 184889 - DNA, 1053 bp, synthetic construct
  misc_feature 1..1053: note = Description of Artificial Sequence: Synthetic coding sequence
  source 1..1053: mol_type = other DNA
atgtggaccatgagcagctggaccatgaagatgatgcggtggcggcagcagctgggcgagatgggtctgagacctctacctcgcaggatgagcagagcgcccatgtccccaagcaccgcactagccttcgtgacttcctgctcatcacaatcctgtagtgggccattgagcacagtggcccttagcattcgacagaaggttgctgtctttttcggcgggctgagcatcaagaaggacgaagaggtcctgaaaaaaaattgtccgcatatcgtggtggggaccccaggtagaatccttgctctcgcacggaataagtcccttaatctgaagcatatcaaacacttcatactcgatgagtgtgacaagatgttagaacagttagatatgaggcgtgacgtgcaggagatatttcgcatgactcctcacgagaaacaagttatgatgttctcggcaaccctgtctaaagagataagacctgtgtgcagaaagttcatgcaggacccaatggaaatattcgtggacgacgagactaagctgactctacatggcttgcagcagtactacgttaagctgaaggacaatgagaagaaccgcaagctgttcgacctcctggacgtcctggagtttaaccaagtggtgatattcgtaaaaagtgtgcagcggtgcatcgctttggcccaacttctggtggagcagaatttcccagccatcgccatacatagggggatgccccaggaagagcgcctgtcacggtaccagcagtttaaagatttccaaagacgcattctggtggcaacgaacctgtttggacgtgggatggatattgagcgcgtgaatatcgcattcaactacgacatgccagaggatagcgatacctatttgcatcgggtggctcgggccgggagatttggaacaaagggacttgctatcactttcgtctccgacgagaatgacgccaaaatcttaaatgatgttcaggatagatttgaggtgaacatcagcgaactcccagatgagattgacattagcagttacatagagcagaccaggtag

SEQ ID NO: 184890 - DNA, 420 bp, synthetic construct
  misc_feature 1..420: note = Description of Artificial Sequence: Synthetic coding sequence
  source 1..420: mol_type = other DNA
atggccgagaacgacgtggacaacgagctgctggactacgaggacgacgaggtggagacggctgccggaggcgatggagcagaagccccagctaagaaggatgtgaagggttcgtatgtgtccatacattcctctggcttcagagactttctcttgaaacctgaactgctccgggcaatagtggactgcggcttcgagcatcccagtgaagtgcagcacgagtgtatacctcaagcaatcctgggcatggatgtcctttgccaggctaagtcaggcatgggaaagactgcagtatttgtgctagccaccttgcaacagctcgagcctgtgacgggtcagtctcacgaacatatgacatcagtgacccttgacaatctcactgccgttggggacgtgctttcacaggcttggggatcttag

SEQ ID NO: 184891 - DNA, 1332 bp, synthetic construct
  misc_feature 1..1332: note = Description of Artificial Sequence: Synthetic coding sequence
  source 1..1332: mol_type = other DNA
atggccgagaacgacgtggacaacgagctgctggactacgaggacgatgaagtggaaactgccgcggggggggatggcgcggaggctcctgccaagaaggacgtcaagggatcctacgtttctattcacagctcgggcttcagagacttcctactcaaacctgaactccttagggccatcgtggactgtggtttcgaacacccatccgaagtgcagcatgagtgcattccccaggcaatcttaggcatggacgtgctttgccaggcgaagtccgggatgggaaaaacagcagtctttgtgttagcaactctgcagcagctggaacccgtaactggacaggtatatctaggtcgcgtgctcggcaggggcttctggtgcgtcttcgtctctgtgctggtcatgtgccacacccgggagctggctttccagatttcaaaagagtacgaaaggttttctaagtatatgcccaacgtgaaagtcgccgtgttttttggaggccttagcattaagaaagacgaagaggttctaaagaagaattgccctcacatcgtggtgggtacacctggacgcatcctggcactggccaggaacaaaagtttgaatctcaaacatattaagcatttcatcctcgacgaatgcgataaaatgctggaacagctggacatgaggagagacgtgcaggaaatctttcgcatgactcctcacgaaaagcaggtgatgatgttcagtgccacactgtctaaggaaatccgccctgtctgccgaaaattcatgcaagatcccatggagatatttgttgacgatgaaactaagctgactctgcatggcctccagcagtactacgtgaaactgaaggacaacgagaagaaccgcaaactttttgacctgttggatgtgctagagttcaaccaggtggtgatttttgtgaaatccgtccagcgttgcattgctctggcacagctattggttgagcagaactttcctgcaatcgccattcacagagggatgcctcaagaggagcggctgagccggtatcaacagtttaaagatttccagcgccgtatcctcgtggccacaaatttgtttgggcgcggcatggatatcgagcgcgtcaacatagccttcaattatgacatgccggaggattctgacacctacctgcaccgagtggcccgcgccgggcgatttggcacaaaaggtttggccattaccttcgtgtctgacgagaacgatgctaaaatcctcaacgacgtgcaggatcggtttgaggtcaatatctccgagctacccgatgaaatcgatatcagctcttatattgaacaaacacgctag

SEQ ID NO: 184892 - DNA, 972 bp, synthetic construct
  misc_feature 1..972: note = Description of Artificial Sequence: Synthetic coding sequence
  source 1..972: mol_type = other DNA
atggccgagaacgacgtggacaacgagctgctggactacgaggacgatgaggtggaaacagcggcgggaggagacggggcggaggcccctgccaagaaagacgtgaagggatcttacgtctccattcattcaagcgggtttagggatttcctcctcaaaccagagttgttacgggccatcgttgattgtggattcgagcatccctccgaagtccagcacgagtgcatacctcaagccatccttgggatggatgttctatgtcaggctaagagcggcatgggcaagactgccgtgttcgttctcgccacactccagcaactggagcctgtgactggccaagtgagcgttctagtcatgtgtcacacacgcgagctggcttttcagatttcaaaagagtacgagagattttccaagtacatgcctaatgttaaagtggccgtttttttcgggggattatctataaaaaaggacgaggaggttttgaagaaaaattgcccccacatcgtcgttggcactcccggtcgcatcctagccctggccaggaacaaaagcctaaatctgaagcacataaagcattttatcctcgatgagtgcgataaaatgctcgagcagctggacatgcgacgagatgtgcaggaaattttcagaatgacgccacacgagaagcaagtcatgatgtttagcgccaccctgtccaaggagatccgacctgtttgtcgaaaattcatgcaagaccctatggagattttcgttgatgatgagacaaagcttacactgcacggtcttcagcagtactacgttaagctgaaggataacgaaaagaaccgtaaacttttcgacttgctggacgtgctagagtttaaccaagagatcacatgtaaatcggtacagaggttctccacaaccaacagctgtggataccagcccatttggccacgccacggtcatcgtgcaggggagcactgtttttag

SEQ ID NO: 184893 - DNA, 972 bp, synthetic construct
  misc_feature 1..972: note = Description of Artificial Sequence: Synthetic coding sequence
  source 1..972: mol_type = other DNA
atggccgagaacgacgtggacaacgagctgctggactacgaggacgacgaggtggagactgccgccggcggtgatggggcagaagctccagccaagaaggacgtgaagggaagctatgtgtccatccactcgtccggtttcagagattttctcctgaaacctgaactactgagggctatcgtggactgtggctttgagcatccaagtgaagtgcagcatgaatgcattccccaggccatcttgggtatggacgtgctctgtcaggctaaaagcggcatgggaaagaccgccgtcttcgttctggcaacattgcagcagctggagccagtgaccggccaagtctctgtattggtgatgtgtcacaccagggagttagctttccaaatctcaaaagagtacgagaggttctccaagtacatgccaaacgtgaaggtcgccgtgttttttgggggactgtcgattaaaaaggacgaagaagtgttaaaaaagaactgccctcatatcgtagtcgggacccccggtcgcattcttgctctggcccggaataagtcactgaatttgaagcatatcaagcacttcattctggatgagtgcgataaaatgctagagcaactagacatgcgacgggacgtccaggaaatttttagaatgaccccccacgagaagcaggtcatgatgttttcagcaaccctctccaaagagatccgacccgtgtgcagaaaatttatgcaggatcccatggagatcttcgtcgatgacgagacgaaattgaccctccacggattgcagcagtattatgtgaagctgaaggacaacgagaaaaaccggaagctgtttgacctcttagatgtactggagttcaaccaggaaatcacgtgcaagtcagttcaaagattttcaacaactaatagctgtggctaccaacccatttggcccaggcatgggcacagggcaggcgagcactgcttttag

SEQ ID NO: 184894 - DNA, 1053 bp, synthetic construct
  misc_feature 1..1053: note = Description of Artificial Sequence: Synthetic coding sequence
  source 1..1053: mol_type = other DNA
atgtggaccatgagcagctggaccatgaagatgatgcggtggcggcagcaactcggcgagatgggcctacgtcctctcccgcgacgcatgtcccgggctccaatgagccctagcaccgccttggctttcgtgaccagctgcagcagtcagtcctgcagcggccctttgagcaccgtcgccctgtcaatccgacaaaaagttgctgtgttcttcgggggattgagcattaaaaaagatgaggaggtgctgaagaagaactgtccacatatcgttgttggtaccccagggcggatcctggccctcgcacggaacaaaagtttgaatctaaaacacatcaagcacttcatactcgacgaatgtgacaaaatgctcgaacagctcgacatgcgtcgagatgtgcaggaaatctttaggatgaccccgcatgaaaagcaagtgatgatgtttagcgctacattgagtaaggagatcagacctgtgtgtcgtaagtttatgcaggaccccatggagatctttgtggatgacgaaacaaagctgaccctacatggtctgcaacaatactacgtgaaattgaaggataacgaaaagaatcgcaaactgttcgacctattggacgtccttgaattcaatcaggtggtgatctttgtcaaatctgtccagcgatgtatagctcttgctcagctgttggtggagcagaatttccccgccatagctatccaccgaggcatgccccaggaagaaagacttagtagataccagcaattcaaggatttccagaggaggatcttggttgctaccaacttatttgggagggggatggatattgaacgggtaaacatcgcgtttaattacgacatgccagaagactctgacacatacctgcaccgggtggctagagcagggcggttcgggacaaaagggctggccataaccttcgtcagcgacgagaatgatgcgaagatactcaacgatgtgcaggatagatttgaagtgaatatctctgagttgcccgatgaaatcgatattagctcatacatcgaacagacacgatag

SEQ ID NO: 184895 - DNA, 420 bp, synthetic construct
  misc_feature 1..420: note = Description of Artificial Sequence: Synthetic coding sequence
  source 1..420: mol_type = other DNA
atggccgagaacgacgtggacaacgagctgctggactacgaggacgacgaggtcgagacagcagccggaggggacggcgcggaggcgccagctaaaaaggacgtaaagggatcctacgtgtcgattcattctagtggcttccgcgactttctgttaaaacccgaacttttgagggccattgttgattgcggatttgagcaccccagtgaagtgcagcatgaatgcattcctcaggctatattaggcatggacgtcctttgccaagcgaaatcgggcatgggaaagactgccgttttcgtgttagcaaccttgcagcagctggaacctgttacgggccaatcccacgaacacatgacgagcgtcacattggacaacctgacggctgtgggtgacgtcttgtcgcaggcctgggggagttag

SEQ ID NO: 184896 - DNA, 1053 bp, synthetic construct
  misc_feature 1..1053: note = Description of Artificial Sequence: Synthetic coding sequence
  source 1..1053: mol_type = other DNA
atgtggaccatgagcagctggaccatgaagatgatgcggtggcggcagcaactaggcgagatgggcctcaggccacttccaagacgcatgagccgtgccccgatgtcaccaagcacagcgctcgcctttgtgacctcatgctcttcccagtcttgcagcggcccactctccaccgtggccctgtccattagacagaaggtggcagtcttctttgggggcttgagcattaagaaggatgaagaggttctgaagaagaactgcccgcatattgtggtgggtactcccggccgtattctggctctggccagaaataaatctctgaaccttaagcacatcaagcattttattcttgatgaatgtgataagatgctggagcagctggacatgcgccgcgacgtgcaggaaatattccggatgacaccacatgagaagcaagtcatgatgttctcggcgacactttcaaaagagattcgccctgtgtgtcggaaatttatgcaagatccgatggagattttcgtggacgatgagaccaagctcacgctacacggtctgcagcagtattatgttaaattgaaagataatgagaagaacagaaaacttttcgatttgcttgatgtgctcgaattcaaccaggttgtgatttttgtcaagagcgtgcagcgatgcattgctctggcccagctgctagttgagcagaatttcccggctatcgcgatccaccgcgggatgccacaggaggagaggctgtccaggtaccaacagttcaaggacttccagaggcggattctggtcgctaccaatctcttcggacgggggatggacattgagcgtgttaatattgcattcaactacgacatgccggaagactctgatacttacctgcaccgcgtcgcgcgggccggaaggttcggaaccaaggggctcgctattacttttgtatccgatgaaaatgatgcaaagatcctcaacgatgtgcaggatcgcttcgaagtcaacattagtgaactgccagacgagatcgatatcagttcttacatcgaacagacacgctag

SEQ ID NO: 184897 - DNA, 420 bp, synthetic construct
  misc_feature 1..420: note = Description of Artificial Sequence: Synthetic coding sequence
  source 1..420: mol_type = other DNA
atggccgagaacgacgtggacaacgagctgctggactacgaggacgatgaggtggaaacggccgcgggcggtgacggcgccgaggctcctgccaaaaaggacgtaaagggaagctatgtcagcatccattcttctggttttcgcgactttctgctaaagcctgaattgctgagggccatagtggattgtgggttcgaacacccatctgaagtgcagcacgaatgtatcccacaggctattctggggatggatgtgctatgtcaggcgaagtccggtatggggaagactgccgtgttcgtgctggccactctgcagcagctggagccagtcacaggtcagtcccacgagcacatgacaagcgttactctggataacctgaccgcggtgggcgacgtattatcacaggcttggggatcgtag

SEQ ID NO: 184898 - DNA, 1332 bp, synthetic construct
  misc_feature 1..1332: note = Description of Artificial Sequence: Synthetic coding sequence
  source 1..1332: mol_type = other DNA
atggccgagaacgacgtggacaacgagctgctggactacgaggacgacgaagtggagactgccgccggaggagatggggccgaagctcctgctaagaaggacgttaaaggctcctatgtatcgattcatagctctggattcagagactttcttcttaagcctgagctgctgcgcgccatcgtggactgcggcttcgagcacccttctgaagtccaacatgagtgcatcccacaggcaatcttaggaatggatgttctgtgtcaggccaagtcagggatgggcaagaccgcagtctttgtgcttgctaccttgcaacagctggaacctgtcacaggccaggtatacctgggaagagtgctcgggcgtgggttctggtgcgtgtttgtgagtgttttagtgatgtgccacacacgagaactggcattccagattagtaaggagtacgagaggttcagcaaatacatgcctaatgtgaaagtcgccgtcttcttcggagggctctccataaaaaaggacgaggaagtgctcaagaaaaactgcccacacattgtggtgggtacacccggccgcatcctcgctctggcccgaaacaagagcctaaacctgaagcacattaaacacttcattcttgatgagtgtgacaaaatgctggaacagttggatatgcgacgggatgtgcaggagatcttccgcatgacccctcacgaaaagcaggtgatgatgtttagcgccacactctccaaagaaatccggccggtgtgtagaaagttcatgcaagatccaatggagatcttcgtcgacgatgaaaccaagctcactttacacggcctgcaacagtattatgtaaaattgaaggacaatgagaaaaatcgaaagctgtttgacctgctcgacgtgctggaattcaatcaagtggtgattttcgtcaagtcggtacagaggtgtatcgcgctggcccagctgctcgtggagcagaatttccccgccatcgccattcataggggcatgcctcaggaggaaagactgtcgcggtaccaacaatttaaagattttcagcgaagaatattagtcgcaaccaatcttttcggaaggggaatggacatagaaagagttaatatcgccttcaactacgacatgcctgaggactccgacacttatctgcatcgggtcgcccgcgcgggacggttcggaacgaagggactggccatcacctttgtgtccgacgagaacgatgccaagatcctcaatgatgttcaggatagattcgaggtgaacatctccgaactgcctgacgagatagacatcagcagttacatcgagcagactaggtag

SEQ ID NO: 184899 - DNA, 552 bp, synthetic construct
  misc_feature 1..552: note = Description of Artificial Sequence: Synthetic coding sequence
  source 1..552: mol_type = other DNA
atggagatcttcgtggacgacgagaccaagctgaccctgcacggcctgcagcagtactatgttaagctgaaggataacgaaaagaatagaaaactgttcgacttgcttgacgtgctggagttcaaccaagtggtcattttcgtgaagagcgtccaacgatgcatcgcactcgcccagctgctggtggaacagaactttccagccatcgcaatacaccgtggcatgccccaggaagagaggtggttgagcagataccagcagtttaaagatttccagcgacgtatcctcgtcgcaacaaacttattcggacggggtatggacatagaaagggtcaatattgctttcaactacgacatgcctgaagactccgacacctatctgcatagggtggctcgggccgggagattcggtactaagggactggcaattacttttgtcagcgatgagaacgatgccaaaatcttgaatgacgtgcaggaccggttcgaagttaatatctccgagcttcccgacgagattgatatatcatcctatattgagcagacccggtag

SEQ ID NO: 184900 - DNA, 2073 bp, synthetic construct
  misc_feature 1..2073: note = Description of Artificial Sequence: Synthetic coding sequence
  source 1..2073: mol_type = other DNA
atgggcgacgaggactgggaggccgagatcaacccccacatgagcagctacgttccgatattcgagaaggacagatacagtggagaaaatggagataatttcaacagaactcctgcttcgtcctctgagatggacgatgggccatccagacgcgaccacttcatgaagtcggggttcgcttccggaaggaactttggaaatcgcgatgctggagaatgtaataaaagggataatacatcaaccatgggggggttcggggtcgggaaatcatttggaaaccgcggcttttcaaattcacgctttgaagacggcgattctagcggtttctggcgggaatcatccaatgactgcgaggacaacccaactcgaaaccggggcttcagtaaacggggcgataacgatttggaccctgacgagtgtatgcaacggactggtggcctgtttggttccaggcgcccagtgctgagtggaacgggcaacggagatacttcccagtctaggtcaggctcaggatctgaaagaggaggatacaagggactgaacgaagaggtaatcaccggatccgggaagaactcttggaaatccgaggcagagggaggggaaagcagcgacacccaaggccccaaagtgacatacatcccaccgccccccccagaagacgaagactcaattttcgcccactatcagacggggatcaacttcgataaatacgatacaatcctcgtggaggtgagcggacacgacgcaccccctgccatactaacattcgaggaggcaaatttgtgtcagaccttgaataacaatatcgctaaggccgggtacaccaagctgacccctgtccagaagtacagcattccgatcatattggcaggccgcgacctcatggcttgtgcccagacaggcagcggaaagacggccgcttttctcttgcccatcttggcgcacatgatgcacgatggcatcaccgctagcaggtttaaggagctgcaggaacctgaatgcataattgtggcccccacaagggaactcgttaatcagatctatctggaggcaaggaaatttagttttggcacatgcgtgagggccgtggtgatttacggcggaacccagttgggacatagcattcggcagattgtccaagggtgtaacatattgtgtgccacccctggccgcctgatggacatcatcggcaaggagaagataggccttaaacagatcaaatatctagtgctcgatgaagcagaccgcatgttggatatggggtttggaccagaaatgaaaaagctcatttcctgccctgggatgccctctaaagaacagcgacaaaccttgatgttctcggcaacctttcccgaagaaattcaaagactggccgccgaatttctcaagagtaactatctgtttgttgccgtcgggcaggtgggcggggcttgtagggatgtacagcagacggtactccaggtgggccagtttagcaaacgggagaaactggtggaaatactcagaaacatcggtgatgagcgcacaatggttttcgtagagacaaagaagaaagcagacttcatagccacctttctgtgtcaggagaagatatccacaacatctatccacggagacagagaacagcgcgagcgggaacaagccttaggcgacttcagatttggcaaatgcccggttctcgtagccacatcagtggccgcgcgaggtctggacatcgagaacgtccagcacgtaatcaattttgatctgccctcaacgatcgacgagtacgtgcacaggatcggtcgaacaggccggtgtggcaatacaggaagagctatcagcttttttgatttggaatctgataaccatctggcccagccattagtgaaagtgctgactgacgcacagcaggatgtccccgcatggctcgaggagatcgccttcagcacttatatccctggtttttcggggtccactagaggcaacgtgttcgccagcgtcgatacaaggaaaggaaagtccacgttgaacacggccgggtttagttcctcccaggcacccaatcctgttgacgacgagtcatgggattag

SEQ ID NO: 184901 - DNA, 2073 bp, synthetic construct
  misc_feature 1..2073: note = Description of Artificial Sequence: Synthetic coding sequence
  source 1..2073: mol_type = other DNA
atgggcgacgaggactgggaggccgagatcaacccccacatgagctcatatgtgccaatcttcgaaaaagatagatactcaggagagaatggcgataactttaatcgcactccagcctcttcttccgaaatggacgatgggcctagccgtcgggatcatttcatgaagtctggctttgcctcaggcaggaacttcggcaatcgagacgctggggagtgtaataaacgggataatacaagcaccatggggggctttggagttgggaaaagttttggcaaccgtggtttttccaatagccgcttcgaagatggcgacagttctgggttctggcgggagtcctcaaatgactgtgaagacaatccaacccggaataggggtttttcgaagcgtggggataacgacctggatcccgacgagtgcatgcaacgcacaggcggtttattcggctccaggagacctgtgctgagcgggaccggcaacggggacacttcccagtcccgctcaggatcaggaagtgagcgggggggttataaggggcttaatgaggaggtgatcacaggttcggggaaaaatagctggaaatccgaagctgaaggaggagagagctccgatacccaaggcccgaaggtaacatatattcccccaccgcctcctgaggatgaagatagtatcttcgcacattaccaaacaggcatcaacttcgacaaatatgataccattcttgtcgaggtttcgggccatgatgctccgcccgctattctgacgtttgaggaagccaacctgtgccaaacacttaacaacaatattgcgaaggccggctacacaaaactcaccccagttcagaagtattccatcccaattattctggccggtcgggacctcatggcttgtgcccagaccggctctggaaaaaccgcagctttcctgctgcccattcttgcgcacatgatgcatgacggaattacggcttccagattcaaagagttgcaggagccggagtgcatcatcgtggcccccacccgggagctcgtgaatcaaatctatctagaagccagaaaattctcgttcggcacatgcgtgagggccgtggtgatatacggcggaacacagcttggccactctatcaggcaaatcgtccaaggttgtaatattctgtgcgccacccccggaaggcttatggacatcattgggaaggaaaagatcgggctcaaacaaataaaataccttgtgctcgacgaagctgaccgcatgttagacatgggctttggacctgaaatgaagaaactgataagttgtcctgggatgccctccaaggagcagcgacaaactctcatgttctctgcaacatttcccgaggagatacaacggttagccgcagagtttctgaaatccaattacctgttcgtcgcagttggccaagtagggggtgcctgtagggatgttcagcagacagtactgcaagtgggacaatttagcaaaagggagaagttggtcgagattttacggaacataggagatgagagaaccatggtgttcgtggaaaccaagaagaaagccgattttatagccacattcctttgtcaagagaaaatcagtaccacctccatccatggtgatagggagcagagggaaagagagcaggctctgggcgatttcagatttggcaagtgtcccgtattagtagcaaccagcgtggctgcaaggggactggacatcgagaacgttcagcacgtgataaacttcgacttgccatctacgatcgacgaatatgtgcaccgcattggaaggaccggccgctgtggaaacactggacgggccatttcctttttcgacttagaatccgataaccacctcgcacagcccctggtgaaagtcctgaccgatgctcaacaagatgtgccagcctggctggaggaaatcgcattttctacatatatcccgggctttagcggctcaacaaggggaaacgtcttcgcctcagtcgatacccgtaaggggaaaagcaccctgaatactgcgggcttctccagctcccaggcgcctaatcccgtcgacgatgagagctgggactag

SEQ ID NO: 184902 - DNA, 2175 bp, synthetic construct
  misc_feature 1..2175: note = Description of Artificial Sequence: Synthetic coding sequence
  source 1..2175: mol_type = other DNA
atgggcgacgaggactgggaggccgagatcaacccccacatgagcagttatgtccctatctttgagaaggaccgttattccggagaaaatggagataacttcaaccggactcccgcctcatcaagcgaaatggacgacggccctagcagacgcgatcattttatgaagagcggctttgccagcggtcgcaacttcggcaaccgggatgccggggaatgtaataaacgcgataataccagtactatgggtgggttcggggtgggtaagagcttcggaaatcggggcttcagcaattcccggtttgaagatggggactcctctggcttttggcgggaaagctctaacgactgtgaagacaacccaactagaaatcggggattcagcaaacgcggaggatacagagacggcaacaattccgaggcgtctgggccttatagacgcggtggaagagggtcgtttcgaggctgcagaggagggtttggtctgggatctccaaacaacgatctagatccagatgagtgcatgcagcggactggtgggctcttcggtagccgccgtccagtgctgtccggcaccggcaatggggacaccagccagtctcggagtggctcaggctccgagagaggcggctacaagggcctcaatgaggaggtaataacgggatccggcaaaaattcctggaaatccgaggctgaggggggagagtcgagcgatacccaaggacccaaagtgacatacattcctccgccgccacctgaggacgaggacagtattttcgcccactatcagaccgggattaactttgacaagtacgatacaattctggtggaggtctccggccatgatgccccccccgctattctgaccttcgaagaagcaaatctctgccagacgcttaacaataacatcgcaaaggccgggtacaccaagttaacccctgtacagaagtatagcattcccatcatcctggctggcagagaccttatggcctgtgcacaaactggctcagggaagaccgcagccttcctcctgcctattctggcccacatgatgcatgacggaataacagcctcccggttcaaagagctccaggaaccagagtgcataatcgtggcccccactcgggagctggtcaaccagatatatttggaggcaaggaagtttagcttcgggacgtgtgtcagagcggtggtaatctatggaggtacacagctcggccactccattagacagatcgtgcagggctgcaacatattgtgcgcaacacccggtcgattaatggacatcataggaaaagaaaaaattggccttaaacagatcaagtacttagtcctggacgaggcagatagaatgttggacatggggtttggcccggagatgaaaaagcttattagttgtccaggaatgccgagcaaggagcagaggcagacgctgatgttcagtgcgacatttccggaagaaattcagcgcctcgcagccgagtttctgaagtcaaactatttgttcgtggctgtgggacaggtgggcggagcctgccgtgacgtccagcagactgttctgcaggtaggacaatttagcaaaagagagaaattggtcgagatcctccgcaacataggtgacgagcgcactatggtctttgtggaaacaaaaaagaaagctgacttcatcgcgacatttctgtgccaggagaagataagtacaacttctatccatggcgaccgagagcaaagggagcgcgagcaggccttgggcgacttccgctttggtaaatgtccggttcttgtggcaaccagcgttgctgcgcgcggcctggacattgaaaacgtgcagcatgtgatcaatttcgaccttccttccaccatcgacgagtacgttcacagaatcgggcgaaccggtcggtgcgggaatacaggccgcgcaattagtttctttgacctggagtctgataaccacctggcccaacctctggtcaaggtcctaactgacgcgcaacaagatgtccctgcctggttggaggaaatcgccttctctacctacattccaggcttcagtgggtcaacaaggggtaacgtcttcgccagcgtggatacccgcaagggtaagtccactctcaacaccgcgggcttctcatcttcccaggccccgaatccggtggacgatgagtcctgggattag

SEQ ID NO: 184903 - DNA, 318 bp, synthetic construct
  misc_feature 1..318: note = Description of Artificial Sequence: Synthetic coding sequence
  source 1..318: mol_type = other DNA
atgggcgacgaggactgggaggccgagatcaacccccacatgagctcttacgtgccaatctttgaaaaggatagatatagcggagaaaacggcgataacttcaacagaacccccgcttcgtccagtgagatggatgatggcccttctcgacgagaccatttcatgaaaagtgggtttgcctccggccgcaatttcggaaatcgagatgctggcgaatgtaacaagcgggacaacacgagcacaatgggtggcttcggcgttggaaagtcttttggaaatagaggattctccaattcccgcttcgaggatggagactag

SEQ ID NO: 184904 - DNA, 2115 bp, synthetic construct
  misc_feature 1..2115: note = Description of Artificial Sequence: Synthetic coding sequence
  source 1..2115: mol_type = other DNA
atgggcgacgaggactgggaggccgagatcaacccccacatgagctcctatgtccccatttttgagaaggatagatatagcggggaaaatggggataatttcaatagaacacctgcttcctcttccgagatggatgatggccctagccgacgtgaccacttcatgaaatccggtttcgcaagcggtcgtaatttcggtaacagggacgctggggagtgcaacaaacgggataatacttcaacaatggggggctttggcgtcgggaagtctttcggcaatagaggtttctctaatagtaggttcgaagacggggatagttcaggattctggcgcgggtatcgagacggcaataactccgaggctagcggcccttaccgtcgtggcggaaggggcagtttccggggctgtcgggggggatttggtctgggatcccctaataatgacctggatccagacgagtgcatgcagaggaccggcgggctcttcggatctcggcgccccgtgctctcaggcaccggaaacggggacacctcacagagtcggtccgggtctgggagcgagagagggggctacaaagggctcaatgaagaagtcattacgggtagtgggaagaactcttggaaaagcgaagcagaagggggggaatcatctgatactcaggggcccaaggtaacatatatccccccaccaccccctgaggacgaagattccatctttgcacactaccagaccggaatcaacttcgacaagtatgacactatattggtggaggttagcggtcacgacgcccctcccgcgattctgacatttgaagaggccaatctgtgccagaccctcaataacaacattgccaaggccgggtacaccaaactgactcctgttcagaagtactccatacccatcatcttagccggacgagacctcatggcttgtgcccagacgggatctgggaagacagcagccttcctgctccccattttggctcacatgatgcatgatggcattaccgcttcaagattcaaagaattacaagagcctgagtgcatcattgtcgctcctacacgcgaactcgtgaatcaaatctatctggaggctcggaaatttagttttgggacatgcgtgcgggccgtagtgatttacgggggcacccagttggggcactcaatccgccagattgtccaaggctgcaatatcctgtgtgccacaccggggcggttaatggacataatcgggaaggaaaaaataggcttaaagcagatcaagtatctagtcttggatgaggccgaccgaatgttagatatggggttcggccctgagatgaagaagctgatctcatgtccaggcatgccatctaaagaacagagacaaacgttgatgtttagcgccaccttccctgaggagatacaacggctggctgccgaatttctgaagagtaactatctcttcgtcgctgtagggcaagtgggcggagcatgccgggacgtgcagcaaactgtgctgcaggtcggccagttcagcaagagggagaagctcgtggaaattttgcgaaatattggtgacgagagaaccatggtgtttgttgaaacaaagaaaaaggcggattttatcgccacatttctgtgtcaggaaaaaatctctaccacatcgatacacggcgatcgtgaacagagggagcgcgaacaagctctgggcgacttcagattcggtaaatgtccagtgcttgtggccacaagcgttgccgccagggggttggacattgagaacgtgcaacacgtaatcaactttgatttgcctagcacgattgatgaatacgtacacaggattggccggactgggcgctgcgggaacactggacgagccattagtttctttgacctcgaaagcgacaaccacctggctcaaccactagtaaaggtgttaactgatgcccagcaggacgtacctgcgtggctggaggaaatcgcatttagtacatacatccccggcttctcaggcagcacccgcggaaacgtctttgcgagcgtggacacaagaaagggaaaatcaactttaaatacggccgggtttagttctagtcaagcacccaatccagttgacgatgagtcatgggattag

SEQ ID NO: 184905 - DNA, 480 bp, synthetic construct
  misc_feature 1..480: note = Description of Artificial Sequence: Synthetic coding sequence
  source 1..480: mol_type = other DNA
atgggcgacgaggactgggaggccgagatcaacccccacatgagctcctatgtgccaatcttcgagaaagatcggtactccggtgagaacggggacaatttcaacagaaccccggcatcctcctcagagatggatgacggacccagcaggcgcgatcatttcatgaagagtgggttcgctagcggcagaaactttggaaaccgggatgcaggcgagtgtaataaaagagataacacgagcactatggggggcttcggcgtcggaaagagctttggtaatcgagggtttagcaacagcagattcgaggacggagactcttccggcttctggcgggagtctagcaatgactgcgaggacaatcccactcgtaataggggcttctctaaaaggggggggtaccgcgatgggaataatagtgaggcttctggcccttacagacgtggtggccgcgggtcttttaggggttgtcgtggcggctag

SEQ ID NO: 184906 - DNA, 1728 bp, synthetic construct
  misc_feature 1..1728: note = Description of Artificial Sequence: Synthetic coding sequence
  source 1..1728: mol_type = other DNA
atgggcagccggaacctgttcctgaccaacagccccgagagcagcaacgactgtgaggacaatcccactagaaaccggggtttcagcaaaagaggggataacgaccttgacccagatgaatgcatgcagcggacaggggggctctttgggagccggcgccctgtcctgagcggcaccggtaacggcgacacaagccaaagtaggtctggctctggaagtgagcgggactcatggaagtctgaggctgagggcggcgaatctagtgacacccagggaccgaaggtcacctacatccctccaccaccgccagaggacgaggatagcatttttgcacattatcagacagggattaacttcgataagtacgacaccattttggttgaagtctcaggtcatgatgcccctcctgcgatactgacctttgaagaagctaatctgtgtcagactctgaacaataacatcgccaaggcaggctataccaaactgacccccgtccagaaatatagtatcccaattatccttgcggggagagaccttatggcatgcgcgcagacggggtccggcaagaccgccgcttttctcctgcccatccttgcacacatgatgcacgacggcattacagccagccggttcaaagaacttcaggaaccagaatgcatcattgtggcaccaactagggagctcgtgaaccagatctatttggaggccagaaaattttcattcggaacctgcgtcagggctgtagtgatctacggggggacacaactcgggcacagcatcagacagatcgtgcagggctgcaatatcctctgcgcaactcctgggcgtttaatggatattatcggaaaggaaaagatcggtctgaagcagattaaatatctggtcctggacgaggctgatcgcatgctggatatggggtttggccccgagatgaaaaaactaatcagctgtcccggcatgccatcgaaagagcagagacagacgctgatgttcagcgcgacatttcccgaggagatccagcggcttgctgctgagtttctgaaaagcaattacctgtttgtggccgtgggccaggttggcggtgcatgtcgagacgtacagcagacggtactccaagtcgggcaattctctaaaagggagaagctggttgagatcttacgcaatataggcgacgagcgtaccatggtctttgtcgaaacaaagaaaaaagccgactttattgctacctttctgtgccaggaaaagattagcaccacctctatacacggtgatagagaacaaagggagcgggagcaggcactgggggacttcaggtttggcaagtgccccgttctggtagcaacctccgtcgccgctcgtggtctggatatcgaaaacgtccagcatgtgattaattttgacctgccaagcacaattgacgagtacgtgcaccgcataggaaggactgggcgctgtggaaacacaggcagggctatatcattctttgacctggagagtgacaaccacctggcccagccccttgtgaaggtcctgacagatgcgcagcaggacgtgcccgcctggctagaggagatcgccttttcaacttacatccctggatttagcggaagcacccgcgggaacgtattcgccagcgtggacaccaggaaaggtaaatcaacgttgaatactgcaggcttctcttcatctcaggcccccaatcctgtggacgacgaaagctgggattag

SEQ ID NO: 184907 - DNA, 1869 bp, synthetic construct
  misc_feature 1..1869: note = Description of Artificial Sequence: Synthetic coding sequence
  source 1..1869: mol_type = other DNA
atggaggagagcgagcccgagcggaagcgggcccggaccgacgaggtaccagcagggggcagccgctcggaggccgaagacgaggatgacgaagattatgtcccatatgtaccactaagacagcgccgccaactcctgttgcagaagttactgcagcggcggagaaagggagccgccgaggaggagcaacaagactccgggtccgagcccaggggcgacgaagacgacattcccttaggtccccagtcgaacgtctctcttctcgatcagcaccagcacttaaaagagaaggccgaagccagaaaagaatccgcgaaagaaaagcaattgaaagaagaggaaaagattttggagtcagtggctgaagggagggcactcatgtccgtgaaagaaatggcaaaggggattacatacgacgaccctataaaaacaagttggactccaccccgatacgtgttatccatgagtgaggagcgacatgaaagagttagaaagaagtaccatatcctggtagagggcgacgggattcctcctccaattaaatccttcaaagagatgaaattcccagctgctatactgagaggactgaagaaaaaaggcatccatcatcctaccccaatacaaatccaaggcatcccaacaattctttccggtcgggatatgatcggaatagccttcacgggttcaggcaagactctggtgtttacgctgcccgtgatcatgttctgtctggaacaggaaaagagactgcctttctccaagcgcgagggaccatatggcttgatcatttgtccaagtagggaacttgctcgccaaacacacggaattcttgagtattattgtcggctgcttcaggaagacagcagtcccttactgaggtgtgcgctctgcatcgggggaatgtcagtcaaagagcaaatggagaccatccggcatggcgtgcacatgatggtggctactccagggcggcttatggatctgttgcagaagaaaatggtgtctcttgatatttgccgctacctagccctggatgaggcggaccgcatgatcgacatgggtttcgaaggggacatccggactatcttttcttactttaaggggcaaaggcagactctgctgttctcagccacaatgcctaagaagatccagaactttgcaaaaagtgctttagtgaaaccagtgaccatcaacgtggggagggcgggggcagcttcacttgacgtaatacaagaggtcgagtacgttaaggaagaagccaaaatggtgtatctgctggagtgtctccagaagacacctcccccggtgttgatcttcgctgagaagaaagcagacgtggacgccattcacgaatacctgctgctaaaaggcgtggaagcggttgctatccatggagggaaggaccaggaggagcggacaaaggccatagaggcctttcgtgaaggtaaaaaagatgtgctggtggccacggatgtcgcctccaagggtctggattttccagccatccagcatgttattaactatgatatgccggaagagattgagaactacgtgcatcgcatcggcagaacaggaaggagtggaaacaccggtatcgcaaccacctttattaacaaggcctgcgacgagtcagtgctgatggacctgaaagctctgttgttggaagcaaaacagaaggtccctcctgtgctccaagtgctgcattgtggtgatgagtctatgctggatattgggggggagcgaggatgtgcgttctgcggaggtcttgggcacagaattacggattgccctaagcttgaggcgatgcaaaccaagcaggtgagtaatataggtagaaaagactacctggctcacagctcaatggacttctag

SEQ ID NO: 184908 - DNA, 1881 bp, synthetic construct
  misc_feature 1..1881: note = Description of Artificial Sequence: Synthetic coding sequence
  source 1..1881: mol_type = other DNA
atgcaccagatccggaagagcgagtacacccagcccacccccatccagtgtcaaggggtaccagtcgctttgagcgggagggacatgatcggcattgctaagactgggtctggtaaaacggccgcttttatttggcccatgttaattcatataatggaccagaaagaactggaaccaggggatggacccatagccgttattgtgtgcccgactcgggagctttgtcagcaaatccacgcagagtgtaaaaggttcggaaaagcatacaacctgcggtctgtcgccgtgtatggcggaggatccatgtgggaacaggccaaagctcttcaagaaggggcagagatagtggtttgtacgccgggtaggttaatcgaccacgtgaagaaaaaggccactaatctccagcgagtaagctatctggtgtttgatgaggctgacaggatgttcgacatgggctttgaatatcaggtccgctcgatcgcttcacacgtgcggccagataggcaaactcttctcttttctgcgacttttaggaagaagatcgagaagttggcccgagacattttgatcgatcccattcgtgtggtccagggcgatatcggcgaagcaaacgaggatgtgactcagatcgtcgaaatcctccactctggtccatccaagtggaattggctgactaggcgcctagtcgaatttacttcttcgggatccgtcttgctcttcgttaccaaaaaagccaacgcagaagaactggcaaacaacctcaagcaggagggtcataacctggggctgttgcatggcgacatggaccagagtgaacggaacaaagttattagtgattttaagaagaaggatattcccgtgctggttgcaacggatgtcgccgcgagagggcttgatatcccatctatcaagaccgtgattaactacgacgttgcaagagacatcgacaccttgcttactccgaaagacagtaacttcgccggcgatttggttagaaacctcgagggggcaaaccagcacgtctccaaggaacttctggatctggccatgcagaacgcctggtttcgaaaaagcagatttaaaggcgggaaaggcaaaaagttgaacatcggcggcggcggcctcggctatagggaacggccgggccttgggagcgagaacatggataggggcaacaacaatgttatgtctaactatgaggcatataaaccttccaccggagccatgggggaccggttaactgccatgaaggccgccttccaaagccagtacaagtcacactttgtggccgcttccctctctaatcagaaagctggctcaagtgctgctggcgcaagtggctggacttccgccggttccctgaatagtgtgcccacgaactccgctcaacaaggacacaactcgcccgattcccccgttactagtgcagctaagggcatccctggatttggaaatacaggtaatatctccggcgccccagtgacttatccatccgccggtgcacagggggtcaataataccgcctctgggaacaattcaagggagggtacaggcggcagtaatggtaaaagagagcgctacacggagaaccggggaagcagccgacactctcacggggagaccggcaataggcattccgattctcctagacacggcgacggcggcagacatggggatggctataggcatccggaatcctcaagtagacatacggatggccataggcatggcgagaatagacacgggggctccgcgggccgtcatggggaaaatcggggtgcaaatgacggacgtaacggcgaatcacgcaaagaagccttcaatagggaatccaagatggagcccccacctaaaaggaagaaatcccgatgggattcttag

SEQ ID NO: 184909 - DNA, 2817 bp, synthetic construct
  misc_feature 1..2817: note = Description of Artificial Sequence: Synthetic coding sequence
  source 1..2817: mol_type = other DNA
atgaactggaacaagggcggccccggcaccaagcggggcttcggctttggagggttcgccataagtgccgggaaaaaggaggagcccaaactgccacagcaaagtcattcagcatttggggccacatcctcttcaagtggttttgggaaatccgcacctccccagctgccgtccttctacaagatcggctctaaaagggccaactttgacgaggaaaatgcttactttgaggacgaggaggaagacagttctaacgtcgatctgccgtacatcccagccgagaatagtcctaccaggcagcagtttcactcgaaaccagtcgattccgacagtgacgacgatccattagaagcttttatggccgaggtggaggatcaggccgccagagatatgaaacgtttagaggagaaggacaaggagcgcaaaaacgttaaggggatcagggatgatatcgaagaagaggatgaccaggaggcttactttcgttatatggcagaaaaccctacagccggtgtggttcaggaagaggaagaggacaatttagaatatgatagcgacggtaatcctatcgcaccaactaagaaaatcatcgatcccctgcccccaatcgatcactcggagattgactatccaccctttgagaaaaacttttataatgaacacgaagaaatcactaacctgacaccacagcaactcatagatctccgacacaaacttaacctgagggtgtcaggcgcagcccctccccgccctggcagttcctttgcccactttggcttcgacgaacagctcatgcaccaaattcggaagagcgaatacacccagcctactcctatccaatgtcagggcgtcccggtagccctgagtggccgggatatgattggcatcgcgaaaaccggttcggggaagacggctgcatttatttggccaatgcttatacacattatggaccagaaggagttagaaccaggcgacggcccaatcgcagtgatcgtgtgccctacgcgcgaactgtgccagcagattcatgctgaatgcaaacgtttcggaaaagcctataacctgaggtctgtggctgtctatggtggcggctcaatgtgggaacaagctaaggcgctgcaggaaggcgccgagattgtagtgtgcacaccagggcggctgattgaccacgttaagaagaaggctactaatctgcaacgagtatcctaccttgtcttcgacgaagcagacagaatgttcgatatgggatttgaatatcaggtgcgaagtatcgcatctcacgttcgcccagatcgccagactttgctgttttcggccaccttcagaaagaagatagagaaactggcacgggatattctcattgaccccatcagagtagtccagggcgacattggggaagctaacgaagatgtgacacaaatagtcgaaatcttgcactcggggccgtcaaagtggaattggcttactcgccgtctagtggagttcacttccagcggtagcgtgctgctcttcgttacaaagaaggcaaatgccgaggaattggccaataatctcaagcaagagggtcataatctggggctgctacatggcgatatggatcagtctgaaaggaataaagttatttctgacttcaaaaaaaaggatatccctgttctggtggctaccgatgtggccgcacgcggactggacattcccagcatcaaaacagtgattaattacgatgtcgctagggacattgatacccacacccaccggattggtcgaacaggacgggcgggggaaaaaggagtggcctatactctgttgactccaaaagactcaaatttcgccggcgatcttgtcagaaacctggaaggtgcaaaccagcacgtgagcaaggagctcctggacctcgctatgcaaaacgcttggttccgaaagtcaagattcaaaggcggaaaggggaaaaaactcaacatcggcgggggcggccttggctaccgcgaacgtccgggcctgggctcagaaaatatggacaggggaaacaataatgtgatgagtaactacgaagcatataagccctccacgggagcaatgggagaccgactgacagctatgaaagctgcgtttcagagccagtataagtcacattttgtggccgcctccctcagcaaccagaaggccggttcttcagcagcaggggctagcggttggacttctgcaggttctctgaatagtgtgcccaccaattcagcacaacagggacataattcaccagattctccagtcacatctgcagccaaaggaatcccaggattcggcaacacgggcaacatctcaggcgcacctgtcacttacccgtccgccggcgcccagggagtgaataacaccgcctctggtaacaattctcgcgagggcacaggaggcagtaacggcaaacgtgaacgttataccgagaaccggggaagctccaggcacagccacggggagaccggaaatcggcactccgactcgccccgacacggcgatgggggccgccacggcgacgggtatcggcaccccgagagttccagccgccatacggatggtcacagacatggcgaaaacaggcatggaggtagcgccggccggcatggcgaaaaccgcggagctaatgatggtaggaacggtgagtcacggaaggaggcctttaacagggagagcaagatggaacccaagatggaacccaaggtggattcctctaaaatggataaggtggatagtaaaaccgataaaaccgcagacggatttgccgtgccagagccccctaagcggaagaagagtaggtgggattcatag

SEQ ID NO: 184910 - DNA, 2817 bp, synthetic construct
  misc_feature 1..2817: note = Description of Artificial Sequence: Synthetic coding sequence
  source 1..2817: mol_type = other DNA
atgaactggaacaagggcggccccggcaccaagcggggcttcggctttggcggcttcgccatatctgctgggaaaaaggaggaaccaaaactgccgcagcagtcacatagcgcctttggcgcaacctctagctcgagcggtttcggcaagtcggctccaccccagctcccatccttttacaaaatcgggtctaagagagctaacttcgacgaggaaaatgcctacttcgaggatgaggaagaagactcaagtaacgtggatcttccttatattcctgcagagaactccccaactcggcagcagtttcacagtaaaccggtagacagtgactcggatgatgatcccctggaggcgtttatggctgaggtggaggatcaggctgcccgcgatatgaagcggctggaagagaaggacaaggagcgcaagaatgtgaaaggtattagagacgatattgaagaggaggatgaccaggaagcgtatttcaggtatatggccgaaaaccccactgcgggcgtggttcaggaagaagaggaggacaacctcgagtatgattcagatggtaaccccatcgcaccgactaaaaagataatagatcccctgcctccaattgaccactctgagatcgattaccctccctttgagaaaaatttctacaatgagcatgaagaaattactaatctgacgccccagcaactgattgacttacgtcacaagctcaaccttcgtgtctcaggagcggctcctcctaggccaggcagctctttcgcacatttcgggttcgacgagcaactcatgcaccaaatacggaaaagtgagtacactcaacccacccccattcagtgccagggcgtgcctgtggctctgtcgggtagagacatgattgggatagctaagaccgggtcaggcaagaccgccgctttcatctggcctatgcttatccacataatggatcagaaggagctggaaccaggtgatggtccaatcgctgtgatagtctgtccaaccagagaactgtgtcagcaaatacacgccgagtgtaagcggttcggtaaggcctacaatctgcggtccgtggctgtttacggtggcgggtcaatgtgggagcaggcaaaggctttacaggagggggcagagatcgtggtctgcacccccggccggcttattgaccacgtaaagaaaaaagccaccaatctgcagcgagtgtcctatcttgtctttgacgaggccgatcgcatgttcgacatggggttcgaataccaagttcgcagcattgcctcccacgtgcgaccagaccggcaaaccctgcttttctccgccactttccgcaagaaaatcgaaaagctggcccgcgatatcctgatagatccaatccgagttgtacagggggatatcggagaggccaacgaggatgtgacacagattgtcgaaattctacattcagggccttctaagtggaactggctgacacgacgcctggtcgagtttacaagcagcggcagtgtgctcttgttcgttaccaagaaggctaacgccgaggaactagcaaacaatctgaagcaagaaggccacaacctggggctcctccatggggacatggaccaatcagagcgcaacaaggtgattagtgacttcaaaaagaaagacatccctgtccttgtggcaacagacgtcgccgctcgggggctagatattccctctataaagactgtcatcaactacgatgtcgccagggacatcgatacccacacccaccggatcgggcgcaccggtcgcgctggtgagaagggcgtggcttacacacttctgacccccaaagatagcaatttcgccggggaccttgtcaggaatctggagggcgcaaatcagcacgtgagcaaggaactgctggatctggctatgcagaacgcctggtttaggaaatccaggttcaaaggaggcaagggaaagaagctcaatatcggcggcggtggcctcgggtatagagagcggcccggattagggtcagagaatatggaccgtggcaataataacgtgatgtccaactatgaggcttacaaaccttccaccggagccatgggggatcggctgacggccatgaaagccgcatttcagagccaatataaaagtcacttcgtcgccgcctcattaagtaatcagaaggcgggcagctccgccgcaggcgcttccggctggacttctgcggggagtttgaacagcgtgcctacgaatagcgcgcaacagggacacaattctcctgactcgccggtgacctctgccgctaaaggaataccaggcttcggcaacactggcaatatcagcggggcccccgtgacatatccgtcagctggcgctcagggcgtgaacaatacggcttcaggcaataatagccgcgaaggcaccggcgggtccaatggcaagcgtgagcggtatactgagaatcgtggctcatcaagacactcgcacggagagactgggaatcgccattctgacagcccacgtcacggagatggggggcgccacggggacgggtataggcaccccgagtcaagttcacgacacacggacggacatcgtcacggagaaaaccgacacggcggtagtgcaggaagacatggagaaaaccgaggagccaatgatggtcgaaatggcgaaagcaggaaggaagcgtttaatcgggagagtaagatggaacctaaaatggagcccaaggttgactcgtccaagatggacaaagtcgactctaagaccgataagacagcggacggtttcgccgttcccgagcctccaaaacggaaaaaaagtcgctgggattcttag

SEQ ID NO: 184911 - DNA, 2817 bp, synthetic construct
  misc_feature 1..2817: note = Description of Artificial Sequence: Synthetic coding sequence
  source 1..2817: mol_type = other DNA
atgaactggaacaagggcggccccggcaccaagcggggcttcggcttcggtggcttcgccatcagcgcaggtaaaaaggaggagccgaagttgccccagcagagtcacagcgcttttggcgccacatcaagttctagcgggttcgggaaatccgcacctccccagttaccatccttctacaaaattggatccaaacgcgccaactttgatgaagaaaatgcttactttgaagacgaggaggaagactccagcaatgtcgatctgccttacatcccagctgaaaattccccaacacgacagcagttccactccaaaccggtggactctgatagcgatgacgacccacttgaagccttcatggccgaagtcgaggatcaggccgccagagatatgaaacgtctcgaggagaaagacaaggagcgaaagaacgttaaggggattcgcgacgacattgaagaggaggatgatcaggaagcatacttcagatacatggccgagaatcctacagccggagttgtacaggaagaggaagaagataatcttgaatatgactccgacggcaacccgatcgctcctacaaagaagatcatagacccccttccccccatcgaccactctgagattgactacccccccttcgagaagaatttctacaatgagcacgaggagatcaccaaccttaccccacaacaactcattgacctgcggcataaactgaacctccgtgtgtccggcgcggccccgcccaggcctggctcctctttcgcccattttggattcgatgagcagctgatgcaccaaataaggaagagcgaatatactcagccgacgcccatccagtgccagggagtcccggtggccttatcaggcagggacatgattgggatcgccaagactggatcagggaagaccgccgcctttatctggccgatgctcattcacatcatggatcaaaaggagctggagccaggcgacgggccaattgccgtcatcgtttgcccaactcgagagctctgccagcagattcatgcggagtgtaaacggtttggtaaagcctacaaccttcgatctgtggccgtctacggaggcgggagcatgtgggagcaggctaaggcactgcaggagggagccgagattgtggtctgtacccccgggcggctcatcgatcatgtaaagaagaaagcaacaaacctgcagagagttagctatctggtgtttgatgaggccgatcgtatgttcgacatgggttttgagtaccaggttaggtcaatagcctcacatgtgcgcccagatcgccagaccctgctcttttcagctacgttccgaaagaagattgaaaaactggcaagagatatattgattgatcctatccgcgtcgtgcagggagatattggcgaggctaatgaagacgttacccagatcgtagaaatcctgcactccggaccctcaaagtggaactggcttaccaggcggctcgtcgaatttaccagttctggaagcgtgttactgtttgttaccaagaaagcgaacgcagaggagctggctaataatctgaaacaggaagggcacaatctgggattactccacggcgacatggaccaaagtgaaagaaacaaagtgatcagtgacttcaagaagaaggatattcctgtgctcgtcgctactgacgtagcagcgcgagggcttgacattccaagcatcaagactgtgatcaattacgacgtcgctcgggacattgatacgcacacccacagaattggaagaactgggagagcaggtgaaaagggtgtagcatataccctgctaaccccaaaagacagcaattttgcgggggatctggtccgtaatttggagggagcaaaccaacatgtttctaaggaactgcttgacttagcgatgcagaacgcatggttcaggaagagcaggttcaaggggggcaaaggaaagaagctgaatataggcggcggcggcctggggtacagggagcgacccggactcggttctgagaatatggatagagggaacaacaacgtaatgtcaaactacgaagcgtacaaaccctcaacaggggcaatgggggaccgattgacggccatgaaggcagccttccagtcccaatacaaaagccactttgtggcagcttcactaagtaaccagaaggccggaagcagcgccgcaggcgcatctggctggacatccgcagggtcccttaacagtgtgcctaccaatagcgcccagcaaggtcacaactcccctgatagtcctgtgacttccgctgcaaagggaatccccggctttgggaacacggggaatatctcgggagctccagtgacctacccgtctgcgggggcccagggagtgaacaataccgcgtctggaaataacagcagagagggaacagggggctcaaacgggaaacgcgagaggtacaccgaaaacaggggctctagcaggcactctcacggcgagaccggaaatcgacacagtgattctccacgacacggcgacggaggccgtcacggagatggttatcgacatcccgagtctagctcccggcataccgacgggcacaggcacggagagaaccgacatggaggttctgcgggcagacacggagagaatcgaggagccaacgacggcagaaacggcgagagtcgtaaggaagcttttaacagagaatccaagatggagcccaagatggagcccaaggttgactcttctaaaatggataaggtggacagtaagacagacaagacggcggacgggtttgctgtgccagaacctcccaaaagaaaaaagagccgatgggattcgtag

SEQ ID NO: 184912 - DNA, 2817 bp, synthetic construct
  misc_feature 1..2817: note = Description of Artificial Sequence: Synthetic coding sequence
  source 1..2817: mol_type = other DNA
atgaactggaacaagggcggccccggcaccaagcggggcttcggcttcggcggattcgccatctccgcaggcaaaaaagaagagcctaaactgccgcagcagtcacattccgcatttggcgccacctcaagctcttcaggttttgggaaaagcgcaccccctcaactcccatctttctacaagatcggaagtaagagagctaacttcgacgaagaaaatgcgtactttgaagatgaagaagaagactcttccaatgtggacctcccatacattcctgccgaaaactcccccactaggcaacagttccactccaagccagtggattccgattctgacgacgatccactggaagccttcatggccgaggtggaggaccaggctgcccgcgacatgaagaggctggaggagaaagacaaggagcggaaaaatgtaaagggtattagagacgacattgaagaagaggatgatcaggaagcatactttagatatatggcagaaaatcctacagccggtgtcgtccaggaagaagaagaggataaccttgagtacgatagcgacgggaacccgatcgcgcccacaaagaaaatcattgatcccttacctccaattgaccactcagaaatcgattaccctccgttcgagaaaaacttctacaacgagcacgaagagattaccaacttgaccccccaacagttgattgacctgcgccataagcttaacctgagagtttcaggagccgctcctcctcgccccggtagctcgtttgcccatttcggctttgatgaacaactgatgcatcagattcgcaagtcggaatatactcagcccacgccaatccagtgccagggcgtgccagtggcgctgagcggcagggacatgatcggcattgccaaaactggatctgggaagacagctgccttcatctggcccatgcttatacacattatggaccagaaagagttagaacccggcgatggacccatcgccgtgattgtctgccccacgagggagctgtgccaacaaatccatgcagagtgcaagagatttgggaaagcctataatctacggtcagtggctgtgtacggcggcggctcaatgtgggagcaagcaaaggcgcttcaggaaggagctgagattgttgtctgcacccccgggcggctgattgatcacgtgaaaaaaaaggcaactaacctccagagagtaagttacctggtgtttgacgaagctgacaggatgttcgacatggggttcgaatatcaagtccgcagcattgcgtctcacgttaggcctgaccgtcagaccttgctctttagcgccaccttccggaagaaaatagagaagctcgcacgggacatattaatcgatcccattagggtggtgcagggagatatcggcgaagccaatgaggacgtgacacagattgtggagatactgcactccgggccctcgaagtggaactggctcactcgcaggttagtggagtttactagctcaggctcagttctgctctttgtgacaaagaaagccaatgctgaggaactggctaacaacctgaagcaagagggccataatctgggcctgctgcacggcgatatggatcagtcagagcgaaataaggtgatatcagattttaaaaagaaggacatccccgtgctggtggctacggatgtggccgcacgggggttggacattcctagtattaagaccgtgattaactacgacgtagcacgcgatatagatacccacactcaccgtatcgggagaaccggacgcgccggtgaaaagggggtcgcatacaccctcctcacaccgaaagatagcaatttcgcaggtgatcttgtacgtaatcttgagggagctaaccagcacgtatccaaagaacttttggatctcgctatgcagaacgcatggttcagaaagtcacgctttaaaggcggaaaaggtaagaagctcaacattggtgggggtggcttgggctacagagaaaggcctggcctgggctctgagaacatggacagaggcaacaacaatgtgatgagcaactacgaggcctacaaaccgagcacaggtgcgatgggagatcgactgactgctatgaaggcagcctttcagtcccagtacaagagccactttgttgccgcctctctgagcaatcagaaagcaggaagctccgctgctggagcgagtggctggacctccgcaggaagtcttaactccgtgcccactaacagtgcgcaacagggccacaactcccccgatagtccagtgacgtccgccgccaaaggaatcccaggtttcggcaataccggtaacattagcggcgctcccgtgacttatccatcagcgggagcccaaggtgtgaataatacggcttctggtaacaacagccgcgagggtaccggtggttcgaatggcaaacgcgagcgctacacagagaacaggggttccagtcggcacagtcatggggaaaccggcaaccgccattcggactccccacggcacggcgatgggggaaggcatggggatggataccgccatccagagtccagcagcaggcataccgacggccaccggcacggagagaatcgacatggaggctcagcgggccggcatggggaaaaccggggcgctaacgacggtcgaaacggcgaaagccggaaggaggccttcaacagggaatctaagatggagccaaaaatggagccaaaggtggactcctcaaaaatggataaagtggactcgaagaccgacaagacagcagatggctttgctgtcccggagccaccgaagcgaaagaagtccaggtgggacagttag

SEQ ID NO: 184913 - DNA, 1947 bp, synthetic construct
  misc_feature 1..1947: note = Description of Artificial Sequence: Synthetic coding sequence
  source 1..1947: mol_type = other DNA
atgagccaccacggcggcgcccccaaggccagcacctgggtggtggcatcccggagatcttcaacggtgagccgcgccccagaacggcggcccgcggaagagctgaaccgcactgggcccgaagggtacagcgtggggcgcggtggtagatggcgtggaacatctcggccccctgaagccgttgccgccgggcacgaggagctgcccctgtgcttcgccctcaaatcccatttcgtaggggccgtcatcgggagaggggggtcaaagattaaaaatatccagagcacgactaatacgaccatccaaattatacaagagcagcccgagagcttggtgaaaattttcggatcaaaggcgatgcagacaaaagcgaaagcggtcatagacaattttgtcaaaaaactagaggagaactacaacagcgaatgcgggatagacaccgccttccagccatctgtggggaaggacggatccacagacaacaatgttgtggccggtgaccgcccattgattgactgggatcaaataagggaagaaggccttaaatggcagaaaacaaagtgggcagacttaccgccaatcaagaagaacttctataaggaaagtactgcaacttcagctatgtccaaggttgaagccgattcctggcgtaaggagaattttaacataacctgggatgacctgaaggatggcgagaagagacccattcctaatcccacatgtaccttcgacgatgcatttcagtgctaccccgaggtaatggaaaacattaaaaaagctgggtttcagaagcccaccccaattcagtcgcaagcttggcccattgtgttgcaggggattgacctgattggggtggcccaaaccggaactgggaaaaccctatgctacctgatgccaggctttatccacctggtgcttcagcctagccttaaaggacagaggaataggccaggcatgctcgtgttaacaccgacacgcgaactggcgctgcaggtggaaggcgagtgttgcaagtactcttacaaagggctgcgctcagtctgcgtgtatggcggaggcaatagggacgaacaaatcgaggaactgaaaaagggcgtcgacataatcatagccaccccagggcgtcttaatgatctgcagatgagtaatttcgtaaacctaaagaatatcacctacttagtgcttgatgaggcggataaaatgctagacatgggtttcgaaccacagatcatgaagatccttctggacgtgaggccagaccgccagactgtgatgacaagcgccacgtggccccattccgtacaccggctggctcagagttatctgaaagagcctatgattgtatatgtggggaccctggatctggttgctgtgagcagcgtcaagcagaatataatcgtgaccactgaggaagaaaagtggtcacacatgcagaccttcctgcagagtatgagtagtaccgacaaagtgattgtcttcgtgtctcgcaaggctgtggcggatcacctgtcttccgacctcatccttgggaacatatcggtggagagccttcacggagatagagagcagagggatcgcgagaaagccctagagaatttcaagaccggcaaggttaggatattgattgccacggacctcgcgtctagagggttagacgttcatgatgttacccacgtctacaacttcgactttccacggaacattgaagaatacgtgcaccggatcggacggaccggtcgggcaggccggaccggggtatccattactactctcactagaaacgattggcgcgtggccagcgagttaatcaacatcctagaacgcgccaatcaatccatcccggaggagctcgtatctatggccgaacggttcaaagcgcaccagcagaaacgggagatggagagaaagatggagagaccacaggggagaccgaagaaattccattag

SEQ ID NO: 184914 - DNA, 588 bp, synthetic construct
  misc_feature 1..588: note = Description of Artificial Sequence: Synthetic coding sequence
  source 1..588: mol_type = other DNA
atgagccaccacggcggcgcccccaaggccagcacctgggtggtggcttcacgaaggtccagcacagtttcgcgggctccagaaagaagacccgcagaggaactgaacaggaccggtcctgagggatactccgtggggagaggaggccgctggcgcggcacgtcaaggccaccggaggctgtagcagccggccatgaggaactccccctctgtttcgccctaaagagccatttcgtgggggctgttattggacggggaggtagcaagataaaaaatattcagagtaccaccaataccaccattcagatcatccaggaacaaccggagagtctggttaagatcttcggcagcaaagccatgcagactaaggccaaagctgtcattgacaacttcgtaaagaaactggaggaaaactataatagtgaatgcggcattgacaccgccttccagccatccgtgggaaaagatggttcaactgacaataatgtggttgccggagaccggccgctaatcgattgggaccaaattcgagaggaaggtctgaagtggcagaagacaaaatgggctggaaaaaagattctcatttag

SEQ ID NO: 184915 - DNA, 675 bp, synthetic construct
  misc_feature 1..675: note = Description of Artificial Sequence: Synthetic coding sequence
  source 1..675: mol_type = other DNA
atggagagcggcgcctacggcgccgccaaggccggcggcagcttcgacctgagaagattcctgacgcagccacaagtcgtagcacgagcggtatgccttgtgttcgcgttgattgtgtttagttgcatttatggcgaaggttattccaatgcccacgagtcgaagcagatgtattgcgtgttcaatcggaacgaggacgcctgccgttacggctccgccattggagtgctagcctttctggcctcagccttctttctcgtcgtcgacgcttatttcccacagatctcaaatgccactgacagaaaatatcttgtgattggcgatcttctgttctcagcattgtggactttcctttggttcgttgggttctgttttttgacaaaccagtgggccgtgactaatcccaaagatgtgctagtgggggccgattctgtccgggccgccattactttctcgttctttagcatcttctcgtggggggtgctcgccagtctggcttaccagcgctacaaagctggggtggacgacttcatccagaattatgtggatcccaccccagatcctaatacggcttatgctagttacccaggagcctctgtggacaattatcagcagcccccctttacccagaacgccgaaaccaccgaggggtaccaacctccccccgtgtactag

SEQ ID NO: 184916 - DNA, 1635 bp, synthetic construct
  misc_feature 1..1635: note = Description of Artificial Sequence: Synthetic coding sequence
  source 1..1635: mol_type = other DNA
atgagcggctacagcagcgaccgggaccggggccgggaccggggctttggagcacccagatttggagggtcccgggcaggtccactttctggtaagaagttcggcaatcctggagagaaactagtcaaaaagaaatggaacttagatgaacttcctaaatttgaaaagaatttttatcaggaacatcctgacctggcaagaagaactgcccaggaggtggagacgtacaggtatctgcttccagcaatagtgcacatcaaccaccagcccttcctggagagaggtgatgggcctatttgtctggtcttagcccccactcgggaactggcgcagcaggtgcaacaagtggcagcagagtattgccgagcctgtcgcctgaagtccacctgcatatacggcggagccccgaagggcccccagatccgggatcttgagcgaggggtggagatctgcattgcgacccctggccggctcattgacttcctcgagtgcgggaaaaccaacctgcgaagaacaacgtacctagtcctggatgaagctgacagaatgttggatatgggcttcgagcctcagatccggaagatcgtcgatcagattaggcccgatcgacagacactaatgtggagtgcgacttggccgaaggaggtgcgacagcttgctgaggactttctgaaggattatattcacattaatatcggggccctagagttatctgcaaatcacaatatccttcaaattgtggacgtgtgccatgacgtagagaaggacgagaaactcattaggttaatggaagaaatcatgtcagaaaaggaaaacaaaacgatcgtatttgtggagaccaagagacgctgtgatgaattgacaagaaagatgaggcgtgatggctggcctgctatggggattcatggggataagagtcagcaggagcgagattgggtgctgaacgaatttaaacacggaaaggcaccgatcctgattgccactgatgtcgcttcaaggggacttgacgtcgaagatgttaaattcgttattaactatgattatcctaattcaagcgaggactacatccacagaattggccggacagctagatctacaaaaacaggaacagcctatacctttttcactcctaataatattaaacaggtgagcgatctaattagcgtcctgagggaagccaatcaggccatcaaccccaaactcctgcagctagttgaggaccggggatctgggaggtctcgaggcagggggggaatgaaggacgacaggagggatcgatactccgcaggtaaaaggggcgggtttaataccttccgggatagagagaattatgatcgcgggtactcttccctgctgaagcgcgacttcggcgcaaagacacagaatggtgtctactctgctgcgaactatacaaacgggagctttggctccaacttcgtttccgcgggcatccagacttcttttagaacagggaacccaacagggacgtatcagaacggatatgactctacacaacaatacgggtccaacgttcctaatatgcacaacggtatgaaccagcaggcttacgcataccccgccactgcagccgcacccatgattggctacccaatgcccactggttattcacagtag

SEQ ID NO: 184917 - DNA, 1845 bp, synthetic construct
  misc_feature 1..1845: note = Description of Artificial Sequence: Synthetic coding sequence
  source 1..1845: mol_type = other DNA
atgagcggctacagcagcgaccgggaccggggccgggaccggggctttggcgctcctagattcggtggctcccgggccggacccctcagtggcaaaaagttcggcaatcctggggaaaagcttgtcaagaaaaaatggaacctggacgagctgcccaaattcgagaagaacttctaccaggaacacccagatctggctcggcggaccgcccaagaggtggagacatatagacgctctaaggaaatcacagtgagggggcataattgcccaaagcccgtgctgaacttttacgaagcaaatttccccgccaatgtgatggatgtgattgcacggcagaatttcacagagcccaccgccattcaggcacaggggtggcctgtggctttgtcagggctcgatatggttggtgtggctcagactggatcaggaaaaacattgtcgtacctgttacccgcaattgtccatataaaccaccagccctttctcgagagaggagacggcccgatctgtctggtgctcgcccccactagggagctggcgcagcaggtccaacaggtcgccgcagagtattgccgagcgtgtaggctcaaatccacgtgcatctatgggggcgcccctaagggccctcagattcgggacctagagaggggcgtggagatctgcatagccaccccgggcagacttatcgattttctcgagtgcggaaagaccaatctccgcaggaccacttatctggttcttgatgaggctgataggatgctggacatgggctttgagccacagatccgcaaaatcgtcgaccaaatccgacctgaccgccaaaccttgatgtggtcagcaacctggccgaaggaggtccgccagttggccgaggatttcctgaaggattacatccacatcaatatcggggccctggaactcagcgctaaccacaacatcctgcagattgtggatgtctgccatgacgtcgaaaaggatgagaaactcatcagacttatggaggagatcatgagtgagaaagagaacaaaacaatcgtcttcgtggaaactaaacgacgctgcgacgaactgaccaggaagatgcgccgagatggatggcccgccatggggatccacggcgataagtctcagcaagaacgcgactgggtgctgaacgagttcaagcacggcaaggctccaatcttgatcgctaccgatgtggcgtctagagggctggatgtggaggacgtgaaatttgtcataaactacgattacccaaatagctccgaagactacattcaccgtatcggcagaaccgcacgctcgactaagaccggaaccgcttacacttttttcactccaaataatatcaaacaggttagtgacctgataagcgtactccgcgaagccaaccaggccataaatcccaagttactgcagctcgtagaggaccggggaagcggcagaagcagaggcagggggggcatgaaggacgaccggcgagaccgctactcagccggtaagcggggtggattcaacactttccgtgatcgcgaaaactatgatcggggatacagctccctcctcaaacgagacttcggtgccaagacacaaaacggagtctattcagccgctaattacacgaatggctcgttcgggagcaacttcgtgtcagcaggcatacaaacatccttcaggaccggaaaccccactgggacctaccagaatggctacgattcaacacagcagtatggcagcaatgtccccaacatgcataatggtatgaaccagcaagcatacgcgtaccccgctaccgccgctgccccaatgattgggtatcctatgcccacagggtatagccaatag

SEQ ID NO: 184918 - DNA, 1800 bp, synthetic construct
  misc_feature 1..1800: note = Description of Artificial Sequence: Synthetic coding sequence
  source 1..1800: mol_type = other DNA
atggacgtgcacgacctgttccggcggctgggcgccggcgccaagttcgatacaagacgcttctcggcggacgccgccaggttccagatcggaaaaaggaagtacgacttcgattctagcgaggtcttgcagggcttagacttcttcgggaacaaaaagagtgtgccaggtgtttgtggcgcctctcagactcaccaaaaaccccagaacggcgagaaaaaagaagaatctctgacagagcgtaagcgcgaacagagcaaaaagaaacgaaaaacgatgactagtgagatcgcatctcaggaagaaggcgcaactattcagtggatgagctctgttgaggccaagattgaggacaaaaaagttcagcgagaaagtaaactgacgagcggaaaactcgagaacctccgcaaagaaaaaatcaacttccttaggaataagcataaaatccacgtccagggcacagatctgcccgatccaattgccacttttcagcaattagatcaggaatacaaaataaacagccggctccttcagaacattctggacgctggcttccaaatgcctactcccatccagatgcaggccattcccgtgatgctgcatggtcgcgagctcttggcttccgctccgacagggtcaggaaagacactggccttcagcatcccaatattgatgcagctgaaacagccagctaacaagggttttcgcgcactgatcatatcccccactagagaactggcatcacaaatacatcgggagctgatcaaaattagcgaaggaaccggttttcgcatccatatgatacataaagccgcagtggctgctaaaaaatttggccccaagagctcgaaaaagttcgatattctggtgaccacacccaacaggttgatctacctgctgaaacaggaccctcctgggatagatttggctagtgtggaatggctcgtggttgatgagtctgacaagctttttgaagatggaaaaaccgggtttagggaccaactcgccagcatcttcctggcctgtacatcccataaggttagacgagcaatgttttctgcgacatttgcctatgacgttgagcagtggtgcaagctgaacctggacaacgtaatctccgtgagtattggcgcccgaaatagtgctgtcgagacagtcgaacaggaactcttgtttgtgggctctgagaccgggaagctcctggctatgagggagttagtgaaaaaggggttcaacccgccagtcctagtgtttgtccagtcaatcgaaagagcgaaagaactgttccacgaactaatttacgaagggataaatgtggacgttatccacgccgagcgcacccaacagcagcgcgataataccgttcatagtttccgtgccggaaaaatttgggtcctaatttgtacagctctcttggctaggggcatcgacttcaaaggcgtcaaccttgtgattaattatgattttcccacaagctccgtcgagtacatacatcggattggacggacgggcagagctgggaataaggggaaagctattacctttttcacagaggatgacaaacccctgctgcggtctgttgccaatgtgatccagcaggcaggttgccccgtgcctgagtacattaagggattccagaagctgctgagtaaacagaagaagaaaatgattaaaaaacccttggaaagagaaagcatctccacaaccccgaaatgtttcctggagaaggccaaggataagcagaagaaggtcaccggccagaattccaaaaagaaggttgctctcgaggataaatcgtag

SEQ ID NO: 184919 - DNA, 1476 bp, synthetic construct
  misc_feature 1..1476: note = Description of Artificial Sequence: Synthetic coding sequence
  source 1..1476: mol_type = other DNA
atgagcagcgtggaggccaagatcgaggacaagaaggtgcagcgggagagtaagctcacgagtggaaagctagagaacctgcgcaaggaaaaaatcaatttcctgcggaacaagcacaagatccatgttcagggcactgacctgccggatcctatcgcgacctttcagcagcttgatcaagaatataagatcaacagccggctgctgcagaatatcctggacgccggcttccagatgcctactcctattcagatgcaagccattccggtgatgctgcacggacgagagctgctggcttctgccccaaccgggagtggaaaaaccctggctttttccataccaattctcatgcagctgaaacagccagcaaacaaaggtttcagggcgctcatcatctctcccacgcgggaattggcctcacagatacatagagaactgattaaaatctccgagggaacaggttttcggattcatatgatccataaagcggccgtggctgctaagaaatttgggcccaagagtagcaaaaaattcgatattcttgtcaccacaccaaacagactcatctacctgttaaagcaagaccctccaggaatagacctcgcgtctgttgagtggttggtggtagacgagtcagacaaactcttcgaggatggtaagacaggtttcagagaccaactcgcctctattttcctcgcatgtacgagccataaagttcgacgagcgatgtttagtgccacttttgcatacgacgtcgaacagtggtgcaaattaaacttggataacgtgatatctgtgtcgatcggcgcgcggaactcagctgtggagaccgttgagcaagaacttctttttgttggctctgagacaggcaagctgctagccatgcgtgagctggtcaagaagggcttcaacccgccagtgctcgtttttgtgcaaagcatcgagagagcaaaagagctgtttcacgagctcatctatgaaggtattaatgttgacgttatccacgctgagcgcacccagcagcagagagacaacaccgtgcactcattcagagcgggaaagatttgggtcctgatctgtaccgccttactcgcaaggggaatagactttaagggggtcaatctggtgattaattacgattttccgactagctcggttgaatacattcaccggataggacggacaggccgagctgggaataaggggaaagccattacatttttcacagaagacgataagccgctgctgagaagcgtggctaatgtgatacagcaggctggatgtccagttcctgagtacattaagggcttccagaagctgctgagtaagcagaagaagaaaatgattaagaaacctctcgagagggagtccatctctactacaccgaaatgcttccttgagaaggctaaggataagcagaaaaaggtgactgggcaaaattctaaaaagaaggtcgccttggaagataagagctag

SEQ ID NO: 184920 - DNA, 2646 bp, synthetic construct
  misc_feature 1..2646: note = Description of Artificial Sequence: Synthetic coding sequence
  source 1..2646: mol_type = other DNA
atggccgccgacaagggccccgccgccggcccccggagccgggccgcaatggcccagtggcggaagaagaaggggcttagaaagaggcgcggggcggcctcacaggccaggggcagcgattctgaggatggtgagtttgagatacaggcggaagatgacgctcgggctcgaaagctgggccctgggagaccactgcctacctttcccacatcggaatgtacgtcagatgtggaaccagatactagagaaatggttcgtgcgcagaataagaaaaaaaaaaagtcgggcggattccagagtatgggcctgagctatcctgtttttaaaggcattatgaaaaagggctacaaggtgcctacccctatccagcgtaaaaccattcccgtcattctggacggcaaagacgtggttgcaatggctcggacaggcagcgggaagacggcatgtttcctgcttcctatgtttgaacggctcaaaactcattccgcccagactggggccagagccctaatcttgtctcccacacgagagctggcactccagaccctgaagttcactaaagaactcggcaagtttacaggtcttaagacagctctgattctcggcggtgatagaatggaagaccagttcgcggctcttcacgagaatcctgacataattatagccactcccggccggttagtccatgttgcagtcgaaatgagtctaaagctccaaagtgtcgagtacgtcgtatttgacgaagcggaccgtctgtttgaaatgggattcgccgagcagcttcaggaaattatcgccagactgcccggaggtcaccagactgtcctcttttcagctacattaccaaagctcttggttgagttcgccagagctggactgacggaacccgtgcttattcggctggacgtagacaccaaactgaacgagcagctgaaaacgtccttttttctggtacgagaggacaccaaggccgcggtgctactgcatctgctacataacgttgttcggccgcaggatcagactgtcgttttcgtggctacaaagcaccacgcggaataccttactgaactgcttacaacccagcgcgtctcttgcgcacatatctattctgcactggacccaactgcccgcaagattaacctggctaagttcacgctgggaaagtgttcaactctaatcgttactgatctcgctgcgcgagggctcgacatcccactactggacaatgtgatcaattatagttttccagccaagggtaagttattcttgcatcgggtgggtagggtagcacgcgcagggcgcagcggcacagcctactcactggtggctcccgacgagattccatacctcctcgatcttcacctttttcttggtcgctctctaaccttagctagaccgttaaaggaaccttctggcgtggccggggttgacggcatgctcggtagggtcccacagtctgttgtagacgaggaggactctggcctgcaaagcactttagaagcaagcctcgaattaaggggacttgcacgggttgccgataatgcccagcagcagtatgtgaggtcacgccccgcaccctctccagaaagcattaaacgcgccaaggaaatggacttggtaggtttgggcctgcaccccctgttctccagtcggttcgaggaagaggagctacagcggctgcgactagttgacagtataaagaattatagatcaagagccacaatcttcgaaattaacgcaagttccagagacctgtgttcccaggtgatgagagctaaacgccagaaggacagaaaggcaatcgccagattccagcagggccaacaggggcgtcaggaacagcaagagggaccagttgggcccgctcctagccgacctgccttgcaggagaaacagcctgaaaaagaagaggaggaagaggccggcgaatctgtggaggacatcttttctgaagttgttggcaggaagaggcagcgcagcgggcctaaccggggcgcgaagcgacggagggaggaggcccgccaacgagaccaggaattttatatcccatatcgacccaaggacttcgattccgaacggggactctccatctccggcgaaggaggcgcttttgagcagcaggccgcgggagcagtcctggacctcatgggcgatgaagcccagaacctaacaaggggacgccagcaactgaagtgggatcgtaagaagaagcgcttcgtgggacagtctggacaggaagacaagaagaagattaagactgagtcaggtcggtacatttctagctcttataaacgagatttgtatcagaaatggaaacagaaacagaagatcgatgaccgggactctgatgaagagggagcttctgacagacgggggcctgagagacgcggcgggaagcgcgatagagggcagggagcgagccgaccccatgctccaggtacccctgcgggcagggtgcgcccagagctcaagacaaagcagcagatccttaagcagcggaggagggcacagaaactgcattttttacagagaggcggactgaagcagctgtccgctaggaataggcgcagagtccaggagctgcagcaaggagccttcggcaggggagcacggtccaagaagggaaagatgaggaagagaatgtag

SEQ ID NO: 184921 - DNA, 2649 bp, synthetic construct
  misc_feature 1..2649: note = Description of Artificial Sequence: Synthetic coding sequence
  source 1..2649: mol_type = other DNA
atggccgccgacaagggccccgccgccggcccccggagccgggccgcaatggcacagtggagaaaaaagaaaggacttcggaagagaaggggtgctgcttcccaagcaaggggatccgatagcgaggatggagagttcgaaattcaggccgaggatgacgcccgcgctcggaagctcggccctgggagaccactgcctacatttcccacatcagagtgcaccagcgacgttgagcctgacacaagggaaatggtgagggctcagaataagaaaaaaaagaaatcagggggcttccagagtatgggactgtcatatccggtctttaagggcatcatgaaaaaagggtataaggtgcccaccccgatccagcgtaaaacaatcccagtcattttggacggaaaagacgtggttgctatggcgcggaccgggtctgggaaaacagcatgctttctgttgccgatgtttgaacgcctcaagacccatagtgctcagactggcgccagggccctcatcctgtccccaactcgggaattggcgttgcaaacgctgaaattcacaaaggagttgggaaagttcaccggactgaagacagcacttatccttgggggcgatcggatggaggatcagtttgcagcccttcatgaaaacccggatataattattgccacgccaggacgactggttcacgtcgctgttgaaatgtcactcaaactgcagtccgtggagtacgttgtcttcgacgaggccgacagactcttcgagatgggctttgccgagcagctgcaagaaatcatcgcccggctacctggaggtcaccagaccgttctgttcagcgccacactaccgaagctactggtagaattcgcgcgggctggcctgacagagcccgttctcattcggctcgacgtggataccaaactgaatgagcaactgaagacgtcttttttcctggtgagagaggacactaaggccgctgtcctactgcacctgctccacaatgtcgtgcgaccgcaggatcaaacagtggtctttgtggccacaaagcaccatgccgagtacctgacagagctgctgaccacccagagagtgagctgcgcgcacatctacagcgcccttgatcctactgctcgcaagattaaccttgcaaagttcaccctgggtaagtgtagcacactgatcgtgacagatttggctgcacgaggactggacatcccattactagataatgtcatcaattatagctttcctgccaaaggcaagttattcctgcaccgagtgggcagagtggcgagggcgggaaggtcaggcacggcctacagcctcgtcgccccagacgagattccgtacttacttgacttgcatctgtttctgggtcgcagcttgacactagccagaccactcaaagaaccatccggggtggccggggtggacggcatgctgggaagggttccacagtctgtcgtggacgaggaagacagtggcctccagagcacattggaagcaagcctggagttgcggggcttggcccgggtcgcagataatgcgcagcagcagtacgtgcggagtcgacctgccccctcccctgagagtattaagcgtgccaaggaaatggacttagtgggcctgggcctgcacccacttttctcgtcacggttcgaggaagaggagctgcagaggttgaggctggtagatagcattaaaaactatagaagtcgtgctacaatttttgaaataaatgcgtcatctcgggacttgtgcagtcaagtgatgcgggcaaaacggcagaaggatagaaaggccatagcacgcttccagcaaggccaacaagggaggcaggagcaacaggaaggccccgtagggccggctccctcacgtcctgctctgcaggaaaaacagcccgaaaaggaagaggaggaagaagctggcgaatccgtggaggacattttcagcgaggttgtgggtagaaaaagacagcgatccggacctaacaggggagctaagagacggagagaggaagcgaggcaaagggaccaagaattctatattccctaccgccccaaggactttgacagtgagaggggactgtccatttccggagaaggcggagcattcgaacagcaggcagctggcgccgttttggatttgatgggtgatgaggctcagaaccttacacgcgggcgacaacagttgaagtgggaccggaagaagaaacgctttgtgggccagagcgggcaggaggataaaaagaaaattaagactgaaagcgggaggtatattagttcaagttataaaagagacctctatcagaagtggaagcagaagcaaaagatcgacgacagggactccgacgaagaaggggcttcagatcggcggggaccagaaaggagaggtggcaaaagagaccgggggcaggccggagcctcccgcccacacgcaccgggcacaccagccggccgagttagacctgaactgaaaactaaacagcagatacttaagcagaggcgccgggcacagaagctgcactttctccaacgggggggactgaagcaactgtccgccagaaatcgccggagggtgcaggaactgcaacagggggcctttggaaggggggcccgatccaagaaaggtaaaatgcgcaaacgtatgtag

SEQ ID NO: 184922 - DNA, 1452 bp, synthetic construct
  misc_feature 1..1452: note = Description of Artificial Sequence: Synthetic coding sequence
  source 1..1452: mol_type = other DNA
atgagcaccgcccggaccgagaaccccgtgatcatgggcctgagctcacagaatggccaactgagggggcctgttaagcccactggagggcccggtgggggcggcacacagacccagcagcaaatgaaccaattaaagaatacaaatactattaataacggaacccagcagcaggcacagtcaatgaccaccactatcaagcccggcgacgactggaaaaagaccctgaaactccccccaaaagacctgaggatcaaaacttcagatgtgacttccaccaaaggcaacgagttcgaggattactgtcttaaaagagaactccttatgggaatattcgagatgggctgggaaaaaccttctcccatccaagaggaaagcattcccatcgcactatccggccgggatatcctggcacgagccaaaaatggaaccggcaagagcggagcctacctgattcccctgctggaacgactggacttaaagaaggacaacatccaggcgatggttattgtaccaactagagagctagcactccaggtgtcccaaatttgcatccaggtgagtaaacatatggggggcgccaaggttatggccacaacaggagggaccaatctgcgggacgacattatgcgtcttgacgacactgtccacgttgtgatcgcgacacccggacgtatcctcgacctgatcaaaaaaggtgtagccaaagtcgaccatgttcagatgattgtgctagatgaggcggacaagctgctgagccaggattttgttcaaattatggaggatatcatacttacactgcccaaaaataggcagattctactgtactcagccacattccctcttagtgtacaaaagtttatgaacagccacctgcaaaagccctacgagattaacttgatggaagagctgactttgaaaggcgttactcagtattacgcctatgtgaccgagagacagaaggttcattgcctgaataccctcttcagtcggctgcagatcaaccagtccattatattttgcaactcatctcagagagtagaactgctggcaaagaaaatttcccagctaggttattcatgcttttatatacatgccaaaatgcgacaagagcatcgcaaccgcgtgttccacgatttccgtaatgggctgtgccggaacctggtctgtacggacctcttcaccagggggatagacatccaggccgtgaacgtggtgataaactttgactttcccaaactggcagaaacttatttgcacaggatcggccggtctggcaggttcggacacctgggcctggccattaatctgatcacttacgacgataggttcaacttgaagtcaattgaggaacaactggggaccgaaataaagcccatcccatctaatattgataagtctctctacgttgcagaataccactctgaaccagtggaggacgagaagccatag

SEQ ID NO: 184923 - DNA, 1452 bp, synthetic construct
  misc_feature 1..1452: note = Description of Artificial Sequence: Synthetic coding sequence
  source 1..1452: mol_type = other DNA
atgagcaccgcccggaccgagaaccccgtgatcatgggcctgagcagccaaaacgggcagctgcgagggcccgtgaagcccaccggtgggcctgggggcggcggcacccagacccaacagcaaatgaaccagttgaagaataccaacactataaataatggaacccagcagcaagcccaaagcatgaccaccacaatcaaaccgggtgacgactggaaaaagacactgaagctgccaccaaaagacctgcggataaaaacgagtgatgtgacaagcactaaagggaacgagttcgaggactactgtctcaagcgcgagctgctgatgggcatttttgaaatgggatgggaaaagccttcccccattcaggaagaaagtatcccaatcgccttgtccggcagggatattttggcgcgagccaaaaatgggacaggaaaaagcggggcctatctgattccactattagaacggctggatttgaagaaggacaatatccaagccatggtaatcgtcccgactagagaactggctctgcaagtgtcccaaatctgcatacaggtgagcaaacacatgggcggggcgaaggtgatggccaccacgggcggcaccaatctcagagacgacatcatgagactggatgacaccgtacacgtggtgatagccaccccagggcgcattctcgatctgataaaaaagggcgttgccaaagtcgatcacgtgcagatgattgtcctagacgaggctgacaaactgctctctcaagattttgtgcagataatggaggacatcatcctgactctcccgaagaaccgtcagatactcctgtatagcgcgacgtttccgctgagcgtgcaaaagttcatgaattctcatctccagaagccttatgaaatcaatttaatggaggaacttaccctgaaaggcgtgacacaatactatgcctacgttaccgagaggcaaaaggttcattgcttaaatactctcttctctcggttacagatcaatcagtctattatcttttgcaacagctctcaacgtgttgaactattagccaagaaaatcagtcagctcggatactcctgcttttacattcacgctaaaatgagacaggaacatcgcaatagagtctttcacgatttccgcaacggactgtgtcggaacctggtttgcaccgatctgtttacccggggaatagacattcaggcggttaacgtggtgattaactttgacttccctaagcttgcagagacctacctgcacagaatcggccggtcaggccgctttggccacctcggcctcgccatcaacctcataacttatgacgaccggttcaatctcaagagtatcgaagaacaattagggactgagattaaaccaatcccgtctaatattgataaatccttgtatgtggcagaataccacagcgaacctgtggaagacgaaaaaccctag

SEQ ID NO: 184924 - DNA, 1452 bp, synthetic construct
  misc_feature 1..1452: note = Description of Artificial Sequence: Synthetic coding sequence
  source 1..1452: mol_type = other DNA
atgagcaccgcccggaccgagaaccccgtgatcatgggcctgagcagtcagaacggacagctgagaggaccagtcaagcctaccggtgggccgggaggtgggggcacacagacccagcagcaaatgaatcagctgaaaaacacgaatacaataaacaatggaacacagcaacaagcccagtcaatgaccaccacaattaagcctggtgacgattggaagaagaccttgaaacttccccccaaggacttgcgtattaagaccagtgatgtaacttccacaaaaggcaacgagttcgaggactactgtctgaagagggagctcttgatgggcatatttgagatggggtgggaaaaaccgtcccccatccaggaagaaagtatcccgattgccctcagcggaagggacatcctggctcgtgctaaaaatgggactggaaaaagtggcgcctatctcatcccactgttggagaggctggatctcaagaaggacaatattcaagcaatggtgatcgtgccaaccagagagcttgctctccaggtgtctcagatctgtattcaagtaagtaaacacatgggaggcgctaaggtgatggccacgaccggcggaacaaaccttcgcgatgatataatgcgtcttgacgacaccgtgcatgtggtgattgccaccccaggtcgaatcctagacctgatcaagaaaggtgtggccaaagtagatcacgtgcaaatgattgtcttggatgaggcagacaaactgttaagtcaagacttcgttcagataatggaagatattattctgactctccccaagaatcgacaaattctgctatacagcgcaaccttccccctgtcagtgcaaaaattcatgaattcccatcttcagaagccctatgagatcaacttgatggaggaactcactctcaagggagtgactcagtactacgcttacgtaaccgaacgccagaaggtgcattgcctgaacactttattttcccggttgcagattaaccaatctattattttctgtaacagcagccagcgggttgagttgctggcaaagaagattagtcagctcggctacagctgtttttatatacacgctaaaatgcgccaagagcacagaaatcgggtatttcacgacttccggaacggcctttgtagaaatctggtgtgtaccgatcttttcacccgggggattgatattcaggccgtaaatgtggtcattaatttcgatttcccaaaactcgcggagacatacctgcatcggatcggtcgttccggccggttcggtcatttaggccttgcaataaacctgattacttatgatgataggtttaatctgaagtcaattgaggaacaacttgggacagaaattaagcctatcccttctaacatagataaatctctgtatgtcgcagagtaccatagcgagcctgttgaggatgaaaagccctag

SEQ ID NO: 184925 - DNA, 564 bp, synthetic construct
  misc_feature 1..564: note = Description of Artificial Sequence: Synthetic coding sequence
  source 1..564: mol_type = other DNA
atgagcaccgcccggaccgagaaccccgtgatcatgggcctgagctctcagaatggtcagctgcgggggccagtgaagcctacaggaggacccggcggtggcggtacgcaaacacaacagcagatgaaccagcttaagaacactaataccattaacaatgggactcagcaacaggcccagtccatgactactacaatcaagcccggtgacgattggaagaagacactcaagctgccccccaaagacctcaggatcaaaaccagcgacgtaacaagcactaagggcaacgaatttgaggactattgcctcaagagggagctcctgatgggtatattcgagatgggttgggagaaacccagcccgatccaggaggagtccataccaatcgccctctccgggcgggacatattagcaagggccaaaaacgggactggcaaatctggcgcctatttaatacctctcctagagagactcgacttgaaaaaagataacattcaggccatggtcatcgtgcccacaagagagctggctttgcaagtgtctcagatatgtaccgtgtgttag

SEQ ID NO: 184926 - DNA, 5139 bp, synthetic construct
  misc_feature 1..5139: note = Description of Artificial Sequence: Synthetic coding sequence
  source 1..5139: mol_type = other DNA
atggagcggaacgtgctgaccaccttcagccaggagatgagccagctgatccttaacgaaatgcctaaagctgaatattccagtttatttaatgattttgtcgagagcgagtttttcctgatagatggcgattccctactcattacatgtatctgcgaaatatcatttaaaccgggccagaacctccactttttctacttggtcgagcgttacctggtggaccttatttccaagggtggacagttcacgattgtattttttaaagacgcagagtatgcttatttcaatttccccgagttgctttccctccgaacggcactgatactgcacttacagaagaatacgacgatcgacgtcaggacaactttctccagatgcctgagtaaagaatgggggagctttctagaagagagttatccctacttcctgattgtggcggacgaaggactcaacgacctgcagacccagctttttaatttcctgattattcacagttgggcgcgaaaggttaatgtggtcctctctagtggccaagaatctgacgtactgtgcctttatgcgtatttgctccccagcatgtataggcaccagatctttagttggaaaaacaaacagaatatcaaagatgcctataccacattgctgaaccagctcgaaaggtttaagctgtccgctttggctccgttgttcgggtctttgaaatggaacaacatcacggaggaggcccacaagaccgtgagtctgctcactcaagtgtggcctgaaggatccgacatccgccgtgtgttttgtgtcacttcttgttctcttagtcttagaatgtatcatagatttctcggcaatagagaaccgtccagtgggcaggagactgagattcagcaggtcaatagcaactgcttgacactccaggagatggaggacttatgcaaactccactgcctcacagttgttttcttactccacctccctctttcacaaagagcatgcgcccgcgttatcacctctcattgggcggaggatatgaagcctctgctgcagatgaagaaatggtgcgagtatttcattctgagaaatattcataccttcgaattctggaatcttaacctaattcatctgagtgatcttaatgatgagctgctgcttaagaacatagcattctactacgagaacgaaaacgttaaaggacttcatcttaaccttggggacactataatgaaggactacgaatatctgtggaataccgtgtcaaaattggtacgggactttgaggtcggccaacccttccctttgagaacaactaaagtctgctttttggaaaagaaaccatcacctatcaaagatagcagcaatgaaatggttccgaacctgggcttcatcccgacctcctctttcgtcgtggataaattcgcgggggatattctgaaggatttgcccttcctgaaatcagacgacccgatcgttacaagcctcgtcaagcaaaaagaatttgacgagttggtacattggcatagtcataagcccctatcagatgactacgacagaagccgttgccagttcgacgaaaaatcgcgcgaccctagggtgttgaggtccgtgcaaaagtaccatgtgttccaacggttctatgggaattctctcgagacggtgagctcaaagattatcgtgacacagactattaagagtaagaaggacttcagcgggcctaagagcaaaaaagcccatgagacaaaggccgagattatcgctcgagagaataagaaaagactgttcgctcgtgaggaacagaaggaggaacagaaatggaatgccctctcttttagtatcgaggagcaactgaaagagaacttgcattccgggataaaatcactggaagactttcttaaatcctgcaaaagtagctgtgtcaaacttcaggttgaaatggtcggcctaaccgcctgcctgaaagcatggaaagagcattgtaggtccgaagagggaaaaacaacgaaagacttgtctattgccgttcaggtgatgaagcgtatccacagcctgatggaaaagtattcagagctcctgcaagaagacgaccgccaactcattgcccggtgcctgaagtacttaggcttcgatgagttagcctcgtctctgcatccagcccaggacgccgaaaacgacgttaaggtcaagaagcgcaataagtattctgtcgggatcgggcccgctaggttccaactccagtatatgggtcattacctgatcagggatgaaaggaaggacccagacccccgcgtgcaggactttatccccgacacttggcaacgggaacttcttgacgtcgtcgacaagaacgaaagcgcagtcatcgtagctcccacatcctctgggaagacatacgcctcatactactgcatggaaaaggtgctcaaagaatctgatgacggcgtcgtcgtgtacgtggcccctacgaaagcactggtgaatcaagttgccgccaccgtccagaaccgctttaccaaaaacctcccctctggcgaggtgctatgtggagtgttcactcgggagtatcggcatgatgcattgaactgccaggtgctcattactgtcccagcctgcttcgagatcctgctgctcgctccacacagacaaaattgggtgaaaaagatcaggtatgtgatttttgatgaagtgcattgtctggggggcgagattggggccgagatctgggaacacctgctagtgatgatcagatgccccttcttagccctgtcagcaaccatttcaaatccagaacatctcacagaatggctgcagagcgtcaagtggtattggaaacaagaggacaagataattgaaaataacaccgccagtaagcggcacgtcgggaggcaggcggggttccctaaagattacctgcaggtgaaacagtcctacaaagttaggttggtactgtacggagagagatacaatgacctcgagaagcacgtttgctctatcaagcacggcgacatccatttcgatcactttcatccttgcgccgccttgactaccgaccacatcgagaggtacggttttccccctgatcttacactgtcacctcgcgaatctattcaactttacgacgcgatgttccagatctggaaaagctggcccagggcacaggaactctgccccgagaactttatccactttaacaataagctagtgattaaaaaaatggacgctcggaagtacgaggagtccctgaaagctgaactgacgtcatggatcaagaatggcaacgttgagcaggctagaatggtcctccaaaatctttctcccgaggctgatctgtctcccgagaacatgattactatgttcccactcctggtagagaaacttcgcaagatggaaaagttgcccgcactgtttttcctctttaaactgggcgctgtcgagaatgccgctgagagcgtttccacgtttctgaagaagaagcaagaaacgaaacgccccccgaaggccgacaaagaagcacatgttatggccaacaaactaagaaaagttaaaaagtcaatcgaaaagcagaaaatcatcgacgagaaaagccaaaagaagacacggaacgtagaccaaagcttgatccacgaggctgagcatgacaacctcgtgaagtgtttagagaaaaatcttgagattccacaagattgcacctacgccgatcagaaagctgttgacacagaaacattacaaaaagtgttcggccgggtgaagtttgaacggaagggtgaggagctcaaggccttggctgagaggggaatagggtaccatcattcagcaatgagctttaaggagaagcagctggttgagattttatttcggaaaggataccttcgcgtggtgaccgctacaggcactctggccctgggggtcaacatgccatgcaagtccgtggtgttcgcccagaatagcgtgtatttggacgccctgaattacaggcagatgtctgggcgggctggcagacgggggcaagacctgatgggggacgtctatttttttgatattccgttcccaaagatcggtaagcttattaaaagtaatgtaccagaattacgggggcatttccctctgtccatcaccctggtgctgcggctaatgttgctcgcgtccaagggcgacgaccccgaggatgccaaggccaaagtgctatcagtgctcaagcacagtctgctgagttttaaacagcccagagtgatggatatgttgaaattgtacttcctattctcattacagttcttggtgaaagaaggatatctggaccaggaaggcaacccgatgggattcgccggccttgtatcccacttacattatcacgaaccgagcaaccttgtgttcgtgagctttctggtcaacggcctgtttcacgacctgtgtcagccaaccaggaaaggtagtaagcatttctctcaggatgtcatggagaagttagtccttgtgctagctcacttgttcggccgcaggtacttccccccaaagttccaggatgcccacttcgagttctaccagagcaaagtttttttggacgacctacccgaggatttttccgacgcgctcgacgagtataacatgaagattatggaggattttacaacttttctaagaattgtgagcaagctggcagacatgaaccaggaataccagctgccactgagtaaaattaagttcaccgggaaagaatgcgaggattcgcaactggtttcccacctgatgtcctgtaaggaaggacgagtcgcaatcagtcccttcgtatgcctatctggaaactttgacgatgacctcttgagactcgagacacctaatcacgtcactctgggaacaattggtgtgaatagatcccaagcccccgtcttgctgtcccagaagtttgataacaggggcagaaagatgagtctgaatgcctacgctctggacttctataaacatggatcactcatcggtctggtgcaggacaaccgtatgaatgaaggggatgcctattatctgcttaaagacttcgccctcactatcaagtcgatcagcgtgagcttgagggagttgtgcgaaaacgaagatgataacgtcgttcttgcctttgagcagctctctacaacattctgggaaaaacttaataaagtgtag

SEQ ID NO: 184927 - DNA, 363 bp, synthetic construct
  misc_feature 1..363: note = Description of Artificial Sequence: Synthetic coding sequence
  source 1..363: mol_type = other DNA
atggagcggaacgtgctgaccaccttcagccaggagatgagccagttaattcttaatgaaatgcctaaagctgagtattcaagtctgtttaatgatttcgtggaaagcgagttcttcctcatcgacggtgattccctgttaatcacttgcatctgtgagatatcttttaaaccaggacagaacctgcacttcttttatctcgtcgaacgttacctagtggacctgataagcaaggggggccagttcaccatcgtgttttttaaggacgcggagtacgcctactttaattttcccgaactgctctctttgcggacggccttaatcctccacctacagaagaataccactatcgatgtgcgctag

SEQ ID NO: 184928 - DNA, 885 bp, synthetic construct
  misc_feature 1..885: note = Description of Artificial Sequence: Synthetic coding sequence
  source 1..885: mol_type = other DNA
atgatccggtgccccttcctggccctgagcgccaccatcagcaacccagaacacctcactgaatggctgcaatcagtcaaatggtattggaaacaggaggacaaaattatcgagaataacacagcaagtaaaaggcacgtgggtaggcaagctgggttccccaaagattatttacaagttaaacagagctacaaggtgagattggttctgtacggggagaggtacaacgatctggaaaagcatgtgtgttctatcaagcacggtgacatccatttcgaccacttccatccctgtgcggcccttacaactgaccatatcgaacgctatgggttcccccctgatttgacacttagcccccgggagagcatacagctatatgacgccatgtttcagatctggaaaagttggccgcgagcccaagagctctgtcctgaaaactttattcacttcaataataaactggtgatcaagaagatggatgccaggaagtatgaggagtcacttaaggcagagctgaccagttggattaagaacggcaacgtggagcaagcaagaatggtgctccagaacctgtcacctgaggccgaccttagtcccgagaacatgatcacaatgtttccccttctggttgaaaagctgagaaagatggaaaaactacccgccctgttttttctcttcaaactcggggctgtggagaacgccgcagagagcgtgtcaacctttttgaagaaaaaacaggagaccaagcgtcctcccaaggccgataaggaggcacatgtcatggccaacaagctgcgcaaggtcaagaaaagcattgagaaacagaaaataattgacgagaaaagtcagaaaaatcaaaaatgtggctcaaaacctaatacgtag

SEQ ID NO: 184929 - DNA, 1062 bp, synthetic construct
  misc_feature 1..1062: note = Description of Artificial Sequence: Synthetic coding sequence
  source 1..1062: mol_type = other DNA
atgcagagcaagcgggactgcgagctgtggtgcgagcgggtgaaccccgagaacaaggccgctttagaagcttgggtccgcgaaaccggtattcgcctcgtacaggtgaatggacagagaaaatacgggggcccgcctcccggatgggtggggagccccccccctgcaggatccgaagtcttcatcggtaggttgcctcaggacgtgtatgaacatcaacttattccactgttccagcgtgtgggcagactgtacgagtttcgtctgatgatgacgttctccgggttgaacagggggttcgcgtacgctaggtattcaagcaggcgaggagctcaggccgccattgcaactcttcacaatcaccccttgaggcctagctgcccgctcctcgtgtgtcgcagtacggagaaatgtgaactgtccgttgacgggctacccccgaacctcacaaggtctgccctgctgctagcactccagccactgggacccggtttacaagaggcacggctattgccttcaccaggcccagccccgggccagatcgcattgcttaaattctcatctcatagagctgctgcaatggctaaaaaggccctggttgagggacaatcacatttatgtggcgagcaggttgccgtggagtggctgaagccagatctgaagcagcgactgcggcagcagctggtcggcccattcctgcgctccccacagccggaaggatctcagctggcattggcgagagacaagttgggattccagggtgcccgtgccactttgcagctgttgtgccagcgtatgaaactcggctctccagtctttctaaccaaatgcctcggtatcggcccagccggttggcatcgcttttggtaccaggtggtgatccctggacacccggtgccattttctggactgatttgggtggtcctgaccctggatggtagagatggccacgaagtagcaaaagatgctgtcagcgtccgtctcctgcaggcgctgtcagagtcaggagctaatttgctgtggtccgccggtgccgaagcaggtaccatggtaaaacaatag

SEQ ID NO: 184930 - DNA, 1491 bp, synthetic construct
  misc_feature 1..1491: note = Description of Artificial Sequence: Synthetic coding sequence
  source 1..1491: mol_type = other DNA
atgttcgccaaggccacccggaacttcctgcgggaggtggacgccgacggggatctgatcgcagtttccaatttgaatgacagtgacaagctgcagctgctctctctcgtgaccaagaagaagcgtttctggtgctggcagaggcccaaatatcagttcctgtccctgactttgggggacgtgctgatagaagatcagtttccctcaccagtggtcgtcgagtctgactttgtgaagtatgaagggaaatttgcaaaccacgtgtcgggcacccttgagaccgccctgggtaaggttaaacttaatctagggggcagttcccgcgtagagtcacaaagctcatttgggaccttgcgtaaacaggaggtggatctgcaacagctcattcgtgactctgccgagcgcactatcaacttgcggaatcccgttctccagcaggtgctggaaggccgtaatgaagtgctgtgtgtcctgacacaaaagattaccaccatgcagaaatgcgtcatcagcgagcatatgcaggtcgaagaaaagtgtggcggcatcgtcggaatccaaaccaaaactgtgcaggtgtccgctaccgaagacgggaacgtgaccaaggattcgaacgtggtgcttgagatccccgcagctaccaccatagcctacggcgtgatcgaactatacgtgaagttggacggacagttcgaattctgcctcctcagaggcaagcagggaggatttgagaataaaaaaagaatcgatagcgtgtacctggatccactcgtctttcgggagttcgccttcattgatatgccagatgccgcacatggtatcagcagccaggatggccccctgagtgtgctaaaacaagccaccttgctgctcgaaaggaactttcatcctttcgctgagctcccagaacctcagcaaacggcactgagcgacatttttcaggccgttctgttcgacgatgagctcctcatggttcttgaaccagtgtgtgacgacttggtaagcggcctgtcccccacagtagctgtgcttggggaattaaagccgcgccagcaacaggatctggtggcgtttctgcagctggttgggtgttctctccaggggggctgcccgggtccggaggatgccggaagcaaacagctgttcatgacagcctacttcctcgtctcagccctggccgagatgcccgatagcgccgcagcactactgggcacctgctgtaagctccagatcatccctaccctttgccacttgctgcgagctttgagtgacgatggcgtgagtgatctcgaggatcccactctgacccctcttaaggacactgaacgtttcggaatcgtacaacgactctttgcatctgccgatatctcactggagcgcttgaaaagtagtgtcaaggcagtcattctgaaggacagcaaagtgttccccctgctactgtgtatcactctgaacggtctgtgtgcactcggccgcgagcattcgtag

SEQ ID NO: 184931 - DNA, 1491 bp, synthetic construct
  misc_feature 1..1491: note = Description of Artificial Sequence: Synthetic coding sequence
  source 1..1491: mol_type = other DNA
atgttcgccaaggccacccggaacttcctgcgggaggtggacgccgacggcgatttaatcgcagtgtctaaccttaacgattctgataagctgcaattgctgagtctcgtgacgaaaaaaaagagattctggtgctggcaaaggccgaagtatcagttcttgtctcttactctcggggatgtcctcatcgaagaccagtttccgtctcccgtggttgtagaatccgattttgtgaaatatgagggcaaattcgccaaccacgtgtccgggacactggagaccgctctcgggaaggttaagctcaatctggggggaagctccagggtcgaatcccagagttcattcggcacactccgcaaacaggaggtcgacctgcaacagctgattcgcgatagtgccgagagaaccatcaaccttcgcaacccagtgctacaacaggtgctggagggtcgtaacgaggtgttatgcgtgttaacccagaagatcactactatgcagaagtgtgtgattagcgaacacatgcaggtcgaggagaagtgcgggggaatcgtggggatccagacaaagactgtgcaggttagtgcaacagaagatggtaatgtgaccaaagatagtaacgtggttctggaaattcctgcggcaaccacaattgcatatggggtgatcgagctctatgtgaagctagatgggcagtttgaattttgtttactgaggggcaaacaaggaggctttgaaaacaagaaaaggatcgactcagtctaccttgacccccttgtctttagggaattcgcgttcatcgatatgcccgatgctgcacacgggattagtagccaggacgggcccctgagcgtgctgaaacaggcgactctgttactggaaagaaactttcacccttttgccgagctgcctgagccacaacagactgcactctctgatatattccaggcagtgcttttcgatgatgaactactaatggtcctagaaccagtttgtgacgatttggtctcaggcctgtctcccactgtggccgtgctgggagaactgaagcctaggcagcagcaagacttggtggcgttcttgcagcttgtcggctgctcacttcagggtggatgcccgggccctgaggacgccggaagtaaacagctgtttatgaccgcctatttcctggtgtctgccctagccgaaatgcccgattccgcagctgccctcctaggtacatgttgtaaactgcagattataccaaccctgtgtcatttactgcgcgcattgtctgatgacggtgtcagcgacttagaagatccaacactgactccactcaaggatacagagcgcttcggcatcgtgcagcgcctgttcgctagtgctgacatatcactggagcggctgaagtcatccgtgaaggccgtgattctgaaagactccaaagtctttccccttctgctttgtatcacgctgaatggcctgtgtgcccttggccgcgagcattcctag

SEQ ID NO: 184932 - DNA, 999 bp, synthetic construct
  misc_feature 1..999: note = Description of Artificial Sequence: Synthetic coding sequence
  source 1..999: mol_type = other DNA
atgcagaagtgcgtgatcagcgagcacatgcaggtggaggagaagtgcggcggaatcgtgggaatccaaactaagacggtgcaagtgtccgcaacagaggatggaaatgtgaccaaggactccaatgttgtcctcgaaattccggcagccacaaccatcgcctatggagttatcgaactgtacgtcaaactagatgggcagttcgagttttgcctccttcggggcaagcagggcggcttcgaaaataaaaaacgaattgatagcgtgtatcttgatccccttgtgtttagggagttcgcttttattgacatgcccgatgccgctcacggaatttcctcacaggacggaccgctgagtgtgctcaagcaggcaactctgctgttggagcgcaatttccacccatttgccgagctgccggagcctcagcagaccgcactctcagacatattccaagcagtcctgttcgatgatgaactgctgatggtgttggagccggtgtgtgatgatctggtgtctggtctatctcccacagtcgcggtgcttggggagcttaagcccaggcagcagcaagaccttgtggccttcttacaactcgttggctgcagccttcagggggggtgcccaggcccagaggacgctggctcgaagcagttgtttatgactgcgtactttctggttagcgccctggcagaaatgccggactccgccgcagctctcctgggaacttgttgtaagttgcagatcatcccaactctttgccacttgcttcgtgccctcagcgatgacggcgtatccgatctggaggatcccactctgacaccgttaaaggacacagagcggttcgggatagtgcagcggttgttcgctagtgcggacatctccctggagagactgaagtcatcggtcaaggctgtaattctcaaggactcaaaagtgttccccctgctactgtgtatcacattaaacgggttgtgcgctctgggtcgtgagcacagctag

SEQ ID NO: 184933 - DNA, 999 bp, synthetic construct
  misc_feature 1..999: note = Description of Artificial Sequence: Synthetic coding sequence
  source 1..999: mol_type = other DNA
atgcagaagtgcgtgatcagcgagcacatgcaggtggaggagaagtgcggcggaatagtgggaatccagactaagaccgtgcaggtgtctgctacagaggatggaaacgtaacaaaggattccaacgtcgtccttgaaattcctgcagccacaaccattgcctatggggttattgaactgtacgtaaaattagacggtcaatttgaattctgtctgttacgtgggaaacagggcggctttgagaataagaagcgtatagactcagtgtatttagacccactagttttccgcgaattcgctttcattgatatgcctgatgccgcacacgggataagctcccaggacgggccgctgtccgtcctcaagcaggctacccttctcttggaacgcaactttcacccattcgctgaactgccagagcctcagcagactgcactgtccgatatcttccaggccgtcctgtttgacgatgaattactcatggttctcgagcctgtctgcgatgacctagtcagtggcctgtccccaaccgttgctgtgctaggagaattgaagccgcgacaacagcaggacttggtagcatttctgcagttggtgggctgctccctgcagggaggctgtcccgggccagaggatgctggcagcaagcagttatttatgaccgcctactttcttgtctctgcgcttgctgagatgccggacagcgccgcggcgctgctgggtacttgctgtaagctgcagatcatccctacgctgtgtcacctgctgagagctctcagcgatgacggggtctcggacctggaggaccctacactgacccctctgaaagacaccgagcgcttcggcattgtacagaggttgttcgcgagtgcagatattagcctcgagagactcaagtcctctgtgaaggcggtgatcctgaaggatagcaaggtattccctctgctcctgtgtataactctcaacggtctctgcgctctgggacgcgagcactcttag

SEQ ID NO: 184934 - DNA, 1575 bp, synthetic construct
  misc_feature 1..1575: note = Description of Artificial Sequence: Synthetic coding sequence
  source 1..1575: mol_type = other DNA
atggccaacagcgccggcttcctgggcgacctgaccaccgagggcatcaataaacctggcttttacaaaggcccagctgggtcccaagtgacactaagttcactgggcaaccaaactagagtcttactggaggagcaggctcgccacttactgaatgaacaggagcatgccacaatggcgtactacttggatgaatatcgaggtgggtcggtaagtgttgaagctctggtgatggcactttttaagctcctgaacactcatgcgaagttttcattactaagtgaggtgcgcggcactattagtccccaagacctggagaggttcgaccacctcgtgctgaggcgcgaaattgagagcatgaaagcgagacaaccgcctgggcctggcgccggagatacttattccatggtgtcttattctgatacgggctccagcacgggatcgcacggcaccagcacaacagtcagctccgcaagaaacaccttagacttggaagagactggcgaggcagtgcaagggaacatcaatgccctgcccgacgtgtctgtggatgatgtgagatccaccagtcagggcctctctagtttcaaaccactcccccgccccccaccactagctcaaggaaacgatctgccactgggtcagcccaggaaactgggacgggaggatttgcagcctcctagctccatgccttcttgtagcgggaccgttttttcagcaccccagaaccggtcacctcctgccggaactgcgccaactccaggcacttctagtgcccaggacttaccatcctctccaatctacgcaagcgtctccccggcaaaccccagcagcaagagacccttggatgcccacctggcactggttaaccagcaccccatcggaccttttccaagggtccagagcccccctcatctcaaaagcccctctgctgaggccacagtggctggtggatgcctactaccaccatcaccgagtgggcaccctgaccagacgggtaccaaccagcactttgtgatggtggaggtgcacaggcctgattccgagcccgacgtgaatgaagtgcgagccctgcctcaaactcgaaccgctagtactctctcccatcttagtgattccgggcagactctttctgaggattctggcgtggacgccggagaggctgaagcatctgcccctggacgcggcaggcaatcagtaagcacaaagagccgcagttcaaaggaacttccccgcaacgagaggcccaccgatggcgccaataaaccaccagggctgctggagcccacctccaccctggtgcgcgtaaagaagagcgccgcgactttgggaattgctattgaagggggcgcaaatactaggcagcctctccccagaattgtaaccatccaaaggggaggatccgcccacaattgcggacagctcaaagtcggccatgtgatcctggaggtaaacggtctgactctccgggggaaggagcacagggaagccgcacggattattgccgaggccttcaagactaaggaccgggattacatcgacttcctggttacagagttcaacgttatgctgtag

SEQ ID NO: 184935 - DNA, 2724 bp, synthetic construct
  misc_feature 1..2724: note = Description of Artificial Sequence: Synthetic coding sequence
  source 1..2724: mol_type = other DNA
atgaacgcccccctggacggcctgagcgtgagcagcagcagcaccgggtcccttggatctgctgcaggcgccggaggtggcggcggagcaggcctgagacttctgtcagctaacgtgcggcagctgcaccaagctcttactgctctgctgtccgaagccgaaagagagcagttcacccactgtctcaatgcctaccatgcccgtaggaatgtgttcgaccttgtgaggactctgcgcgtgctgctcgactccccagtaaaacgcaggttactgccgatgctgcgactggtgatccctaggagcgatcagcttctgttcgatcaatacacagcagaagggctctacttgccagctactacaccctatcgtcaaccggcctggggtgggccggattccgcaggccccggggaagtgcgccttgtgagtctaaggcgggctaaagcacatgagggcttgggttttagcattcggggcgggtctgagcatggcgtgggcatctatgtgagcctcgtggagcccggtagcctggcagagaaggagggcctgcgcgttggagaccagattctacgggtgaatgacaaaagcctcgcaagggtcacacacgctgaggctgttaaggcactgaaagggtcaaaaaaactcgttttgagcgtctattccgctggacgcatccccggagggtacgtgacaaaccatatctatacatgggttgatcctcagggccgatctatctctccccccagcgggttgcctcaaccccatggaggggcactgcgtcaacaggagggggaccggcggtctaccctgcacctgttgcaagggggtgacgagaagaaggtcaacctagtgctgggcgacggccggtccctgggcctgactattcgcggaggggcagaatatggactgggaatctatattaccggagtagaccctgggagtgaggcagagggctctgggctgaaggttggcgaccagatcctggaggtgaatggacgctcgttcctcaacattttgcacgacgaggcggtccggctcttgaagtcgagtagacatctgatcttgacagtgaaggacgtggggcgccttcctagagcaaggactacggtggatgagacaaaatggatcgcctcctcacggatccgggagacgatggcgaactctgccggtttccttggagatcttaccactgaaggaatcaataaacctggattctacaagggtcctgctgggagccaggtcacactgtctagtttaggaaatcaaacacgtgttttgctggaggagcaggcgcggcacttgcttaacgagcaggagcacgccacaatggcttattacctggacgagtatcggggcggctccgtgtctgtcgaagcactagtcatggcgctatttaagctgctgaacacacatgccaagtttagcctccttagtgaggtaaggggcacgattagcccccaggacctggagagatttgatcacctcgtgctgcgtcgagagatagagagtatgaaggcacgccagcctccaggccctggtgctggcgacacctactcaatggtgtcctacagcgacacaggatcttctacaggatcacatggaacctcaaccactgtgagttctgcccgtaacaccttagatcttgaggaaactggtgaagcggtgcaggggaacatcaatgccctccctgatgtcagcgtggatgatgtgcggtctacttcccaggggctcagcagctttaagccgctgcctaggccaccaccactggcacagggaaatgacctgcctctggggcaacctaggaaactcggccgggaggatcttcagcccccaagttcaatgccctcttgcagcgggactgtcttttctgcacctcagaatcggagccccccagcgggaaccgcgccaacacctggtacttctagcgcacaggacttgcctagttccccaatctacgcatccgtgagccctgccaacccttccagcaagagacctctggacgcacacctggcgctggtgaaccagcatcctatcggtccgtttcctcgcgtgcagagtcccccacaccttaagagcccttccgccgaggctaccgtagccggaggttgtttgcttcccccttctcccagtggccacccggatcaaacagggaccaatcagcactttgtcatggtcgaggtgcacaggcccgattccgagcccgatgtgaatgaagtgagagcattgccccagacccgaactgcttctaccctgagtcacctgtcagattctggacaaaccctgagtgaggacagcggcgtggacgctggagaagccgaagcatctgcccctggtcggggaagacagagcgtctccaccaaaagtcgtagtagcaaagagctcccgcgtaacgagcgtccgactgatggtgccaataaaccgcctggcttgctcgaacccacatctactctggtgcgggtcaaaaagagtgctgcaactctcgggattgcaatcgagggaggggccaacaccagacagccactcccaagaatcgtgacaattcagcgtggcggatccgcgcataattgtggacaactaaaggtggggcatgtaatactggaggtgaacgggctgacacttcgggggaaggagcaccgggaagcggctcgcataatcgcagaggcctttaaaactaaggaccgggattacatcgacttcctggtgaccgaattcaatgtgatgctgtag

SEQ ID NO: 184936 - DNA, 1038 bp, synthetic construct
  misc_feature 1..1038: note = Description of Artificial Sequence: Synthetic coding sequence
  source 1..1038: mol_type = other DNA
atgaacgcccccctggacggcctgagcgtgagcagcagcagcaccggcagtttaggcagtgccgccggagcagggggtggaggaggggctgggcttagacttttaagcgcgaatgttaggcagctacaccaggctctgactgctcttctgagtgaggcagagagggagcaattcacccactgtctgaacgcctaccacgcgaggcgcaatgtgttcgacctggttcgaacgctgcgcgtcctcttggattcccctgtgaagaggaggctgcttccaatgctgcggcttgtaattcctaggtccgaccagctactctttgatcagtatacagccgaaggcctctatctgcccgccactaccccttaccgacagccagcgtggggagggccagactctgccggaccaggcgaagtccgtctggtctcattaagacgtgccaaagcacatgaagggctaggtttctccattcgggggggaagtgagcatggggtgggtatctacgtgagcctggttgaaccaggctccctggcagaaaaggaaggtctccgcgtgggggaccagattctgcgggtaaacgataagagcctcgctagagtgacacatgcggaggccgtgaaggccttgaaggggtcaaagaagctggtgctgtccgtctacagcgccggccgcatcccagggggctatgttacgaatcatatttacacctgggtcgacccacaggggcgctccatctccccgcccagcggccttcctcagcctcatgggggggctctgcgccagcaggagggcgatcgtaggagcacccttcatttattgcagggaggcgacgagaagaaggtgtctggtgtcggcaaagggggacagcccctgcgccatcgtattttgccgccaaatcccgagcagcagtcatgcctggaggctgcaagaaggggctggttctgcccgggatctgtttttcctcaagtatgcacggaggggtggtgcttcttcttcgcctttctctttgacctatgcagtgtgtgctacaatacaggatag

SEQ ID NO: 184937 - DNA, 1671 bp, synthetic construct
  misc_feature 1..1671: note = Description of Artificial Sequence: Synthetic coding sequence
  source 1..1671: mol_type = other DNA
atgcacggcagcctggaggccctgctgttcctgccccaggtgaccctatcccttgcccacgcccaccttatatgctccaacgcccagctagaaatgtgcgtgttcccccatcggtttctgggggatctgaccaccgagggaattaataagcccggcttctataagggaccagccggttctcaggttacactgtcatcactcggaaatcagactcgggttctgctggaggagcaggcacggcaccttctgaacgagcaggaacatgctacgatggcctattacctggacgagtatcgcgggggcagtgtgtcagttgaagctctcgtcatggccctgtttaaattgctcaatacacatgccaagttctcactcctatccgaggtgagagggaccatctcacctcaggacttggaaagatttgaccacctcgtgctccgacgcgagatcgaatcaatgaaagcgaggcaacctccgggaccaggggccggcgatacttatagcatggttagttactccgatactggttccagcactggctctcacggaacatctacaaccgtttcatctgcccggaacaccctggatctggaggagactggcgaagccgtccagggcaacatcaatgccctgcctgatgtgagtgtcgacgatgttcgtagtacttctcaagggctcagcagcttcaagcctcttccccgaccaccacccctggcgcaaggcaatgaccttcctttgggacagccacgcaaactcggacgcgaggatctgcagccccctagtagcatgccttcatgctctgggacggtgttcagtgcccctcaaaatcggtctcccccggctggcaccgctcctacacccggtaccagctccgcccaggacctaccatcatctcccatatacgccagcgtgtctcccgcaaatccaagtagcaaacgtcccctggacgcacatctagcgctcgtgaatcagcaccctattggacccttccccagggtccaatctcccccccacctaaaatccccttctgcagaggctaccgttgcaggaggctgcctccttccaccctctccctcaggacatcctgaccagacgggcaccaatcagcacttcgttatggtcgaggtgcatcggccagatagcgagccagacgtcaatgaagttagggccttaccacagacgagaacagcctctaccctgtcacacctgtctgattccggacagaccctctccgaagactctggtgttgatgctggggaggcggaggcctccgccccagggagaggtcgccagtccgtaagcacaaagtcgagaagctcaaaagagctgccacgtaatgaacgtccaacagatggagccaataaaccacccggtctacttgagccgacatcaaccctcgtaagagtgaagaagtcagccgccaccctgggaatcgcgatagagggcggagcgaacacacgccagccactgccaagaatcgtcacaattcagcggggcggcagtgcccacaactgtggtcaactgaaggtcggacatgtgattttggaggtcaacggtctgacgctccgtgggaaggagcaccgggaagctgctagaattatcgccgaggcttttaaaaccaaggacagggactatattgactttctggtgacggagttcaatgtcatgttgtag

SEQ ID NO: 184938 - DNA, 1059 bp, synthetic construct
  misc_feature 1..1059: note = Description of Artificial Sequence: Synthetic coding sequence
  source 1..1059: mol_type = other DNA
atgttcgccgccgccaccaagagcttcgtgaagcaggtgggcgacgggggaaggctcgtgccagtgccatctctgtctgaggcagacaagtatcagcccctctccctcgtcgtcaagaaaaagagatgtttcctatttccccgctacaagtttacttccaccccgtttaccctcaaggacatcctgctcggagatcgcgagatcagcgccggaatcagttcataccagctgctgaattacgaggatgagtccgatgtgagtctgtacggaagacggggtaaccacattgtaaatgacgttgggatcaacgtggccgggtcagattctattgcggtgaaggccagcttcggtattgtaaccaagcatgaagtcgaagtcagcactctcctgaaggaaattaccacacgcaagatcaatttcgatcactctttgattagacagtctcggtcatcacggaaagccgtcctgtgtgtcgtaatggagagtatcaggacaacgcgacagtgttcgctgagcgtccacgctggaatccgcggggaggctatgcggttccacttcatggacgaacagaatcctaaggggcgtgacaaggctatcgtgtttcctgctcatacaactattgcgttcagcgtgtttgaattgtttatctatctggatggggcgttcgacttatgcgtgacatcagtgtcaaagggcgggtttgagcgggaagaaacagccaccttcgctctcctctacagattgcggaacatcctattcgagcggaaccgccgagtcatggacgtcatcagtaggtcccaattgtacctagatgatctgtttagtgattattacgataaaccactctctatgacggatatctcactgaaggaaggcacccacattcgggtcaatcttctgaaccacaacatccctaaaggtccgtgcatcctttgtgggatggggaactttaaaagggagaccgtctacggatgcttccagtgctcagtggacgggcagaagtatgtgcgcttacatgctgtcccatgcttcgatatttggcacaagaggatgaaatag

SEQ ID NO: 184939 - DNA, 1059 bp, synthetic construct
  misc_feature 1..1059: note = Description of Artificial Sequence: Synthetic coding sequence
  source 1..1059: mol_type = other DNA
atgttcgccgccgccaccaagagcttcgtgaagcaggtgggcgacgggggaagactggtcccagtgccaagccttagcgaagccgacaagtaccagcctctctccttggttgtgaagaagaaacgttgctttctgtttcccaggtataaatttacgagtactccctttaccctgaaggatatcttgctcggtgaccgcgagatctctgctggcattagtagttaccagttgctgaattacgaagacgagagcgacgtgtcactgtatgggcgcaggggaaaccacatcgtcaatgatgttggcatcaatgtggctggcagcgattccattgccgttaaggcctcattcggaattgtgacaaaacatgaagtagaagtgagcacattactgaaagagataaccaccaggaaaatcaacttcgatcatagtcttatccgccagtcacgctcctctagaaaagcagtcctctgtgtcgtgatggaatcaattcgcacaacaaggcagtgtagcctgtccgtgcatgccgggatacggggtgaagcgatgaggttccattttatggacgagcaaaatccaaagggacgcgataaggctatcgtcttcccagcccacaccactattgcgttttcagtttttgaactgttcatctatcttgacggggcctttgacctgtgtgtgacctccgtctctaagggcgggttcgaacgagaggaaacagcaaccttcgccttgctctaccggctgagaaacatcttatttgaaaggaatcgccgggttatggatgtaatatcaagatctcaactgtacttggacgatctgttcagcgactattatgacaaacccttgtccatgactgacatcagtcttaaagaaggaacccacataagagttaacctgctgaaccataacatccccaaaggaccttgcatcctctgtggaatgggcaatttcaagcgggagacagtgtacgggtgtttccagtgtagcgtggacggtcaaaaatatgtccgacttcacgcagtaccctgtttcgacatatggcacaaacgcatgaagtag

SEQ ID NO: 184940 - DNA, 2388 bp, synthetic construct
  misc_feature 1..2388: note = Description of Artificial Sequence: Synthetic coding sequence
  source 1..2388: mol_type = other DNA
atgagcaagcggcaccggctggacctgggcgaggactaccccagcggcaaaaaacgcgccgggacggacggaaaggatcgagatagggatcgggaccgcgaggatcggagcaaagaccgtgatcgggagagagataggggtgatagggaaagggagcgggagaaagagaaggaaaaggagctgcgtgcgagcactaatgccatgctcattagcgccggccttccccctctgaaagcttcccatagcgcccactctactcactccgcccatagtacacacagtacccactctgcccactctacacatgcgggtcacgccgggcacacatccctgccccagtgtataaatcccttcactaacttgcctcatacgccacgctactatgacatcctgaagaagcgtctgcagctgcccgtgtgggaatacaaagacagatttactgacattctggttcggcatcagtcattcgtccttgtcggagagaccggctcgggaaaaacaacccagatcccacagtggtgcgtggaatatatgagatccctgcccgggccaaaacgtggggtcgcctgcacgcaaccacggagggttgcagctatgtccgtagcacagagagtcgccgacgaaatggacgtgatgctgggacaggaggtggggtacagtatccgcttcgaggactgcagctctgcaaaaaccatcttgaagtatatgacagatgggatgcttctccgcgaagcaatgaacgacccactcttagagcggtacggggtgattatactggacgaggcccatgagagaacgcttgccacggatattttaatgggcgtacttaaagaagtggtacgacagcggagcgacttgaaggtcatcgttatgtccgccacgctcgatgcaggcaagttccaaatctacttcgataattgtcctctgttaacgattcctggcaggacacacccggtcgaaatcttttatactcctgaacctgagagagactatctggaggccgccatacgtacggtgatccagattcacatgtgtgaagaggaagagggcgaccttctgttgttcctgaccggacaggaagagatcgatgaagcatgtaaaagaataaaacgagaagtggatgacttagggcccgaggttggcgatattaagattattcccctatactccaccctgcccccccagcagcagcaacggatctttgaacccccacctccaaaaaaacaaaacggggcaatcggtagaaaggttgttgtctcaacaaatattgctgagacttcactgactatcgatggcgttgtttttgtgatagaccctggttttgcaaaacagaaggtgtacaatcctagaatccgcgtggaatccttactggtaaccgctatcagcaaggctagcgctcaacagcgggcaggccgcgcaggaagaacgcgccctggaaagtgcttcaggctttatacagagaaagcctacaagaccgaaatgcaagacaatacctatccggaaatcctccgctctaatctggggtccgtggtattacagctcaagaagctggggatcgatgatctggtgcattttgacttcatggatcctcccgcccctgagactttgatgcgtgccctagagttgctgaattacctcgccgcccttaatgacgacggggatttaacagaattaggatcaatgatggcggagtttcctctagatccgcaactagccaaaatggttattgcctcctgcgactacaattgctctaacgaggtcctttctattactgcaatgctatccgtgcctcagtgtttcgtaagaccgactgaggcaaagaaggctgccgatgaggctaaaatgaggtttgctcatatcgatggagatcatctgacactccttaacgtgtatcacgcattcaagcaaaatcacgaatcagttcagtggtgctatgataattttatcaattataggagtcttatgtccgcggacaacgtcagacagcagcttagccgaatcatggatcgcttcaatctgccgaggcgtagcactgatttcactagccgcgattactacataaacatcaggaaagcgttagtgacaggatatttcatgcaagtggcgcacctggagcgtaccggtcattacctgaccgtgaaagataatcaggtcgtgcagctgcacccatcaactgtactcgaccataagccagagtgggttctgtacaatgaatttgtcctgaccaccaaaaactacattcgaacatgtacggacattaaacccgaatggctcgtgaaaatcgccccccagtattacgacatgtctaactttccacagtgtgaagctaaaaggcagctggaccggataatagccaaactgcagtctaaggaatactcccagtactag

SEQ ID NO: 184941 - DNA, 2355 bp, synthetic construct
  misc_feature 1..2355: note = Description of Artificial Sequence: Synthetic coding sequence
  source 1..2355: mol_type = other DNA
atgagcaagcggcaccggctggacctgggcgaggactaccccagcggaaagaaaagagccggaaccgatgggaaagaccgagaccgagacagggaacgggaccgcggcgaccgcgaacgagaacgggagaaggaaaaggaaaaagagctccgcgcctccactaacgcaatgctgatcagtgccggcctcccaccattgaaggccagccacagtgcccatagtacccactcagcgcattccacacacagcactcattccgctcattccacccacgccgggcacgctgggcacacatctctcccgcagtgcattaacccatttactaatctgccacatacccctaggtactatgacatacttaagaaaaggttacaactgccagtttgggaatacaaggaccgttttacagatatcctcgtgagacaccagtcctttgtcttagtgggcgaaaccggatccgggaagacaacccagattccgcagtggtgcgtggaatatatgcggtcactgcccggacctaagagaggcgtggcatgcacccaaccccggagggttgccgcaatgtccgtggcccaacgcgtcgccgacgagatggatgtgatgctggggcaggaggtgggatactcaatcaggttcgaagattgcagcagtgctaagactatactcaagtatatgactgatgggatgttgctgcgtgaggccatgaatgatcctctgctggaaagatatggcgttatcatactggacgaggctcacgagcgcacactggcaaccgatatccttatgggggtgcttaaggaagtggtgcggcaacggagcgatctgaaggtaatcgttatgagcgccacgctcgatgctgggaagttccaaatatattttgataattgcccactcttaactattcctggtaggacccatcctgtggagatcttctatacgcctgaaccggagagagactatctcgaggcagccatcaggacagtcattcagattcacatgtgcgaggaggaggagggagatctgcttctgtttctcaccggccaggaggagattgacgaggcttgcaaaagaattaaacgcgaggtggatgacttggggccggaagtcggagatatcaaaatcatacccttgtatagtactttaccaccccagcaacagcaaagaatcttcgaaccgcctcctcccaagaagcagaatggagccatcggacgaaaggttgtggtgagtacaaacatcgccgaaacatctctcaccatagatggggtggtcttcgtgatcgacccaggctttgcgaagcagaaggtctacaacccacgtatcagagtcgaatcattgttagtgaccgctatctcaaaggcatcagcccagcagcgtgccgggagggcaggaagaacacggccaggcaagtgtttcaggctatacaccgaaaaggcctacaagacagagatgcaagataacacctaccccgagatcttgaggagtaaccttgggtccgtggtacttcaactgaaaaagctcggtattgacgacctggtgcatttcgactttatggatcccccagcccccgagactctcatgcgagcgcttgagctgctgaactacctggcagctctgaacgatgacggcgatctaacggagcttggttccatgatggcagaattccccctcgacccccagctggccaagatggtcatcgcgtcctgcgactacaattgtagcaacgaagtcttgagtatcactgcaatgctaagcgtgccccagtgtttcgtgcgcccaactgaagccaagaaggctgctgacgaggccaaaatgaggtttgcccacatcgacggggatcaccttacactgctcaatgtataccatgcttttaaacaaaatcatgagtcagtgcaatggtgctacgataatttcattaattacagatcactcatgagcgctgataatgtgcggcagcagctctcaagaatcatggatcgcttcaatttaccccgacgttctaccgacttcacatctagggattattacatcaacataagaaaagccctcgttacgggctacttcatgcaagtggcacacctcgagcgcacagggcactacttaacggtgaaagataaccaggtggtgcagctgcatccatccacggtgctggatcacaagccggagtgggttctgtacaatgagttcgtgctaacgacaaaaaactacattcgtacctgtacggatataaagcccgagtggctagtgaaaattgctccccaatactacgatatgagcaacttcccccagtgtgaagcaaagagacagctggaccggattatcgccaagctccagtcaaaggagtacagtcagtattag

SEQ ID NO: 184942 - DNA, 1683 bp, synthetic construct
  misc_feature 1..1683: note = Description of Artificial Sequence: Synthetic coding sequence
  source 1..1683: mol_type = other DNA
atggagagccagcccgcccaggagtgcctgatgcagatgttcctgcctatagagcccgcctgtttcgtggagtggctgggaacctcaccttcccagctgggcgtcgttatggtggatgaagcgcatgaaagaaccctacacacagatatcctctttggtctaataaaggatgtcgcgaggttcaggccagagctgaaagtactggtagcttccgcaacgatggacaccgcccgtttttcaacctttttcgatgacgccccagtcttcaggatccctggacggagattccccgtcgatattttttatactaaagcccccgaggccgattatctcgaagcgtgcgtcgttagcgtgctgcaaattcacgttacccagccacctggggacatcctcgtgttcctgacgggccaggaagaaatagaggcagcttgtgaaatgttgcaagatagatgtaggaggcttggttctaaaatacgtgagttactggttttacccatctacgcaaatctgccatccgacatgcaagctcggatctttcagccaacacctcccggcgccaggaaggtcgtcgtagccactaatatagccgagactagcctgactatcgagggaataatctatgtcttagacccaggattttgtaagcagaaaagctacaatccccgaaccggaatggagtccctcactgtgactccttgtagcaaggcctcagctaaccaacgggcaggacgtgcgggccgtgtagcggctggtaagtgctttcggttgtatactgcttgggcctatcagcacgagcttgaagaaaccactgtgccagaaatccaacgaacaagcttaggaaacgttgtgctcctgttgaaaagtctgggaatccatgatctgatgcacttcgacttcctggacccacccccttacgagacccttctgcttgccctcgagcagctctatgccttgggagcccttaatcaccttggggaactgaccacgtccggccgcaaaatggctgagctccccgtcgatcccatgttaagcaagatgatcttagcctctgagaagtattcttgttccgaggagatcctgactgtggccgctatgcttagcgtgaataactccattttttatcgtcctaaggacaaagtagttcacgcagacaatgcccgggtgaacttttttctgcccggtggagaccaccttgtcctgctgaatgtgtacactcagtgggccgaaagtggctatagttcacagtggtgttatgagaactttgtgcagtttcgttctatgaggagggcgcgcgatgtgagggagcagttggaggggctgctggagagggtggaggtgggtctctcgtcatgtcagggagactacattagagttagaaaagctatcacagcaggttacttttatcacacagcgagattgacgcgctccgggtataggaccgttaaacagcagcagactgtctttatccaccctaacagctccctgttcgagcagcagcctcggtggttattgtaccacgagctggtgttaacaacaaaggagtttatgcggcaggtccttgaaatcgaatcctcatggctcctggaggtggccccccactattacaaggctaaggagttggaggatccccacgccaaaaagatgcccaaaaaaatcggtaagacgagggaggaactagggtag

SEQ ID NO: 184943 - DNA, 3126 bp, synthetic construct
  misc_feature 1..3126: note = Description of Artificial Sequence: Synthetic coding sequence
  source 1..3126: mol_type = other DNA
atggccacccccgccggcctggagcggtgggtgcaggacgagctgcattctgttttgggcttgtccgaacgacacgtggcccagttcctcattggaacagcacagcggtgcacaagtgccgaggaattcgtgcagcgcctaagggatacagacaccctggacctttccggccccgcaagggattttgcattaaggctgtggaacaaagtgccgcgcaaagccgtggtggagaaacctgcccgcgcagccgaacgcgaggcgagggcccttcttgagaagaaccggtcataccgccttttggaagatagtgaggaaagctctgaggaaacagtgtctcgcgcagggagttcactccagaaaaaaaggaaaaaacggaaacacttaaggaagaagcgggaggaagaggaggaggaggaagcttcagagaagggaaagaaaaagacaggagggtccaagcagcaaacagaaaagcctgagagcgaggatgagtgggaacgtacggagcgggagaggctccaggaccttgaggagcgggatgcatttgcagagagggtgcgccaaagggacaaagatagaacccggaacgttttagaaagaagcgacaagaaggcttacgaagaggcccagaaaaggctaaagatggcggaagaggacagaaaagccatggtgcccgagctgcgaaaaaaatctcggagggaatacctggccaaaagggagcgggagaaactggaggacttggaggccgagctcgctgacgaggaatttttgttcggagatgtggaattgagtcgacatgagcgtcaggagttgaaatataaacgccgggtccgggatctggcacgtgagtaccgtgccgctggagaacaggagaaacttgaagctaccaacagataccacatgcccaaggaaaccaggggccaaccagcacgggccgtagacttggtggaagaggagagcggtgctccgggtgaggagcaacgcagatgggaggaagcccgcttaggcgccgcatccctgaaatttggcgctagggacgcagcatctcaggagcccaaatatcagttggtcctcgaggaagaggagacaattgagttcgtccgcgccacacagttgcaaggagatgaggagccgagcgccccccctacaagcacacaagcacagcagaaggaatccattcaggctgtccgccggtcccttccagtttttccattcagggaggagttgctggcagccatcgctaaccatcaggtgctgattatcgagggagagacaggatctggtaagaccacacagataccacaatacctgttcgaggagggctatacgaataaaggcatgaagatcgcatgcacccagccccgtcgggtggccgctatgtccgttgccgccagggttgcacgggagatgggcgtgaaactaggcaacgaggtcggttatagtatcaggttcgaggactgcacgtccgaacgcaccgtgctgaggtacatgacggacggtatgcttcttagggagtttttgtctgagccggacttggcaagctattccgttgtgatggtcgacgaagcacacgagcgaactctgcacactgacatcctgttcggcctgatcaaggatgttgcacgcttcaggcccgaactgaaagtccttgtcgcctccgcaactatggatacagccaggttttccacttttttcgatgacgcacccgtattccggattccaggaagacgctttccagtggacattttctacaccaaagctcctgaggcagactacttggaagcttgtgtggtgagcgttttgcagatccatgtgacccagccacctggcgacattctggtgtttctgaccggccaggaggagatagaagcggcttgtgagatgctgcaagacaggtgtaggcggctgggcagtaagatcagagagctgctggtgttgcccatatacgctaatctgccaagcgatatgcaagctaggattttccagcccacgccaccaggagctcggaaggtagtggtcgcgacaaacatcgccgaaacatccctgacaatcgaggggatcatctatgtgctggatcccggcttttgtaagcagaagagctacaacccccgcaccgggatggaatccctgactgttactccatgcagtaaggcatcagctaatcaaagggccgggagagccggccgtgtggccgccggcaaatgcttccggttatacacagcctgggcctaccagcatgagctggaagagactaccgttcctgaaattcagcggacctctctgggcaacgtggttctcctgcttaagagtctgggtattcacgacctgatgcacttcgattttctagatccccccccctacgagaccctgttactcgcacttgagcaactatatgcactcggtgctctgaaccacttgggtgaactgactacatccgggcgaaaaatggctgaactgcctgtcgaccccatgctgtccaagatgattctggcttccgaaaagtatagttgctctgaggagatcctcaccgttgctgcaatgctgtctgtcaataatagcatcttctataggcccaaggacaaagtagtgcacgccgacaatgcccgcgtaaacttcttcctgcccgggggtgatcacctggtactgctgaacgtgtacactcagtgggccgagagcggctattctagccagtggtgctatgagaacttcgttcagttccgcagtatgagaagagctagagatgttcgtgagcagctagagggactcctcgagagagtggaagtggggctttcatcctgtcagggggattatattagagtgcgtaaggccatcaccgccggttacttttaccatacggcacgtctcacaaggtccgggtacaggaccgtgaagcagcagcagacagtctttatccaccccaattcatcgctgtttgagcagcagccgaggtggctcctgtatcatgagctggtgctcaccaccaaagagtttatgaggcaggtcctggagatcgagtcatcttggctgttggaagtggcccctcattactacaaggcgaaagaactcgaagaccctcacgctaaaaaaatgccaaagaaaatcggtaagaccagagaagaattaggttag

SEQ ID NO: 184944 - DNA, 1683 bp, synthetic construct
  misc_feature 1..1683: note = Description of Artificial Sequence: Synthetic coding sequence
  source 1..1683: mol_type = other DNA
atggagagccagcccgcccaggagtgcctgatgcagatgttcctgccgattgaacccgcctgtttcgtagaatggttgggcactagccctagtcaactcggggtagtcatggtggacgaagcccatgaacgtaccctgcatacagatattttgtttgggctgattaaggatgtggccaggtttcgtcccgagcttaaggttctggtagcctccgcgaccatggatacggcacggttttcgacctttttcgatggggctcctgtcttccgcatccccgggcggcgctttcccgtggatatattctacacgaaggcaccagaagccgactacctggaggcttgtgtagtgtccgtccttcagattcacgtgacacagccaccaggcgatatcctagtgttcttaacggggcaggaggaaattgaggccgcatgtgagatgttgcaggaccgctgtcgccgcctgggttccaaaatccgtgagttactcgtgctgcccatctacgccaacctcccctcggatatgcaggcaaggatttttcaacctacgccacccggtgcccgtaaggttgtcgttgctacgaacatagctgagacaagtctgacaatagaaggaattatttacgtgctggacccagggttttgtaagcagaagtcctataatcccaggactgggatggaaagcctgacagtgacaccttgttccaaagcgagcgcaaatcaaagggctggacgggccggtagagtggccgccggtaaatgcttcagactgtatacagcatgggcctatcagcacgaattggaggagactaccgtgcccgagatccagagaactagcctcggaaatgtcgtattgctgctgaagtccctaggtattcacgacctgatgcactttgactttctggaccctcccccctatgaaacattgctacttgcccttgagcagctatatgctttgggagcactgaatcacttaggggagcttacgacatctggaagaaagatggctgaattaccagtggatcccatgcttagcaaaatgatcctagcttccgagaagtactcctgcagtgaagaaatcctcaccgtagctgccatgctctcggtaaataacagtatcttctacagacccaaggacaaagtggtgcacgccgacaacgcgcgagtcaactttttcctgccaggcggagaccacttagtcctgctgaatgtctacacccagtgggcggagagcggatacagctctcagtggtgttacgagaacttcgtccagttcaggtccatgcgtcgggcaagggacgtacgcgagcaactcgagggtctgctggagagagttgaagtggggctttctagttgccagggtgactatattagagtgcggaaggccatcaccgcaggatacttctatcatacggcccgcctcacaaggtctggatatcgtaccgtgaagcagcagcagactgtttttatccaccctaattcttctctgttcgagcagcagcctcgctggctactttaccacgaactcgtgctgacgacaaaagaatttatgaggcaagtcttggaaattgaaagttcatggctactggaagtcgctccacactactataaggccaaggagctggaggacccacacgcaaaaaaaatgcccaaaaaaattggaaagaccagagaagaactgggctag

SEQ ID NO: 184945 - DNA, 3126 bp, synthetic construct
  misc_feature 1..3126: note = Description of Artificial Sequence: Synthetic coding sequence
  source 1..3126: mol_type = other DNA
atggccacccccgccggcctggagcggtgggtgcaggacgagctgcatagtgtccttgggttgagtgagcggcacgtcgcacagtttttaatcggaacggcacaacgctgcactagcgcagaggagttcgtccaaaggctccgcgacacagacacactggatctgagtggaccagccagggacttcgcattgagactctggaacaaggtgccccggaaagcagtagtcgaaaagccagctagggctgctgagagagaagcaagggctttgcttgagaaaaaccgaagctacagacttctcgaggacagcgaggagtctagtgaagagaccgtctcccgggccgggtcaagccttcaaaagaagcgcaagaagaggaagcatcttcggaaaaagagggaagaggaagaggaggaggaggcctccgagaaagggaagaagaagacaggcggaagcaaacaacagaccgaaaagcccgagtccgaagacgaatgggagcgaactgaacgtgagcgactgcaagacctggaagaaagggatgccttcgccgagcgggtgcgccagagagataaggatcggacgcggaacgtgttagaacgatcagacaaaaaggcatatgaagaggcccagaagcgcctaaaaatggcagaggaggaccggaaggcaatggtgccagagctacgcaaaaagagccgacgagagtacctcgctaaacgagaacgagagaaattagaggacctggaagctgagctggcggacgaggaattcctttttggggatgttgaactatctagacacgagcgccaagagcttaagtacaagcgccgggttcgcgacctagctagagaatatagagccgccggcgaacaggagaagctggaagccacaaacagatatcacatgcctaaggagaccagaggtcagcccgcccgggccgttgatctggtggaggaggagagcggagcaccgggggaggagcagcgtcggtgggaagaggctcgtctcggtgccgcaagtcttaaatttggagctcgggatgcagcctcgcaggagcctaagtatcaactggtactggaggaggaagaaaccattgagttcgtgagggccactcaactgcagggcgacgaagagccaagtgcccccccgaccagcacacaggcacagcagaaggaatccatccaggccgtgcgaaggtccctgcctgtcttccctttccgcgaggagctcctggccgccatcgccaaccaccaagtgcttatcattgaaggtgagaccgggagtggcaagacgacgcagattccccagtacctcttcgaagaaggctacacaaacaagggtatgaagattgcctgtacacagcccagacgtgttgctgcaatgtccgttgccgcccgcgtcgctcgcgagatgggcgtgaagctgggtaatgaagtggggtactcaatccggtttgaggactgcaccagcgagcgtaccgtgctcagatacatgacagatggaatgttattgcgggagttcctttccgagccggacctggctagctacagtgttgttatggtggacgaggcgcacgaaagaaccttgcacacagacatcctttttgggttaatcaaggatgtcgccagattccgtcccgagttaaaagtgctggtcgcttctgccactatggacacggcccgattttctacgttcttcgatggggcccctgtctttagaattccgggccgccggttccccgtcgacatattttataccaaagcgcctgaagccgactacctggaggcttgcgtggtgtccgtgctgcagattcatgtgacacagcctcctggcgacattctggtgtttctgacaggccaggaggagatagaggctgcttgcgagatgctgcaggatcggtgccgccgcctcggaagcaagattcgggagctgttggtcttgccaatatatgccaacctgcctagcgatatgcaggctcgcatcttccagcccaccccacccggggcacggaaggtggtggtcgcaacaaatattgccgagacctctttaacgatcgaggggatcatttatgtgctggatcccggtttctgtaagcagaaaagttacaacccgcgaacagggatggagtctctgacagtgacgccctgttcaaaggctagcgccaaccagcgagccgggcgcgccggacgcgtagcagcggggaaatgctttcggctctataccgcatgggcttatcagcatgagttggaggaaactaccgttcctgaaatccagcgcacgtccttaggaaatgtcgtgttactattaaagtctttagggatccatgacttgatgcatttcgactttctggaccctcctccttacgaaacattactcctggcgctcgaacagctgtatgcacttggcgcactaaatcaccttggtgagctgaccacttctggacggaagatggcagaactgcccgttgacccaatgttgtcaaagatgatcctggctagcgaaaagtatagctgcagcgaggaaatcctcaccgtcgcagcgatgctgtctgtgaataacagcatattttaccggcctaaagataaagtcgttcatgccgacaatgcgcgcgtgaatttctttttgcctggaggcgaccacctcgtgctgctgaatgtttacacgcagtgggctgaatccggatactcaagtcaatggtgctatgagaattttgtccagttccgcagtatgcggcgagccagggacgtgcgtgagcagctcgagggcctgctcgagcgagttgaggtcgggctgtcctcatgtcagggcgactacatccgggtgcgcaaggctataactgccggctacttctatcacactgcccgactgaccaggtctggttacaggacagtgaaacagcagcagacggtttttatacatcccaattcttcactcttcgaacagcagccacgctggctactatatcatgagctcgtcttaaccaccaaagaattcatgaggcaggtccttgagatcgaatcttcctggttgctggaggtcgctccccattactacaaagctaaggaactcgaggacccacacgctaagaaaatgcctaagaagatcggcaagaccagggaggagctgggctag

SEQ ID NO: 184946 - DNA, 1683 bp, synthetic construct
  misc_feature 1..1683: note = Description of Artificial Sequence: Synthetic coding sequence
  source 1..1683: mol_type = other DNA
atggagagccagcccgcccaggagtgcctgatgcagatgttcctgccaatagagcctgcgtgcttcgtcgaatggttagggacctcgccctctcagctgggggtagtcatggtggacgaagcacacgaaagaaccctgcacaccgatatcctgtttggccttattaaagatgtggcccggttcagacccgagctgaaagtgctcgttgccagcgctaccatggatactgcacgtttcagcaccttttttgatgatgcgccggtctttagaatcccgggtcggcgctttcccgtcgacattttttatacaaaggcccctgaggccgattatctcgaggcttgcgtggtgtctgtcttacagatccacgttacacagcccccgggcgatattctggttttccttacaggccaggaagagatcgaggcagcctgtgagatgctccaagaccgatgtaggagactggggtcaaagatcagggagctcctagtgctccctatctacgccaacttacctagcgatatgcaggcacgcatctttcagccaactcctcccggcgctaggaaagtggtagtggccaccaatatagcagaaaccagtctgaccattgagggcattatctacgtgctggacccgggtttttgtaagcagaagtcttataatccaaggaccggtatggaatctctgaccgtcaccccgtgttcaaaggcaagcgccaatcaaagagccggcagagctggaagagtcgccgccggaaagtgcttcagattgtataccgcgtgggcctaccagcatgagctggaagagactactgtccccgagattcagcggacttctctcggcaatgtggtgctgctgttgaaatccttgggcatccatgatctaatgcattttgactttctcgatccccccccttacgagactctgctcctggcccttgaacaactatacgcgttgggggcactgaaccatctcggagaactcaccacatcaggccggaagatggcagagctgcctgtggaccccatgttgagtaaaatgattttggccagcgaaaagtattcatgttcggaggagatcctaacagtggccgccatgctgagcgttaataatagtattttctacagacctaaagacaaagtagtacacgcggataacgcgcgggttaatttttttttgcctggaggcgaccacctggtgctgctcaatgtttacactcaatgggcagaaagcggctattcttctcagtggtgctacgagaactttgtgcagttccgcagtatgcggagggctcgagacgttcgtgaacagctggagggattgctagaaagagtcgaagtggggctaagttcctgtcaaggggactatattcgagtccgtaaggccatcacggccgggtatttctaccacaccgccaggctcactcggtctgggtaccggacagtcaagcagcaacaaacagtgtttatccatcctaatagcagtctgtttgaacagcaaccacgctggctcctgtatcatgagctggtcctgacaactaaagaatttatgagacaagtgcttgagatcgagtctagctggcttctggaagtggcccctcattattacaaggccaaggagttagaggatcctcacgccaaaaagatgccgaaaaagatcggcaagaccagagaggagctcgggtag

SEQ ID NO: 184947 - DNA, 888 bp, synthetic construct
  misc_feature 1..888: note = Description of Artificial Sequence: Synthetic coding sequence
  source 1..888: mol_type = other DNA
atgagcgaggacccccggggccccaaggtgccccggaaggccgtggtggagaagcctgctcgagctgccgagcgagaagctagggcccttctggaaaaaaatcgatcttaccgtctgctggaggacagcgaggaaagtagcgaagaaactgtgagtagggccgggtcttccctgcagaaaaagagaaagaagcgaaagcatcttaggaaaaaaagggaggaagaggaagaagaggaggctagtgagaagggaaagaaaaaaactggaggttcaaagcagcaaacagaaaaaccagagtctgaggacgaatgggagcgtactgagagagaacgactgcaggacctggaagaacgagacgcattcgccgagagagttagacagcgcgataaagatcgaacacgtaatgttttggaaagatccgacaaaaaagcatatgaagaagcacaaaagcgcctgaagatggcagaggaggatcggaaagctatggtacccgaactgcgaaagaagagccgccgggaatacttggccaagagagaacgcgagaagctcgaagacctggaggctgagctggctgacgaggagttcctgttcggggatgtcgagctcagcagacatgagagacaagagttaaaatacaaaagaagggtacgcgacttagcccgggaatatcgcgctgcaggagagcaagaaaagttggaagcaacaaatcgctatcatatgcctaaggaaaccaggggtcaaccagctcgggcagttgacctcgttgaggaggaaagtggcgcgcctggcgaggagcagcggcgctgggaagaggcccggctcggagctgccagcctcaaattcggcgcacgagacgcagcgtcccaggaacccaaataccagctgtag

SEQ ID NO: 184948 - DNA, 3126 bp, synthetic construct
  misc_feature 1..3126: note = Description of Artificial Sequence: Synthetic coding sequence
  source 1..3126: mol_type = other DNA
atggccacccccgccggcctggagcggtgggtgcaggacgagctgcatagcgtgctcggcctctctgagagacatgtggcacagtttctgattggtaccgcacagcggtgcacttccgccgaggaatttgttcagaggctgagggacacggacacacttgacctcagcggcccggcccgtgatttcgctctacggctctggaataaggtaccacggaaagcagtggttgaaaagccggcaagagccgccgaaagagaagcacgggcgctactggaaaaaaacaggagttaccgtctgcttgaggacagtgaagagtcttcagaggaaaccgtatctagggctggaagctccttacagaaaaaacgcaaaaaacgcaaacatttacgcaagaagcgcgaggaggaggaagaagaggaagcctctgaaaaaggaaagaagaaaacaggcggatctaaacaacagacggagaagcctgagtctgaagatgagtgggagcgcacagagcgcgaacgcctgcaagacctggaagaaagagatgcattcgccgagcgggtccgtcaacgggacaaagacagaaccagaaacgtgttggagaggagcgacaagaaggcttacgaggaggctcagaaacgtctgaagatggctgaagaggacaggaaggccatggtgcccgaacttcggaagaagtctaggagagaatatttggccaaacgggaacgagaaaagttggaggaccttgaagctgagctggccgacgaggaatttctcttcggggatgttgaactttcgcggcatgaaagacaagaactgaagtacaagaggagggtgcgggacctggcacgggagtatcgcgccgcaggcgagcaggagaaactcgaggcgacaaatcgttaccacatgcccaaagaaacaagggggcagcccgcccgggctgtggatctggtcgaggaggagagcggcgccccaggggaggagcagaggcgctgggaggaggctagactgggcgcggcttctctgaaatttggggccagggatgccgcttcacaggagccaaagtaccagctggtgctggaggaagaagagaccatcgagttcgtaagagctactcagctacagggcgacgaggagccgtccgcccctcccacgtcaacccaagcccagcagaaggaatctatacaggcagtccggaggtcactgcctgtgtttccatttagagaagaactgctagcagcaattgccaaccaccaagtgctgattattgagggagagacaggatcaggtaaaacgacacaaatcccccagtacctcttcgaggaaggatacaccaacaagggtatgaagattgcctgtacccaacctcgccgagtcgctgcaatgtccgtggccgccagagtcgcgagggagatgggtgtgaaactggggaacgaggttggctactcaattagattcgaggattgtacaagcgagcggacggtgctcagatacatgactgatggaatgctgctgcgggaatttttaagtgagccagatctggctagctactcggttgtgatggttgatgaggcacacgaaagaacactccacaccgatatcctgtttggtctgatcaaagatgttgctcgctttcgtcctgagctgaaagttctcgtagcctccgctacaatggacaccgcgcggttttcgacgttcttcgatgatgcgccggtgttccggatccctggacgcagattccctgtcgacattttctacacgaaggcccccgaagccgattaccttgaagcttgtgtcgtgtccgtgctgcagattcacgtcacccagcctccaggagacattctagtgttcctgaccgggcaggaagaaatagaggctgcctgtgagatgctgcaggacagatgtcggcgactggggtccaagatcagagaactactcgtcttacctatttatgcgaatctgccctccgacatgcaggcacgcatttttcagcccaccccccccggagccaggaaggtcgtggtcgcgactaacattgccgaaacttccctgactatcgagggaattatctatgtcctggatcctgggttctgtaaacaaaaatcatacaacccgagaaccggcatggagagcctgactgttacaccatgcagtaaggcttccgctaatcagagggcagggcgagctgggcgggttgccgccggcaaatgtttccgcctttacacagcctgggcctaccaacatgagcttgaggaaacaactgtcccggagattcagcgcacgtcgttaggcaacgtggttttgctgctaaaatccctcgggattcacgatctgatgcacttcgattttcttgatccccccccttatgaaaccctactgctagcgcttgagcaactgtacgctctcggggccctgaaccatcttggggagttgacaacgagtggaaggaagatggctgaattaccagtggaccctatgctgtccaagatgatcctcgcatccgagaagtactcttgctctgaagagattcttacagtggcagccatgctgagcgtaaacaactctatcttctaccgtccgaaagacaaggtggtgcatgctgataacgcaagagttaactttttcctgcccggtggggaccatcttgtcctcttgaatgtgtacacacaatgggcagagtctggctacagttcacaatggtgttacgaaaattttgtccagttcagaagcatgcggagagccagagacgtgagagagcagttagagggattactcgagcgggtggaggttgggctgagcagctgtcagggcgactacatcagggtgagaaaagccattacagccggatatttttaccatactgccagattaaccaggagcgggtatcggacagttaaacagcaacaaactgtatttattcaccccaacagttccctgttcgagcagcagccccgctggcttttgtaccacgagctcgttttgactaccaaggaatttatgcgacaggtgctagagattgaatcttcctggctccttgaagtcgcaccccattactacaaggccaaggagcttgaggaccctcatgctaaaaagatgcccaagaaaatcggaaagacccgcgaggaattaggctag

SEQ ID NO: 184949 - DNA, 3126 bp, synthetic construct
  misc_feature 1..3126: note = Description of Artificial Sequence: Synthetic coding sequence
  source 1..3126: mol_type = other DNA
atggccacccccgccggcctggagcggtgggtgcaggacgagctgcacagcgtgcttgggctttctgagaggcatgtcgctcagtttctgatcgggactgcacagagatgtaccagcgccgaggaattcgtccagcgccttagggacacagatactctggatctgtcaggcccagcgcgggacttcgctctgcgcctctggaacaaagttccccgcaaggctgtggtggagaaaccagctcgcgctgctgagagggaggctcgcgctctgctggagaaaaataggtcctacaggcttttagaagactccgaggaatccagcgaagaaaccgtgagccgtgccgggagctccctgcaaaagaaacgcaagaaacggaagcatctgcggaagaagcgggaggaggaggaagaagaagaggcttccgaaaaaggcaagaaaaagacaggagggtccaaacaacaaaccgagaagcccgagtccgaggatgaatgggagcgtaccgagcgggaacggttgcaagatctagaggagagggatgctttcgccgaacgcgtccgccagagggacaaagatcgcactaggaacgtactcgagaggagtgacaaaaaagcgtacgaagaggctcagaagagactaaaaatggcagaggaggataggaaagccatggtgccggaactgcggaagaagtctcgccgcgagtaccttgctaagagagagcgggagaaactagaagatttggaggctgagcttgccgatgaggagttcctcttcggggacgtggagctttcccgtcacgagaggcaagagttgaaatacaagcggcgcgttcgggacctggctcgggaatatcgagcagcaggcgagcaggaaaagctggaggcaacaaaccggtatcacatgcccaaagaaactcgcggacagccggcacgagccgtggacctcgtggaggaggagagcggggcccctggagaagagcagcgccggtgggaggaggctcgcctcggagctgctagtctcaagttcggagcccgagacgcagcctctcaggagccaaagtatcagctggtcctggaagaggaagagaccattgaattcgtgcgagccacccaactgcagggtgatgaggagccatccgctccgcctacttcaacccaggctcagcaaaaggagtccatccaggccgtccggaggagtttgcccgtctttccttttcgcgaggagctgcttgcagctattgcgaatcaccaggtattaatcattgagggagaaaccggttccggcaaaacaacccagattccgcagtatctctttgaagagggctacactaataagggaatgaagattgcctgtacacagccccggagggtggctgctatgagcgtagccgctagagtggcccgtgagatgggagtcaaacttggcaatgaggtcggatactcaatcagattcgaagactgtacatcagaacgcacagtgctcagatacatgacagacgggatgctcctgcgggagtttttgtctgaaccagatctcgcctcctactccgtggtaatggtggatgaggcgcatgagagaaccttgcatacagacattctgttcggactgatcaaagatgtcgcaaggtttagacccgagctcaaggtgcttgtggcgagcgccactatggacaccgcccggttttccacattttttgacgatgcccctgtcttcagaatccccggccgcaggttccctgtagacattttttacaccaaggccccagaagcggactacctggaggcgtgcgtagtgagcgtgctccagatccatgtaactcagcctcctggtgacattctggtgttccttacgggccaagaggaaattgaagccgcctgcgagatgctgcaagaccgatgtcgccgtttggggtctaaaattcgcgaattacttgtactaccgatatatgctaatctacccagtgacatgcaggccagaatttttcaacctactcctccgggcgcaaggaaggtggtggtggccacaaatattgccgagacgtccctaaccattgagggcatcatctacgttttagatcccggcttttgtaaacagaaatcctacaatccaaggactggtatggagagcctgactgttaccccttgctcaaaagctagtgcaaaccagagggcgggcagggcaggacgggtggcggccggtaagtgttttagactgtatacagcctgggcttaccagcatgaactcgaggagaccacagtgccagaaatccagcggactagcctagggaacgtcgtgctgctgttaaaatcactgggaattcacgacctgatgcatttcgattttctggacccccctccatacgagaccctgctactggcgctggaacaactgtatgctctcggcgcactgaatcacctcggcgagctgacaacctccgggagaaaaatggccgaactgccggtggacccaatgctctccaagatgattctcgcgtctgagaagtatagctgctccgaggagatcctgacagtggccgccatgctgtccgttaacaacagtatcttctatcggccaaaagacaaagttgtgcatgcagacaatgcacgcgtgaacttcttcttacccgggggcgatcacttggtgctgctcaacgtctatactcagtgggctgagtccggctactcatcccaatggtgctatgagaattttgtgcagtttaggagcatgcgccgggcccgtgatgtccgggagcaactggaagggctgctggagcgcgttgaagtgggtttgagctcatgtcagggggattacataagggtgcgaaaggcaatcaccgcaggttacttctaccacacagcccggttgacgcgatccgggtatcggactgtcaagcagcagcaaactgtgtttattcatcccaacagcagtctgttcgaacagcaacctcgttggttgctgtaccacgagctcgttctcactaccaaagagtttatgcgacaggtgctggaaattgagagctcttggttgttggaggtcgctccacactactataaagccaaggagttggaagacccgcatgcaaaaaaaatgcctaaaaagattggcaagaccagagaggaattaggatag

SEQ ID NO: 184950 - DNA, 3126 bp, synthetic construct
  misc_feature 1..3126: note = Description of Artificial Sequence: Synthetic coding sequence
  source 1..3126: mol_type = other DNA
atggccacccccgccggcctggagcggtgggtgcaggacgagctgcattctgttctcggtttgtccgagcggcacgtggctcagtttttaattgggacggctcagagatgcacgtccgctgaagaattcgttcagcgattaagagatacagacaccctcgacctgagtggtccagcacgggacttcgctctgaggttatggaataaggtacctcggaaggccgtagtggagaagcccgccagagctgctgagagggaagccagggcgcttctggaaaaaaataggtcttaccgactcttagaagactcagaggaaagctctgaagagactgtgtcacgggccggatcaagtctgcagaaaaagaggaaaaagcgcaaacatcttaggaagaaacgcgaggaagaggaggaggaggaagccagcgagaaaggaaagaaaaaaaccgggggatctaaacagcaaacagagaagccagagtccgaggatgagtgggaaaggaccgaaagggagaggctgcaggaccttgaggagagggatgcctttgccgagagagtccgccaaagagacaaagacagaacccggaatgtcctggagcgttctgacaaaaaggcctatgaagaggcacagaagcgcctgaagatggcagaagaggacagaaaggccatggtccccgagctcaggaagaagtccaggcgtgaatatctggcaaagcgcgagcgtgagaagctggaagacctagaggcggaactcgcggacgaagaatttctgttcggcgatgttgaactttcccgccacgaaagacaagagctgaaatacaagcgacgcgttagggacctagccagagagtatcgcgcagcaggcgaacaggagaagctggaagctacaaatcggtatcacatgcctaaagagacccggggtcagcctgcccgtgccgtcgacctcgtcgaggaggagtccggagcgcctggggaagagcagaggcgatgggaggaggcgaggctgggagccgcctccttgaagtttggagcgcgggatgcggccagccaggaaccgaaatatcagctggtgctggaggaggaggaaactatcgaatttgttcgggctactcagctccaaggcgatgaggagccttcagctccccctacgagcacccaggcacagcaaaaggaatctatccaagctgtgcgacggtccctccctgtgttcccctttagggaggagttactggctgcaattgcaaatcatcaggtgctcattattgagggggaaactggctccgggaagacaactcagattcctcagtatttgttcgaggagggatataccaacaagggcatgaagatagcctgcactcagccccgcagagtagcagccatgagcgtggccgccagagtggcgagggagatgggtgtgaagctgggcaatgaagtcggctactccattagatttgaggactgcacctccgagcggaccgtgcttcggtatatgaccgacgggatgctcctgcgagagttcctttcggaacccgatctggcctcctacagcgtcgttatggttgacgaagcccacgagagaactttgcacacggatatcttatttggcctgatcaaggatgttgcccgctttcggccagaattaaaagtactagtggcctctgctacaatggacactgcgcgcttctctactttttttgatgacgctccagtgtttcgaatcccaggacgcagatttcctgttgacatattctacactaaagcccccgaggcagactatctggaggcctgcgtggtaagtgtactccaaattcatgtgacccagccaccaggcgatatactggtattcctcactgggcaggaggagattgaagccgcctgtgaaatgttacaggatcgttgtaggagacttggctccaagatccgcgagttgctggtgcttccaatctacgctaacttgcccagtgacatgcaggcccgcatattccagcccacccctccaggggctcggaaagtcgtagtcgccaccaacatcgccgaaacctccttgactattgagggtataatctacgtgttggacccaggattttgcaagcagaagtcctataatccaagaaccggtatggagagcctgaccgtgacaccgtgcagcaaagcttctgctaaccagagagctgggcgggccggacgagtcgctgctgggaaatgcttcagactgtatactgcatgggcataccagcatgaactagaggaaacaactgtgccagagatccagagaacttctctggggaatgtggtgctccttcttaaatcactgggcattcacgacctcatgcacttcgatttcctggatccgccgccctacgagaccctgctgctagctctagagcaactgtacgcccttggtgcactgaatcacctgggcgagctgaccacctcaggtcggaaaatggctgagctccctgtggaccccatgcttagcaaaatgatccttgccagcgagaagtatagttgcagcgaagagattctgacagtcgccgccatgctgagcgttaataactccattttttatcgccccaaagacaaggtagtgcacgcggacaacgcccgtgtcaacttttttctgcccggcggagatcatttagtcctactcaacgtttacacccagtgggcagagtccggatatagcagccaatggtgttacgagaatttcgtgcagtttcgcagtatgcgtcgtgcccgcgacgtgagagagcagctagaaggactcctagagagagttgaggttggactatcctcctgtcagggggattatatcagggtccgaaaggcaataacagctggctatttttaccatacagcccggcttacccgatctggatatcggaccgtgaaacagcagcaaacagtcttcatacaccccaactcgtcgctgttcgagcagcagccccgttggttgctctaccatgaactggtccttacaaccaaagagttcatgagacaggtgttggagatagaaagctcttggctactggaagtggctccgcactactacaaagcaaaggaactggaagatccccatgccaagaaaatgcctaagaagatcggaaaaactagggaagagctgggctag

SEQ ID NO: 184951 - DNA, 888 bp, synthetic construct
  misc_feature 1..888: note = Description of Artificial Sequence: Synthetic coding sequence
  source 1..888: mol_type = other DNA
atgagcgaggacccccggggccccaaggtgccccggaaggccgtggttgaaaaacctgctcgggcagcagagcgagaagcacgagctctgcttgaaaaaaatcgatcctaccgtctgttggaagacagcgaggaaagtagtgaagagacagtttccagggcaggatcctctttacaaaaaaagcgcaagaagaggaagcacttgagaaagaagcgcgaggaagaagaagaggaagaggcatccgagaaggggaagaagaagacgggcggcagcaagcagcagaccgaaaaacccgagagcgaagacgagtgggaaagaacagagagagaaagacttcaggacctggaggagagagacgcatttgccgaaagagtccgccagcgagacaaagatcgaaccagaaacgtgctggagaggagtgataaaaaagcttacgaggaagcccaaaagcgcctcaagatggccgaagaagatcgcaaggcgatggtgcctgagttacggaagaaatcccgacgagagtatctggccaaacgggagcgcgagaagctggaggacctggaggccgagttggccgatgaggaattcttgttcggagatgtggaactgtcccggcatgagcgtcaggaactgaagtataaacgccgagtgagggatctagctcgcgagtaccgagctgcaggggaacaggagaagttggaggcgacaaatcggtaccacatgccaaaggagactcgaggacagcccgcgcgggctgtggatttagtggaagaggaaagcggggctcctggagaagagcagaggaggtgggaggaagccagactcggcgccgcatccctcaaattcggggcgagggatgcggcttcccaggagccgaaatatcagctctag

SEQ ID NO: 184952 - DNA, 888 bp, synthetic construct
  misc_feature 1..888: note = Description of Artificial Sequence: Synthetic coding sequence
  source 1..888: mol_type = other DNA
atgagcgaggacccccggggccccaaggtgccccggaaggccgtggtagagaagccggcccgggctgccgagagagaagccagggccctccttgagaagaatcgcagttaccgtctattggaagactccgaagagtcaagtgaagagactgtctctcgggctggctcttcgctgcaaaagaagagaaagaagaggaagcacctccggaagaaacgggaggaggaagaggaggaagaggctagcgaaaaaggtaaaaagaagacgggcggttctaaacagcaaacggaaaagcctgaaagtgaagatgaatgggagcgcacagaaagggagcgcctgcaggacctcgaggagcgagacgcttttgccgagcgtgtgaggcagcgtgacaaagatcggacccggaacgtgctcgaaaggtccgacaaaaaagcttatgaagaagcccagaagcgacttaagatggcggaagaggataggaaagcgatggtccccgagttaaggaagaaatctcgacgcgagtacttggctaaaagggagcgggagaaactggaggacctggaggctgagcttgccgacgaagaatttctctttggcgacgtggaattgtctaggcatgagaggcaggaacttaagtacaagcgtcgggtccgcgatctggccagggaatacagagctgccggagagcaagaaaaactggaagccacaaaccgctatcatatgcccaaagaaactagagggcagccagctcgcgcggtagatctggtcgaggaagaatccggggcacccggggaggagcagcgccgctgggaagaggctcggctgggggctgcctctctgaaatttggtgcacgagatgctgcatcgcaggagccaaagtatcagctgtag

SEQ ID NO: 184953 - DNA, 1683 bp, synthetic construct
  misc_feature 1..1683: note = Description of Artificial Sequence: Synthetic coding sequence
  source 1..1683: mol_type = other DNA
atggagagccagcccgcccaggagtgcctgatgcagatgttcctgcctattgagcccgcgtgttttgtcgaatggctaggtaccagcccctcacagctgggcgtggtgatggtggacgaagcccacgaacggaccttacataccgacatactcttcggcctcataaaagacgtcgctcggttcagacccgagctgaaagtcttggtggccagcgcaactatggacactgcccgcttctctacatttttcgacgatgctcctgtttttcggatcccagggagaaggtttccagtcgatattttttatactaaggctcccgaggctgattacttggaagcctgcgtggttagtgtgctgcagatacacgtgacgcagcctcctggcgacattctggtgttcctgaccggacaagaagaaatcgaagccgcttgtgagatgcttcaggacaggtgcaggagactcggatccaaaattagggaacttttggtgctgccaatctacgctaatcttccttctgacatgcaggcccgaatttttcaacctacccccccaggagccagaaaggtggtcgtggcgactaatatcgcagaaacaagcttgacaattgaaggcataatttatgtgctcgatccgggtttctgcaagcaaaaaagctataacccacgcacaggaatggagtcgttaactgtaacgccttgctcaaaagcatcggcaaaccaacgcgctggacgggcgggccgagttgccgccggaaagtgtttccgcctgtacactgcatgggcttatcagcacgaactagaggagactacagtgccagaaatccagcgaacaagcctagggaacgtggtactgctcctcaaatcactcgggattcatgaccttatgcactttgactttctggatcctcctccgtacgagacgctcctgcttgcgttagagcaactctacgcacttggtgccctgaatcacctgggcgagctgactacgtcaggacgtaagatggctgagctgcctgttgacccaatgctgtccaagatgatcctggcgagcgaaaagtattcttgctctgaggaaatcctgacagtcgctgctatgctctctgtcaataattctatcttttaccgtccgaaggacaaagtcgtgcacgcggataatgccagagtcaatttttttttgccagggggagaccacctggtgctgctgaacgtgtatactcagtgggcggaatcagggtactcctcccagtggtgctatgaaaactttgttcagtttcggagcatgcgcagagctagagacgttcgggagcaattggaagggttactagaacgtgtggaggtaggcctgtcaagctgtcagggcgactatattcgcgtcagaaaggcaataaccgcaggttacttctaccacactgcccggcttacacggagcggatacagaactgtaaagcagcagcaaaccgtcttcattcaccccaattcctccttattcgagcagcagcccaggtggctgctttaccatgaactagtgctaaccactaaggaattcatgcggcaggtcctggagattgaatcctcttggttgttggaagtggcgccccactactacaaggctaaagagcttgaggatccccatgctaagaaaatgcctaagaagatagggaagacaagggaagagctgggctag

SEQ ID NO: 184954 - DNA, 888 bp, synthetic construct
  misc_feature 1..888: note = Description of Artificial Sequence: Synthetic coding sequence
  source 1..888: mol_type = other DNA
atgagcgaggacccccggggccccaaggtgccccggaaggccgtggtggaaaagcccgctcgtgctgccgagagagaagcccgggccctgcttgagaagaaccggagctataggctcctcgaggatagcgaggagagttccgaagaaacggtgagcagggccggatcttcgctccagaaaaagaggaagaagcgcaagcatctgcgaaagaagcgggaagaggaggaggaagaggaggctagcgagaagggaaagaaaaaaaccggtgggtcaaagcagcagacagagaagccggagagcgaagatgagtgggagagaaccgaacgggaacggctgcaggacctggaagagagggacgcctttgccgagcgagtccgccagagagataaggacagaacccggaatgtgctggagagatctgacaagaaagcctacgaggaagcccaaaagaggctaaaaatggctgaggaggaccgcaaagcaatggttcctgagttgcggaaaaagtcgcgcagagagtacctcgctaaacgggagagagagaaattagaggatctagaggccgagctggcagatgaggagtttttatttggcgatgttgaactctctaggcacgagcgccaagaactgaaatacaagcgccgcgttcgtgacctggctcgcgaatatagagcagctggtgaacaagagaagctggaggccacaaatcgatatcacatgcctaaggagactcggggccagcccgccagagctgtcgacttggtagaggaagagtctggtgcaccaggagaggaacaaaggcggtgggaggaagctaggcttggggcagcttcactgaaattcggggcaagggatgcggcttcccaggagcccaaataccaattatag

SEQ ID NO: 184955 - DNA, 888 bp, synthetic construct
  misc_feature 1..888: note = Description of Artificial Sequence: Synthetic coding sequence
  source 1..888: mol_type = other DNA
atgagcgaggacccccggggccccaaggtgccccggaaggccgtggtggaaaagcctgcacgcgctgctgaacgcgaagcgcgggccctgctggaaaagaataggagctaccgcctattagaggactctgaggagagctcagaagaaaccgtatcccgtgccggctccagtctgcagaagaaacgcaaaaagaggaagcacttgcgcaaaaaaagagaagaagaagaggaagaggaggccagtgagaaaggtaaaaaaaaaaccggcgggtctaagcagcagactgagaaacctgaaagcgaggacgagtgggaacgtacagagcgcgagagactccaggatctggaggagcgcgacgccttcgccgaacgggttagacagcgggataaagaccgcactcgtaatgttctggagagatctgacaaaaaagcctatgaagaagcccagaaaaggcttaagatggcagaggaagacaggaaggccatggtccccgaactgagaaagaaatccagacgcgagtatctggcaaaacgagaacgagagaagctggaggatctggaggccgagctggcagatgaggagtttctgttcggggatgtcgagttgtcaaggcatgagaggcaggagctgaagtacaagcgcagggtgcgagacctggccagagagtacagagccgccggcgagcaagagaagctggaggctacgaacaggtaccacatgcccaaggagacccgcggccagccagcgagagctgtcgaccttgttgaggaagagtcgggtgcgcctggagaagagcaacgaagatgggaagaggcccggctcggcgcggccagtttgaagtttggggcacgtgatgccgcatcgcaggagcccaaatatcaattgtag

SEQ ID NO: 184956 - DNA, 888 bp, synthetic construct
  misc_feature 1..888: note = Description of Artificial Sequence: Synthetic coding sequence
  source 1..888: mol_type = other DNA
atgagcgaggacccccggggccccaaggtgccccggaaggccgtggtggaaaagcctgcgcgggccgcagagagggaagcccgggctctcctggagaagaaccggtcttaccgtctgctggaggattccgaggaatcttcagaagagacagtgagcagggccgggagcagcttgcagaagaaaaggaagaaaaggaaacacctcaggaagaagcgcgaagaagaggaagaggaggaggcctctgaaaagggaaagaaaaaaacaggtggaagcaagcagcagacagagaagccggagagtgaggacgaatgggaacgtaccgaaagagagagactgcaggatctggaagaaagggatgcttttgctgagcgagtcaggcagcgagataaggaccgtaccaggaacgttctggaaaggagtgataagaaggcatacgaagaggcacagaagaggttgaagatggcggaggaagaccgcaaagccatggttcctgagctaaggaagaagagccgacgcgagtatctcgcaaaacgggagagggagaaactcgaagatctggaggccgaactcgccgacgaggaattcctgttcggggatgtggaacttagccgtcacgagcgacaagaattgaagtacaagcgtcgagtccgggatctggcacgtgaataccgcgccgcaggcgagcaagagaaattggaggctaccaatagatatcacatgcctaaggaaacccgaggccagcctgcacgagcggtggacttggtggaagaagagtccggagctcccggagaggagcagcgcagatgggaggaggcgcggttgggcgctgcctccctcaagtttggagcccgcgacgccgcttctcaagaaccaaaataccaactctag

SEQ ID NO: 184957 - DNA, 888 bp, synthetic construct
  misc_feature 1..888: note = Description of Artificial Sequence: Synthetic coding sequence
  source 1..888: mol_type = other DNA
atgagcgaggacccccggggccccaaggtgccccggaaggccgtggtagagaaaccagctagggccgccgagagggaggccagggctctcctcgagaagaacaggtcctaccgactactagaggatagtgaggaatcatctgaagagactgtgagtagagccggaagcagtctccagaagaagcggaagaagcgaaaacacctccgcaagaaacgggaggaggaggaggaagaggaagcttctgaaaaggggaagaaaaagaccggggggtcgaagcagcagaccgagaagcctgaaagtgaagacgagtgggagcggacagagagggagcggctacaggacctggaggagcgggatgcctttgccgagagagtgcggcagcgggacaaggaccggacaagaaatgtgctggaaagatcggataagaaggcttatgaggaggctcagaaaagactcaaaatggctgaggaggacagaaaggcaatggttccagaactaaggaagaagtcccgcagagaatacctggccaagcgagagagagagaagctcgaggatctggaagctgagttagccgatgaggaatttttgtttggagacgtagaactgtccaggcacgaacgccaggagcttaaatacaagcgcagagtcagagacctggccagggagtatcgggccgctggtgagcaagaaaagctggaggccactaaccggtaccatatgcctaaggaaacacgagggcagcccgcacgcgccgtggatctcgtagaagaagaaagtggtgccccaggagaagagcagagaaggtgggaggaagcccggctgggcgccgcatccctgaagttcggggctagagacgccgcttcccaggaacccaagtatcagttatag

SEQ ID NO: 184958 - DNA, 1683 bp, synthetic construct
  misc_feature 1..1683: note = Description of Artificial Sequence: Synthetic coding sequence
  source 1..1683: mol_type = other DNA
atggagagccagcccgcccaggagtgcctgatgcagatgttcctgccaatagagcccgcttgcttcgtggagtggctgggaacaagcccttctcagttgggcgtcgtgatggtcgatgaggcgcacgaacgtacattgcacactgacatcctatttggtctgatcaaggacgtggccaggttccgaccagagctgaaggtgttggtagcgtctgcaacaatggacacagcccggttctcaaccttttttgacgacgctccagtctttagaatccccggtcgcaggttcccagtggatatcttctacactaaagctcccgaagccgattacctggaagcctgtgtcgtgtcagtgctacaaatccacgtcacacagccaccgggcgatatcttagtctttctgaccggacaggaagaaatcgaggccgcgtgcgaaatgttacaagatcggtgccgtaggctcggttcaaaaatcagagagctcctcgtgctgcccatctatgcgaatctgccttccgacatgcaggccaggattttccaacctaccccacccggcgccagaaaggtggtggttgccaccaatatcgcagaaactagcctaaccatcgaaggtattatctacgtgttggatccaggattttgcaagcaaaagtcttacaatccacgcacaggcatggagagtctgactgttaccccttgcagtaaagcctccgccaatcagcgcgccgggcgcgccggcagggtcgcagcaggtaaatgcttcagattatacactgcatgggcatatcagcatgagctggaagagactaccgtgcccgagattcagagaacctccctgggtaacgtggtgttacttctgaagtcactggggatccacgacctgatgcactttgacttcctggacccacccccttatgagacgctgctactggcactcgagcagctttatgcattgggagccctgaaccacctgggagaactgaccaccagtgggcgcaagatggccgagctccctgttgatccgatgctgagtaagatgattctggcaagtgagaagtacagctgctcagaggagatacttacggtcgcggcaatgttgtcagtcaacaatagcatcttttacagacccaaagacaaggttgtccatgcggacaacgcccgtgtcaattttttcctgccaggtggcgatcacttagtcctgctgaatgtctacacacagtgggcggagtccggttacagctctcagtggtgttatgaaaattttgtccagttccgcagtatgaggcgtgccagagatgtgagagagcaattggagggcctgcttgaaagggtcgaggtcggactttctagctgtcagggcgactatatccgggtgaggaaggctatcaccgctgggtacttctatcacactgcgaggcttacccgaagcgggtacaggacagtcaagcagcagcagacagtgttcatccaccccaatagcagcctatttgagcagcagccacgctggttactgtatcacgagctggtgcttactactaaggaattcatgcgtcaggtgttagagatcgagtccagttggctcttagaggtcgccccgcattattacaaagccaaggagttggaggaccctcatgccaagaaaatgccaaagaagatcgggaagacccgtgaagagctcggatag

SEQ ID NO: 184959 - DNA, 888 bp, synthetic construct
  misc_feature 1..888: note = Description of Artificial Sequence: Synthetic coding sequence
  source 1..888: mol_type = other DNA
atgagcgaggacccccggggccccaaggtgccccggaaggccgtggtggaaaagccagccagagccgccgaacgggaagcccgggctctgcttgaaaagaataggtcatatcggctgctggaagattctgaggaatctagtgaggaaacagtgtcaagggcaggcagtagcctgcaaaaaaaaagaaagaaaaggaagcatctgcgtaagaagagagaggaggaggaggaagaggaggccagcgaaaaaggcaagaagaaaaccgggggatccaagcagcagactgaaaaacctgaaagtgaggatgagtgggagagaactgagagagaaaggcttcaggatctggaggagagggacgcctttgcagaaagagttcgtcagagagataaggatagaactaggaacgtgcttgagaggtcagataagaaggcctatgaggaggcccagaaacggcttaagatggcagaagaggatcggaaggcaatggtacctgaactgaggaaaaagagcagaagagaatatctggccaagagggaacgtgaaaaactagaagatctcgaggcagagctggcagacgaggaattcctgttcggggacgttgagctatccagacatgagcgacaggagcttaaatacaagcgaagggtgagggacctcgctagggagtaccgcgccgccggcgagcaagaaaagcttgaagcaaccaaccgatatcacatgcccaaggagacacgcgggcagcctgccagagcagttgatctcgtagaggaagaatccggtgctccaggagaggagcagaggcggtgggaggaagccaggctgggtgcagcttccttgaagttcggggcccgtgacgccgcatcacaggagcccaaatatcagctgtag

SEQ ID NO: 184960 - DNA, 2010 bp, synthetic construct
  misc_feature 1..2010: note = Description of Artificial Sequence: Synthetic coding sequence
  source 1..2010: mol_type = other DNA
atggccacccccgccggcctggagcggtgggtgcaggacgagctgcactcagtgctgggcctttcagaacggcacgtggctcaattcctcatcggcacagcgcagaggtgtacatccgctgaagagttcgtccagcgacttagggacactgatactctcgacctgtccggcccagcccgcgatttcgccctgagactctggaacaaggtgccaaggaaggctgtcgtggagaaaccagctagagccgcagaaagagaagcccgagctttgctcgagaagaaccggtcataccgactactagaagatagtgaagagtcctcagaggagacagtctcaagagccggtagcagcctgcaaaaaaagaggaaaaagaggaaacacttgcgcaaaaaaagggaagaggaggaggaagaggaggcctccgaaaaaggaaagaagaaaaccggcggatcgaagcagcaaaccgagaagccggagagcgaggatgaatgggagcgaactgagcgcgagcgcctccaagacttggaggaacgggacgccttcgctgaaagagtgcgtcaacgtgataaggatcggacacggaatgttttggaacgttcggacaagaaagcatatgaagaggctcagaagaggctaaagatggccgaggaggacagaaaagccatggttcccgaactgcggaaaaagagcaggagggagtatttagccaaaagagagagggagaagctggaggacctggaggccgaactggccgacgaagagttcctctttggagatgtggagttgagccgacacgaaaggcaggaacttaaatataagcgacgcgtgagggacttggccagggaatatagggctgcgggcgaacaagagaagcttgaggccaccaataggtaccacatgcctaaagaaacccgcggccaacctgcaagggcagtggacctggtggaagaggagtcaggggcgcccggggaagagcaaagaagatgggaggaggccagactgggcgccgcatcccttaagttcggcgctagagatgctgcttcccaggaaccaaaataccagcttgttctggaagaggaagagacaatagaattcgtgagagctacacaactgcagggcgatgaagagcctagcgcaccacccaccagcactcaagcgcagcagaaagaaagcatccaggctgtgcgccgcagcctgcctgtgttcccatttagagaggagctgcttgccgctatcgccaaccatcaggtgctgatcattgagggagagaccgggagcggaaaaaccacacagatccctcaatacctcttcgaggagggttatacaaataaaggtatgaaaattgcttgtactcagccacggagagttgccgcaatgtctgtggcagcccgagtggcccgcgaaatgggagtgaaactgggcaatgaggtagggtatagcattcgatttgaagactgtactagcgagcgcacagtgcttaggtacatgaccgatgggatgctcctgagggaatttctcagtgaacccgacctggctagctattccgttgtaatggtggatgaggcccacgaacggacccttcacaccgatatcctgtttgggctgattaaagatgtcgcccggttcagaccggaactgaaagtattagtggcctctgctacaatggacacagcacgattttctactttctttgacgacgctcctgtgttcagaatccccggtcgtaggttcccagtggacatcttttacacaaaagccccggaagccgattatctggaagcctgtgtggtgagtgtgcttcagatccacgtcacccagcccccaggcgacatacttgtgttcctcactggtcaggaggagattgaagccgcctgtgagatgctgcaagaccgctgccggcgcttaggtagcaaaatcagagaactgttggtcctgcccatctacgcaaatctcccttccgacatgcaggcacgaatattccagccaaccccgcctggagccaggaaatag
